United States Patent Application Publication US 2005/0228172 A9 - sequence listing, part 141

SEQ ID NO: 666949 - DNA, 646 bp, Homo sapiens
gctggcttttgagcctttgagtgcaggggagggtttttgctggtgggttggacatttattaagctttgattgtccccaggagaccctggagggtgccatggcttgaatgtaccccctttaaaattcaaatgatgtcagtgtggtgacattaagaagcaaggcctttaaaatgtgattaggcaatgacgacccatccttgtgaatgggattaaagccttataaaagagactttactcagcattcagttctcttgccctccaccttctgccatgtgaaaatgcaatgttccctccctctgcaccaacaaggcaccatcttggaaggagagagcagctcttgccagacaccaaacctgctagtgacttgatcttggacttcccagtcagcagaactgtggaaaataatttctattcattgtaaattaccaagtctcaggtattttgttaatattaatagcatactatgggctgggcacagtggcttacgcctgtaattccagcacttcggcaggctgaagtgggcggatcacctgaggtcaggagttctagactagcctggccaacatggtaaaaccccatctctacttaaaaaatataaaaattagccaggtgtggtgtcagrcaccagctactcagggcactgaggc

SEQ ID NO: 666950 - DNA, 1605 bp, Homo sapiens
ggcacaagcgcatatgtattctcacgtgagggtatgggcacacagctatacatgcatgcatacagaggcacgtgtgcacgtayagcatgggcaagagagcaggtacacacgtgagaacatgtgttcacacaggcacctgtgcacatatgcatatacacacgtgcacatgctgcacaggcgagagtacacgtggacatgtgccaggatgtctgaagccgtgtctattgcaagcatggcccctctcccccctgcagtggtcctacggcttctacctaattcaccttcaaggaaagcagggcttccagtttttctgcaaaacagaagatatgaagaggaagtggatggagcagtttgagatggccatgtgagttccagggcggcagcccccaggtccctggcagatgagttgtatggggggtggaagcccaggtggattgtgtctgtggttcctctcagaccaggggcggtgggaggcaaagttggaacgtcagggacacagacaacctccatcacccctgggatgccagcctcaagcagtgacatcctctttaacaatcagtccagagtgagagggctctccctctgccacagcctgtcccaggcaggctccgctgtcctgctggaatgagccatcccacccttgaggctgagcctggcacgcccggcccacagagcagtgaccggctgggagtggccatgatgccagaggattcctggtgaccccagtcttcagggtcttacgggctggcggcttggcacctgtttttgaagccacagaactatttttccatgagatccaagaggactcatatcctagatatgtgaaacagagaaagatgatgaacgggttcccggaacacggaccctggagggccagcagggttgtctgtgcttgagctctgcgggcaggtgagctggggcctgcaggcaggtgcactcgcctctctgaccgtttcctctggtgaaatggagaggggaaggcctgtgttctggcctttttgggaggatcgaaagggaaccattggacacagcagggccagggcctggctcgtgagaatagatgcagccagctggtttgcacccaggctctgtgggggaggcctggggcatcttctcttcggccactcgctttccatggcctgtaattttctccccaacatcctattgtgcaaaagttcaagcgttcatggaagctgaagcgacgtgatggtgaatagccgtcttctcaccacgccgccgccatccgcgtcaccccaccccaccccagccatccaacagcgggtctgtgtcaaagtgaattgcacaccagtgcagcccccctgagtacctcagggggcccaatatttgtttagcttctgaaatttcaagcttatatccaatgaggcaaacaaatcttaagtatatgttttctgagttttaacaaatacccacacctgcccacatccaagcccagtcaggaccttagaccaccgtccccacctggaaggttctctcaggccagtgcagcagtgttaaagcttcttctctgacctgccttctacgagcagggagtctgggccctgagtctgccccatgttgcgggcagagccaggcttggagtccagg

SEQ ID NO: 666951 - DNA, 1605 bp, Homo sapiens
ggcacaagcgcatatgtattctcacgtgagggtatgggcacacagctatacatgcatgcatacagaggcacgtgtgcacgtatagcatgggcaagagagcaggtacacacgtgagaacatgtgttcacacaggcacctgtgcacatatgcatatacacacgtgcacatgctgcacaggcgagagtacacgtggacatgtgccaggatgtctgaagccgtgtctattgcaagcatggcccctctcccccctgcagtggtcctacggcttctacctaattcaccttcaaggaaagcagggcttccagtttttctgcaaaacagaagatatgaagaggaagtggatggagcagtttgagatggccatgtgagttccagggcggcagcccccaggtccctggcagatgagttgtatggggggtggaagcccaggtggattgtgtctgtggttcctctcagaccaggggcggtgggaggcaaagttggaacgtcagggacacagacaacctccatcacccctgggaygccagcctcaagcagtgacatcctctttaacaatcagtccagagtgagagggctctccctctgccacagcctgtcccaggcaggctccgctgtcctgctggaatgagccatcccacccttgaggctgagcctggcacgcccggcccacagagcagtgaccggctgggagtggccatgatgccagaggattcctggtgaccccagtcttcagggtcttacgggctggcggcttggcacctgtttttgaagccacagaactatttttccatgagatccaagaggactcatatcctagatatgtgaaacagagaaagatgatgaacgggttcccggaacacggaccctggagggccagcagggttgtctgtgcttgagctctgcgggcaggtgagctggggcctgcaggcaggtgcactcgcctctctgaccgtttcctctggtgaaatggagaggggaaggcctgtgttctggcctttttgggaggatcgaaagggaaccattggacacagcagggccagggcctggctcgtgagaatagatgcagccagctggtttgcacccaggctctgtgggggaggcctggggcatcttctcttcggccactcgctttccatggcctgtaattttctccccaacatcctattgtgcaaaagttcaagcgttcatggaagctgaagcgacgtgatggtgaatagccgtcttctcaccacgccgccgccatccgcgtcaccccaccccaccccagccatccaacagcgggtctgtgtcaaagtgaattgcacaccagtgcagcccccctgagtacctcagggggcccaatatttgtttagcttctgaaatttcaagcttatatccaatgaggcaaacaaatcttaagtatatgttttctgagttttaacaaatacccacacctgcccacatccaagcccagtcaggaccttagaccaccgtccccacctggaaggttctctcaggccagtgcagcagtgttaaagcttcttctctgacctgccttctacgagcagggagtctgggccctgagtctgccccatgttgcgggcagagccaggcttggagtccagg

SEQ ID NO: 666952 - DNA, 617 bp, Homo sapiens
tacagctgtgtaatatgtttgtgttttaagctaagtattattacccaagcttcaaaaagttaacaaaaattaagaagtttataaagttaatttacgattgaagaaagaatgttttaaaaataaatgtagtgtagcctcagtgtccagcgttgataaagtctacagtggtgcacagcaatgtcctaggccttcacattyactcaccactctccagctcacccagagcaacttccagtcctgcaagctccagtcatgataagcaccccatacagctgtcctgttttttatcttttctactgtgtttttaccataccttttctaggctgacctcatgttacaactgcctacagtattcagtaggtctgtagcccgggagcaataggctctgccgtccagcctaggtgtggggtgtgcagtaggctctgccgtccagcctaggtgtggggtgtgcagtaggctctgctgtccagcctaggtgtggggtgtgcagtaggctctgccgtccagcctagctgtggggtgtgcagtaggctctgccgtccagcctaggtgtggggtgtgcagtaggctctgccgtccagcctaggtgtggggtgtgcagtaggctctgccgtcca

SEQ ID NO: 666953 - DNA, 617 bp, Homo sapiens
tacagctgtgtaatatgtttgtgttttaagctaagtattattacccaagcttcaaaaagttaacaaaaattaagaagtttataaagttaatttacgattgaagaaagaatgttttaaaaataaatgtagtgtagcctcagtgtccagcgttgataaagtctacagtggtgcacagcaatgtcctaggccttcacatttactcaccactctccagctcacccagagcaacttccagtcctgcaagctccagtcatgataagcrccccatacagctgtcctgttttttatcttttctactgtgtttttaccataccttttctaggctgacctcatgttacaactgcctacagtattcagtaggtctgtagcccgggagcaataggctctgccgtccagcctaggtgtggggtgtgcagtaggctctgccgtccagcctaggtgtggggtgtgcagtaggctctgctgtccagcctaggtgtggggtgtgcagtaggctctgccgtccagcctagctgtggggtgtgcagtaggctctgccgtccagcctaggtgtggggtgtgcagtaggctctgccgtccagcctaggtgtggggtgtgcagtaggctctgccgtcca

SEQ ID NO: 666954 - DNA, 3236 bp, Homo sapiens
tgcccacctcagcctcccaagctactgggattacaggtgtgaaccaccacgcccagccgtggtctgaaaccttaaagatcagggttgccatttactgagatggagaaaacttacacaaggaggagggtgagggagaagcttctggtgttcagtgctggataattcttaatttggagatgtctaatgaacatccaagtgagattgtcaaggacacagatagatgtgcttggatttcagggaaaatgctgaagaaatttgggagtcctccgcatatagcttatctttgggctcagaactggctgatatttaattttctgcttcttttttgaagaggacagaaatacaaattacttcgttacagaaaagtaaacacttttatgtgttgcacgtccaagattgtggagtgaaattcgtaccttctacgttcagatgggttgcagctctttaaacccagccaggcatgactgatctggagccaggcagggccgggcttgctgggagggtggaggaagcctgcagagctccgagctctctccagtgtttctgcagagcccctggagaacaacagctgactttgtgtattcagtaaagatgcatctgtcatgcctactagcactgttttcatcctgctgagacttgtcggttgaaaagccagaaggaatgcacctggtttgctagcaccaccgaaattttgccaaactaagggatgcagattttagaacaacaatcttccattgttggtggtcatgcgcagttaacaaccatcaccaacagttagtagtaacaatgggttcagtccttyccgtgtgcccagcactccgccaggggctttgcgttcatcctcttgtttcgctcttacatgaagcttgagagggaagtatcatttttatttttatttttttaattttaatttttttttttgagacagagtctcactctgtcacccaggctggagtgcagtggaacgatcacagttcactgcagcctcaacttcccaggctccagtgatcctcccacctcagcctcttgagtagctgggcccacaggcatgcatcactatgccggctaatttttgtatttttggtagagatgggatttccccatgttgcccaggctggaactcctgggatcaagcaatccacctgccttggcctcccgaagtgctgggattataggcgtgagccaccatgcctggctggtaggtattattattatgagctctagttttccacgtattaaacaagcacagagaggttaagcaattttcccaagggcacacagcaagtaaatgaataatcaggaggcgaactcaaatatgtctgactttctagtcttgtgctttggaagaataacaccaggaaatgtcagaagcttcctctttcaccactatgcagtcagtggctagagaaggtgtggtctgggttccccaagtgaccatgtgcctcctcaccagcccctagcacaggatcggcacataattggtgttcagagcttcctgaatgaataaacggatgaatgactgaataaattaacaagcacacaaacgatctgcaaatatcacattgcattgtgcttagtaattaatgagccagctcaggctgtgggctacttgaggagagagacacttccttacatcctgtaacaatgatgtccaacatgccagaaaaatttagagtacaggttaaaatgcatggaccctggaggtggactgcttaggcacaaatcgtgcctcctcttctgtacaagccctgagacccagtgatttgattttctcatctggaaaatgggaagaacagtaatagccattccataaagatttttattaagattaaataaggcggtggcccacacctgtaatcccaacactttgggaggccaaagtgggtggttcatctttggtcaagagttcaagaccagcctggccaacatggtgaaaccccatctctactaaaaataggaaaatgagctgggcgtagtggctggcacctgtaatcccagctattccggaggctgaggcaggagaatcacttgaactctggagtgggaggttgcagtgagccaagaccacaccattgcactccagcctgggtgacagagcaagactctgtctcaaaacaaataaacaaacaaaaacgatggaataagttaagactctggtacataacagctgttcagtaaacattagctgtgtgtccatggaggcacagagaaagaagtccctggctgtccctggtggggtcaggtacagttggcactctgtaacctagaataagaatagataagggtttttacatattctcacttataagtggtagctagataatgggtacacatggacatacagaggaggaagtttctgacatgtcctggttttattcatccaaaacacaagacttgaaaatcagacatatttaagtttgcctcctgattcttcatttaactgctgtatggactgtatgaaaatcagacatatttgagtttgcctcctgattattcatttaattgctgtgtgaccttgggcaaatcacttaacctctctgtgcttgtttatatgtggaaaactggggatcataatagtaatacttactggccgggtgcagtggctcatgcctgtaatcccagcactttgggaggccgaggtgggtgagttgcttgagcccaggagttcgagaccagcctgggcaacatggggaaactccgtctctacagaaaaaatacaaaaattagcctggcatggagactccaaaaggtgggagggtgggaaagggatgaaggatggaacactgcctattaggtacaatatacactatttgggtgatgggtacattaaaaacccagatttcaccactacacactatatccacgtaccacgactgcacttgtacccataaatccataaaaatagaaaatttaatttcaataaataaaaacagtgatggaattagtaccccccaaaatgagggggaagaacagatagggttttcaaacatttattaggtgccaagaactgagctaagcatctactatgtgtcttctaatttaatctttacaacaataacatgagataggcactattattatcccattttcctgatacaaaggctgaggctaagagagattaggtaacttgccaagattcacaaagcaaataagtacagataaagaaaggaatctatgaatactcctccttggtttatgatggggttacatcctgataaacccatcatgagttgaaa

SEQ ID NO: 666955 - DNA, 3236 bp, Homo sapiens
tgcccacctcagcctcccaagctactgggattacaggtgtgaaccaccacgcccagccgtggtctgaaaccttaaagatcagggttgccatttactgagatggagaaaacttacacaaggaggagggtgagggagaagcttctggtgttcagtgctggataattcttaatttggagatgtctaatgaacatccaagtgagattgtcaaggacacagatagatgtgcttggatttcagggaaaatgctgaagaaatttgggagtcctccgcatatagcttatctttgggctcagaactggctgatatttaattttctgcttcttttttgaagaggacagaaatacaaattacttcgttacagaaaagtaaacacttttatgtgttgcacgtccaagattgtggagtgaaattcgtaccttctacgttcagatgggttgcagctctttaaacccagccaggcatgactgatctggagccaggcagggccgggcttgctgggagggtggaggaagcctgcagagctccgagctctctccagtgtttctgcagagcccctggagaacaacagctgactttgtgtattcagtaaagatgcatctgtcatgcctactagcactgttttcatcctgctgagacttgtcggttgaaaagccagaaggaatgcacctggtttgctagcaccaccgaaattttgccaaactaagggatgcagattttagaacaacaatcttccattgttggtggtcatgcgcagttaacaaccatcaccaacagttagtagtaacaatgggttcagtcctttcygtgtgcccagcactccgccaggggctttgcgttcatcctcttgtttcgctcttacatgaagcttgagagggaagtatcatttttatttttatttttttaattttaatttttttttttgagacagagtctcactctgtcacccaggctggagtgcagtggaacgatcacagttcactgcagcctcaacttcccaggctccagtgatcctcccacctcagcctcttgagtagctgggcccacaggcatgcatcactatgccggctaatttttgtatttttggtagagatgggatttccccatgttgcccaggctggaactcctgggatcaagcaatccacctgccttggcctcccgaagtgctgggattataggcgtgagccaccatgcctggctggtaggtattattattatgagctctagttttccacgtattaaacaagcacagagaggttaagcaattttcccaagggcacacagcaagtaaatgaataatcaggaggcgaactcaaatatgtctgactttctagtcttgtgctttggaagaataacaccaggaaatgtcagaagcttcctctttcaccactatgcagtcagtggctagagaaggtgtggtctgggttccccaagtgaccatgtgcctcctcaccagcccctagcacaggatcggcacataattggtgttcagagcttcctgaatgaataaacggatgaatgactgaataaattaacaagcacacaaacgatctgcaaatatcacattgcattgtgcttagtaattaatgagccagctcaggctgtgggctacttgaggagagagacacttccttacatcctgtaacaatgatgtccaacatgccagaaaaatttagagtacaggttaaaatgcatggaccctggaggtggactgcttaggcacaaatcgtgcctcctcttctgtacaagccctgagacccagtgatttgattttctcatctggaaaatgggaagaacagtaatagccattccataaagatttttattaagattaaataaggcggtggcccacacctgtaatcccaacactttgggaggccaaagtgggtggttcatctttggtcaagagttcaagaccagcctggccaacatggtgaaaccccatctctactaaaaataggaaaatgagctgggcgtagtggctggcacctgtaatcccagctattccggaggctgaggcaggagaatcacttgaactctggagtgggaggttgcagtgagccaagaccacaccattgcactccagcctgggtgacagagcaagactctgtctcaaaacaaataaacaaacaaaaacgatggaataagttaagactctggtacataacagctgttcagtaaacattagctgtgtgtccatggaggcacagagaaagaagtccctggctgtccctggtggggtcaggtacagttggcactctgtaacctagaataagaatagataagggtttttacatattctcacttataagtggtagctagataatgggtacacatggacatacagaggaggaagtttctgacatgtcctggttttattcatccaaaacacaagacttgaaaatcagacatatttaagtttgcctcctgattcttcatttaactgctgtatggactgtatgaaaatcagacatatttgagtttgcctcctgattattcatttaattgctgtgtgaccttgggcaaatcacttaacctctctgtgcttgtttatatgtggaaaactggggatcataatagtaatacttactggccgggtgcagtggctcatgcctgtaatcccagcactttgggaggccgaggtgggtgagttgcttgagcccaggagttcgagaccagcctgggcaacatggggaaactccgtctctacagaaaaaatacaaaaattagcctggcatggagactccaaaaggtgggagggtgggaaagggatgaaggatggaacactgcctattaggtacaatatacactatttgggtgatgggtacattaaaaacccagatttcaccactacacactatatccacgtaccacgactgcacttgtacccataaatccataaaaatagaaaatttaatttcaataaataaaaacagtgatggaattagtaccccccaaaatgagggggaagaacagatagggttttcaaacatttattaggtgccaagaactgagctaagcatctactatgtgtcttctaatttaatctttacaacaataacatgagataggcactattattatcccattttcctgatacaaaggctgaggctaagagagattaggtaacttgccaagattcacaaagcaaataagtacagataaagaaaggaatctatgaatactcctccttggtttatgatggggttacatcctgataaacccatcatgagttgaaa

SEQ ID NO: 666956 - DNA, 1554 bp, Homo sapiens
atttatctggtcttcatacaaaaccatgtatgagtgagtaggcagatggtcttatttattacttcgttcaatatatagatttttgagtgcctaccggtatacagcactgaacgaaagagaaaaatactagtttggatgggagctcaacacartctgaggggatatattggacccattttgcagaggaagaaactttggttcaggaagggaaagtgaactctgaagtttgacataaagttagcttcagaactagaatatctgccttctgatctcagcctatcacctatctcaggttctgtctccacgataccatgtgattggaactggctcattaacctggggatggatcaatcagcatcttttttttttttttaacaggattggatggaaatctgcattccttgatcactcagtctatagggtgaacttacaatggccctcatgcttaatcttgaaatacagggatggtctgatggagtgtgctggagaccctgctgagatctttggacaactcctctccagtccactacctgaatcctttctcttctcctcaaaaaaatctgagactatccaaatgaagagtaaataaagggagaagtaagaaggaaacatgagacagagaggcagcaggagcagaatgaaacttggggagcagagggagaagccaagaaaacttactggacttggagccaataaattggccatggcatgaaggtttctgccagcaatatggcagcccattccagctctttccattttcttttcccagctgtgctgccaagcaccatgcttaggctggtttaacagagattatgctaggaggattttctaacattcatgtcctgattaccccttatctgattccttagcagtagccttcagtggcctcagagaattccaggttcagctgtctgaacagttcaatgactgtttgtaagttctgacttacgatcaaggcaggaaatgtgaaaagcatttttaaaaaggaaaaaaaccatccggcgttgttaacatttttgttattccagtattttcccatgcatataaatatgtgtacttcttttatttttcacaagagtactctcacaccataatattgttttataaccctcttttccactgtgctctagtgtaaacattttactgtaccaaatctttttccacaaaaggatttttaattactgcatagatttctattgaacggatgtactaaaatttacctaaacagctcttattattcaacatgattcaaccattgttacaaataatatagttgtatatttatctttatggaaagctatttctgaatactcctaaggataagttcatgtattagttaggttttgctgtgtaacaaatcatcgcacaacttagtggtgtcaaacaatgactatttacttacctctgcaggtctgcattttgggccaggtagttctgctggactaggctggaatcagtggacataggctctggttacttatgcatttgcaatcagctgggggactgcatgggatgatggtggtatgtcatcttccagcaggccaggttgtttcc

SEQ ID NO: 666957 - DNA, 1554 bp, Homo sapiens
atttatctggtcttcatacaaaaccatgtatgagtgagtaggcagatggtcttatttattacttcgttcaatatatagatttttgagtgcctaccggtatacagcactgaacgaaagagaaaaatactagtttggatgggagctcaacacaatctgaggggatatattggacccattttgcagaggaagaaactttggttcaggaagggaaagtgaactctgaagtttgacataaagttagcttcagaactagaatatctgccttctgatctcagcctatcacctatctcaggttctgtctccacgataccatgtgattggaactggctcattaacctggggatggatcaatcagcatcttttttttttttttaacaggattggatggaaatctgcattccttgatcactcagtctatagggtgaacttacaatggccctcatgcttaatcttgaaatacagggatggtctgatggagtgtgctggagaccctgctgagatctttggacaactcctctccagtccactacctgaatcctttctcttctcctcaaaaaaatctgagactatccaaatgaagagtaaataaagggagaagtaagaaggaaacatgagacagagaggcagcaggagcagaatgaaacttggggagcagagggagaagccaagaaaacttactggacttggagccaataaattggccatggcatgaaggtttctgccagcaatatggcagcccattccagctctttccattttcttttcccagctgtgctgccaagcaccatgcttaggctggtttaacagagattatgctaggaggattttctaacattcatgtcctgattaccccttatctgattccttagcagtagccttcagtggcctcagagaattccaggttcagctgtctgaacagttcaatgactgtttgtaagttctgacttacgatcaaggcaggaaatgtgaaaagcatttttaaaaaggaaaaaaaccatccggcgttgttaacatttttgttattccagtattttcccatgcatataaatatgtgtacttcttttatttttcacaagagtactctcacaccataatattgttttatarccctcttttccactgtgctctagtgtaaacattttactgtaccaaatctttttccacaaaaggatttttaattactgcatagatttctattgaacggatgtactaaaatttacctaaacagctcttattattcaacatgattcaaccattgttacaaataatatagttgtatatttatctttatggaaagctatttctgaatactcctaaggataagttcatgtattagttaggttttgctgtgtaacaaatcatcgcacaacttagtggtgtcaaacaatgactatttacttacctctgcaggtctgcattttgggccaggtagttctgctggactaggctggaatcagtggacataggctctggttacttatgcatttgcaatcagctgggggactgcatgggatgatggtggtatgtcatcttccagcaggccaggttgtttcc

SEQ ID NO: 666958 - DNA, 647 bp, Homo sapiens
cgtgtaaagtgtccccctcccccgtctttggggctcatgtctaaaagacagattgcaaattggctctccaggaccaaaagtyacccgcagctctgtgtagcccttagggtgtcttacttgtgaatttgatgtgaacgttttagaactgggagatttcacatacacatcctaatttccaactttaactttgctgagaaatggtctcactttcgcttgaaaacaatcgtttggagctgagagccgtcgtcgtagatggggaacagccttaccattttgtctcagttgatcccagtggggaacacttcacccatttctggcccctgtgggcatttaagtttgcaacctctcatctggaaagtttgtgtgttatgttttctttttaatttaaattttaatttttcactcttgggcttggtaagattgagtttggtaagaaacggcacatttctggggtattgtatctttaggggcaaagtgaccaccaccctggtgagctgggtttaaatcaaaagaaagtatttgagtgtggaagagtctgacgtgatttagcactgactgacagttttgtggctgcacctccaccctccagggaaaagtaaagtgatccctagtgagtgtaggtggcatcgtcagtggtgcagaatgtt

SEQ ID NO: 666959 - DNA, 647 bp, Homo sapiens
cgtgtaaagtgtccccctcccccgtctttggggctcatgtctaaaagacagattgcaaattggctctccaggaccaaaagttacccgcagctctgtgtagcccttagggtgtcttacttgtgaatttgatgtgaacgttttagaactgggagatttcacatacacatcctaatttccaactttaactttgctgagaaatggtctcactttcgcttgaaaacaatcgtttggagctgagagccgtcgtcgtagatggggaacagccttaccattttgtctcagttgatcccagtggggaacacttcacccatttctggcccctgtgggcatttaagtttgcaacctctcatctggaaagtttgtgtgttatgttttctttttaatttaaattttaatttttcactcttgggcttggtaagattgagtttggtaagaaackgcacatttctggggtattgtatctttaggggcaaagtgaccaccaccctggtgagctgggtttaaatcaaaagaaagtatttgagtgtggaagagtctgacgtgatttagcactgactgacagttttgtggctgcacctccaccctccagggaaaagtaaagtgatccctagtgagtgtaggtggcatcgtcagtggtgcagaatgtt

SEQ ID NO: 666960 - DNA, 1505 bp, Homo sapiens
attctattagtgagcactattaatatcctcattttacaatgacaaaaaccaaagctcagaaaaattaacttgaccatgctgtaagtaacagagccaagatgcaaaacctaggcagtatgcctccggatcttatgaccacattcactgtactgtgctgcttcagggtctggaagaggagaccaccagtgaaagatatgcatgtgtctgtagtttgtgcgttctttctcaggaacgaaactagctgaatagagtagggatctggcagaatcagggattcctaacccctggggaatcttgaaaacatgtgtcatggttataagaagcaactctcagctagctcacacctggcaaactacatggtcaatttttcaccattactcctggctgaaacccaaagtaacacatttaaacataacctcatgtgaayctaaaataaatgaatgaacgactaaattcatcaaaagtcccagtttcttctttaccaatttttttctttctttctttcttttttttgagacagggtctcactctgtcacccaggctggagtgcagtggtgtgatcacagctcacttcagcctcaatcgatctcctgcttcagcctcctgagtaggtagcaccacaggcatgagccaccacactcagctaatttttttttttatttttagtagagaggagatctcatcatgttgcccagcttggtctcaaacttctgggctcaagtgatccgcccgcctcagcctccaaagtgctgggattacaggcgtgaaacaccgcacctggcctatacctatttctatactcttataacttacctgtatcctcataatttttgaattttataatcttaaaaatatttcatcataaaggcaaaaattataggtaatatatatttcaggataagaaagtgcatatctgtgtactcaccactcagctgaagatagcattctaagatctttgaaatgccctgtgtactcctctccagtctcatatttctctattcctctacccccagaaagtattcagaattatgtgttaatcattcccttgcttgctttattgccttactccagggattctcaaaaggaagactattgacattttggatgggataattctttgttgtgggggactgtgctgtgctgttatgggttaaattgtgtctctccaaaagatatgctgaattcctaactcccaatacttcaaaatgtaccctatatggaaatagggtcattgtagacataatcagtaaagatgaggtcatactggagcagggtgggctcttaatgcaatgtgattggtgtggtataactctacatgaatggaataatactacatgtgttcttttgtgacttgctattttttcatcagtgttatatttttgagattttagccaagttgccatatgtaacagtaatgtagtgatttctaggcatgttatcagtatgcctagttcccttctcttttttctatccaggaaaaaaggtggaggcaggtaagttttcta

SEQ ID NO: 666961 - DNA, 1505 bp, Homo sapiens
attctattagtgagcactattaatatcctcattttacaatgacaaaaaccaaagctcagaaaaattaacttgaccatgctgtaagtaacagagccaagatgcaaaacctaggcagtatgcctccggatcttatgaccacattcactgtactgtgctgcttcagggtctggaagaggagaccaccagtgaaagatatgcatgtgtctgtagtttgtgcgttctttctcaggaacgaaactagctgaatagagtagggatctggcagaatcagggattcctaacccctggggaatcttgaaaacatgtgtcatggttataagaagcaactctcagctagctcacacctggcaaactacatggtcaatttttcaccattactcctggctgaaacccaaagtaacacatttaaacataacctcatgtgaatctaaaataaatgaatgaacgactaaattcatcaaaagtcccagtttcttctttaccaatttttttctttctttctttcttttttttgagacagggtctcactctgtcacccaggctggagtgcagtggtgtgatcacagctcacttcagcctcaatcgatctcctgcttcagcctcctgagtaggtagcaccacaggcatgagccaccacactcagctaatttttttttttatttttagtagagaggagatctcatcatgttgcccagcttggtctcaaacttctgggctcaagtgatccgcccgcctcagcctccaaagtgctgggattacaggcgtgaaacaccgcacctggcctatacctatttctatactcttataacttacctgtatcctcataatttttgaattttataatcttaaaaatatttcatcataaaggcaaaaattataggtaatatatatttcaggataagaaagtgcatatctgtgtactcaccactcagctgaagatagcattctaagatctttgaaatgccctgtgtactcctctccagtctcatatttctctattcctctacccccagaaagtattcagaattatgtgttaatcattcccttgcttgctttattgccttactccagggattctcaaaaggaagactattgacattttggatgggataattctttgttgtgggggactgtgctgtgctgttatgggttaaattgtgtctctccaaaagatatgctgaattcctaactcccaayacttcaaaatgtaccctatatggaaatagggtcattgtagacataatcagtaaagatgaggtcatactggagcagggtgggctcttaatgcaatgtgattggtgtggtataactctacatgaatggaataatactacatgtgttcttttgtgacttgctattttttcatcagtgttatatttttgagattttagccaagttgccatatgtaacagtaatgtagtgatttctaggcatgttatcagtatgcctagttcccttctcttttttctatccaggaaaaaaggtggaggcaggtaagttttcta

SEQ ID NO: 666962 - DNA, 652 bp, Homo sapiens
tgacagtttgagtgagatgcagctgcgctggcattccgtgcaggtgttcaccagctctgaaccatcaaggacgcgggaggctgggtgtgcaggagagagctccgcccgggaccctgcacacaccatctccatctccggcaagacggtacttggccctgctctaaggagctgatcactgctgccttcgtgaccctgagactggctttgtcttggggaagtcatttcttagaagtgtctttgtagacgtaagtcagtatagtggggtaaaggagtagagtttccatatggccattgcatrcgaatgtttttttaatgcaaatgtgttcatggtcatgggtggtacactggctagttttaaatatgagccctcagagctgcaggagaaggccacatgaatgcctccaccacagacctaggtagggtgagtttcttctcacggaagggcagcagagtggcctcctacctgtgccatgtggacacctgccgtgtgcgcagggtctgctggcctgagctgtcctcacgcaccccctcttcctgcaggatgcggtgacggtgctcctggccagaaccacggcacagctgcaggcggtggagagggaactggccgaggagcgggccaagctggagtacacggaggaggaggtcctggaga

SEQ ID NO: 666963 - DNA, 652 bp, Homo sapiens
tgacagtttgagtgagatgcagctgcgctggcattccgtgcaggtgttcaccagctctgaaccatcaaggacgcgggaggctgggtgtgcaggagagagctccgcccgggaccctgcacacaccatctccatctccggcaagacggtacttggccctgctctaaggagctgatcactgctgccttcgtgaccctgagactggctttgtcttggggaagtcatttcttagaagtgtctttgtagacgtaagtcagtatagtggggtaaaggagtagagtttccatatggccattgcatgcgaatgtttttttaatgcaaatgtgttcatggtcatgggtggtacactggctagttttaaataygagccctcagagctgcaggagaaggccacatgaatgcctccaccacagacctaggtagggtgagtttcttctcacggaagggcagcagagtggcctcctacctgtgccatgtggacacctgccgtgtgcgcagggtctgctggcctgagctgtcctcacgcaccccctcttcctgcaggatgcggtgacggtgctcctggccagaaccacggcacagctgcaggcggtggagagggaactggccgaggagcgggccaagctggagtacacggaggaggaggtcctggaga

SEQ ID NO: 666964 - DNA, 603 bp, Homo sapiens
agggtgcaagcaggtagtgttttgcttactcagaggaaatgctctgtgtgcctgcgtaacagctgcacttactggcgatgcttctggatgcttcgctgttctgtatgtttgtatgaacgccgtgcaggtatgctgccaggccgctgcacttcctgaataggtttactggcgtggaaaataaggccacgaaggcagggatgttggatttcacacagattgacactgatcctgaggtgagaccctgccaccaaaatgaaggctgtaatgacttggctcccataaagatgacattctttacttcctgtttaaaagcacgccctgtcctttgatgggcacagctgcagttggcaatgttggcttgtcctactaccagaagtgagtctcttttttggaagtcactttccccagctattgccaaagccacaaatacagcacatgagaaagactgaggaaaagtsaaccgtgctgagggcagcgctagccttcatgggggctgtacagggcacaaaatggcattggtatcgatcacacagagattttgttggctcagttagcctggaaactgggggagggtttcgtttgctttgtttttgttttgttttg

SEQ ID NO: 666965 - DNA, 1351 bp, Homo sapiens
tcagttcccttgtttttttctgaatagaaaataggcaagaaagtataggaattcaagttagttttagaacatattttacaacataaatccagaaggagcagtgcattctttgtaggagaggcttcgaggatgttaaacatgatgaagaatgtccacaaaccaacccacatatgacatccaaagtctcaaggaattaagttagaaagtgctgaaaatcactttcatgagatagtgagtagaatgttgtaaacactagacagactcaaatacatgggattcatatgccaagaccactatttgttctgaaaattcacttaagtttttgagtctttgttgccactgtgaaaagggcaacaatgaaatgaaatagcatatgcaaaagcagtttgtaaatataacaaatataaggtgccatctttaaatgagtgaaaatacttgtcaataaataaatctacaaagtcctcagaagagggggtatataatttgtttctttctttatgtttttccttaaagaacgagtggtcaagctatggtaaacagaacaatgtcctccaaagatgtccatgtccaaatccctggaaactgtggacatgtaaccttacatggcaaaagagaatgtgcagatgtgattacgttaaggatcttgagttagggaaatcatcctgtggtctttgggtgggcccacaagaatccttaaaagtgaaagagagaagcagaagagtcagagtcaaagatgatgaacggagaggtcagactgatgtgactgctggctttgaagacagaagggccccagaagccaaagaatgcaggcagctgctagaagctagaaaaggaaagaaaataattcttaactagagcctccagaaaataatgcaaccctaccaataccttgattttagcccggtgagacctatgtcagacttctcacttccagaagagtaaaataataaatttgtgttgtttaagccactaagtatgtaataatttgttacagcagccataggaaactagtaacacaagccacaggagagtgcacagttggcttctagcccgcggggttataaccacagggctgggtaactttaaaccagtctctttctatttaaagtaaaraagttgaactaaagtgattcctcaggtctcctccatttcaaaaatattataattaagtacactatcttctttctttcttttttcccatctttcctacctttccccttcttggaaaaaaaaaagagatatttcctctctgttgtattttatgcttcaggaagaaggtaattccttgtgctagctcacctggtagcaactactgagggataatgagactcacttaccctgacaagccatg

SEQ ID NO: 666966 - DNA, 581 bp, Homo sapiens
tctattaattttaaattaagaaatgtggagatttgctatgttagaaccaaagctttcctgattctctgaggataactgtgtgtgtgtttgacctctagagctgaagtcacggtgttagccccttgtgacattagtgttcagaagctctttctatgcatggataaatcttggttgtctagcacaggttgtgaaacatamtaggggctcattaaatatttgtttaatgaataaatgaaattattatgcaataaaattaaaaatgtaatgtttaccaaactactctcagtacatttgtttcagtgattttttcatacaatcatacatgatatcagaccacatgtaatatatataaaaaggatagctgtcagtaaaatggaaagaatccttgtctccatctcactggcttgattgatatatactcatatccaatatttcctatagacaggctaccataattaatttgattattctttcacataattttgatggatcaagatgcagacgatttataatttctaccaatccaaagtgtacagtgtatgtttattttggtctgtaatctccaaacagtcattgtcatc

SEQ ID NO: 666967 - DNA, 1271 bp, Homo sapiens
tgaatagctctataagggttggtgtcgacaaggccaaagttagtggattcttcattatgattcatggcctcttgtagtcagaaacacccagcaaactgagccataaccacagctctgggtttggttgctttgatcttagtcaatgacctggaaatctttcttaataataggagcacacagattcattctgtagcacagcaaattgtttattcttgtttgggtcaaattgtttagggaaggggttgtgactgaggwtcttacttctggaggcaaggaatggtgggctgaatttatggtactctttcctgccctgcccttgtgcttcatgaagatgatggcacaacagctgtggccttagtctttacccaactgctaatatctaataatagttactaccatttactgggtactggactgtgacttttacttaccttgtcgtttaactctcaagaaaaagctaagaagtacacattattgtttccatttcagggatgatgaaactgagagtctgagaagtctgtaagtatagtatcagtaactgctttcattggaatattgtgcagattcataaatacatacatagtgctggggtgtgtgtgtgtgtgtgtgtgtgtgtgtgtgtgtgtgtgtgtgagagagagactgagcactggacactgtgcctgggacaagagaagcactaagtaaatgagagtcacatttttttttgtccgacatagcactgactattttgccaatgcctacctagcagattcaataggtaatggttgaattgaattaaaatctcactaaatatttttcaagttggctttccttctgtaattagctttcttacaatttgagtggtaattggttgatggaaagaataattaataataaaggttgtttatttgtggggtgagcatttatcactgttctcattttcactcttttccatcagcatttaattcacgaaaaggagtataagttaactatagagaaattatattactgaatattgaatggcaattacaatacataatatgttttccttttaattagcaaatagactgttcattatgttttagataattgttacatatcacttcattttatttctttatcatttgtggcaggtgattacgtttccacagggtataatttttaatcacattattttgaaatttgattgcaagattatgcagtacagaattcagtgtattcaaatcaccctgaatctctcacattctttgcttctggaaaatttgcccttctttcttcttccctgaata

SEQ ID NO: 666968 - DNA, 1462 bp, Homo sapiens
ccatttcctaacaaagttgacattctctgtcttcactgcactataaaaacaagaaacgacaaatgaattcaaatgttgaggaaagaatgaaccagaaacagggtcttctggttttccccagaagcctatcctgaggcaagcattccactctaagtacaataattatttagaaggtgcaaaaccaaaacaaaccaaaaagaaaccgccacagtagaatggggaagttaccggggaagtaagaaaggcaaggcagccaataaaggatgtattactwagtcagttaccgctgtgggttcctggaacttactggtgctggggacattctgagaaccagtacaaaacacacacatacacctcggttattccacccagggcagaaagagctgagatatttatacatcaacttctctcaggcattgagtgagagcaaccagaggggcattcattccctggcacttccggcctgcttgcataagcaccagtggcagtgggctccagcaacaggagaatgccctaaacaaagaagtccatgagctggtaagttagaagtcaagctgtgtgctcggaagtggtaaaggtgagaggataaaggcagcccacttacacacagtatgtgtcacagcagggtaggagaattaccttaacacatgagagaaattatcttccgaaggaggatttctatgattttagcaggaaaatgtgaatgttgtgatttatttcaagattacttaaattatagaatatttctgggggtgtgtttctcaaaaatattcctttgaggttgtgccttcagaaataatctgtgaagacaaaaggagagtggcaaggtacagtctttgcatagagtatttctatccactttaaattcatgcaaacttaaatatcgtcattttattctatttattttagcatgttaaaagaattacattaatttatttgtgctaaatgagaaggtaccctcaatgagaaaaaaaggtaatgggttgcatgctgagaataacctatggattaatatttaaagtttctcaagagatgatgtaataataaaatccctgggacagatagtataatggcattagtcatagatttccggaaatgctaatccaacgtcttttaacactggaggtgttttattcatagaaatctgtaataattattgatccaaaatatgcttaggttgtatttgattctttcttaatagcctatgatggaactgtataatttttggtatttatttttttcactctggtccataaccaccatatcttgatatttttcccttttagaagtttctcatagctctgcaaatgttggagaattttgaagaatataatttgacaggttaatttgaatgctaaagattgtcataatttaatattaccagggagaaatgaatattcacttttccaaaaatatagaaggaaatgacttactcttggagaactttaaaaaataatatgca

SEQ ID NO: 666969 - DNA, 1598 bp, Homo sapiens
tcttgtcctgggtcctgtggctgtcagggcaggctggctcaagcttactcacctggtaaatggagctgagattcaagcttggaccccgaggtctgggctgtgtgagatgggaccctgccctgggtcagctcatcttccaggtaggaagctgccacctcaggaagccgatgggaactgaaagactctatggttagaggcaggagaacgacataatttgtggggccatttacagaaagaaaatgcatagccccttgtttaccaatgactaagaatttccaaatgctgacagtagatcayatgaggcatcctaagggcaagcatgagatccttctaagggtagagtcctatgcaactgcatgggtcgcatgccactggtggggggcttcctggaggtggtggcattgggttctctcaatccccctgataatagacaggattgagtgtggtggaaagaaggggcaagagccaacggaaaagatgaggatcatctatgtataggactcatcagtggcttcttttaaaaatgaatttatttaaacaaaaatatcagtcatttaaagaaaaaattaaggaaataagagcacatgtgatgtacagatatggagaaaaaaattgagttgtgtcatttgaacgactggagtttgggaaattgctatctgggtgtgtgcatctacagtgtgtaattgtgaatctatgcatgggagtctgcatatggatctttgattgtatccatggaaatgagtgagtctatgagtgtgggtgtgtgatatatttataaaagtatgtgaaagtgacagtgtgtctgagcacatgttattgtgtgactgtgtataagggggtctggggaggaaaatttttcttatcctaagcttctccaagggaaatgtacaattgtggacttgtttacactgagcacatctctaatacttctgtatctgtcagctattgccacaataatgctgtgtaacaagtatctctctaccccacttagtggcttcaaatgacaaacagaaatgggaatagactggggataagagtaagacttctctaaaaaaaaaaaaaaaagaaaagaaatggggagagattgctaatacaataggtatagggtttctttttggggtgatgaaaacattctaaaattaattgtggtgatggttgcacagctataaatatgctaaaaactgctggattatactgtttacattggtgaatttaacagtacatgaatgacatttcacatactattaaaaagccacaacaacaaacattgattttcttgcttgtgagtgtacgaattaactgtaggtctgctggaatcacttgggcttggctcctggctgcagttgtgttctggtatgttccatgtatttcttctacatttttttttttaatcctcttgggtcagcaactactcaggcatgttcaaggtggctagcagaagtgcaaggggatgagcagacacatgtaatgtttcttaacaccttggcttggagctagcacatcacctctgcacacattccactggcaaaaaatctatgccactatctatagctattgccaagcctgacatcaacaggaaagggaaatagactttcctc

SEQ ID NO: 666970 - DNA, 2436 bp, Homo sapiens
tgcctggcactcaacaccaaggaggtctcgaaaaacatctggaagagatcatggggttcctgcccccactgtccatccttcccctgcttctctgcacaagtgcacatagcctcacccaagcacacatgggtacatgtgtrcacatacaacagcacacatacattcacccttccggcacatgcatcctcacacatgtatacgtgcatgtgcacacatacccacatacataaacacactcctatatgtgagtatgcacacaatccaccttctcacacattctcaaatgcacctgtctgcgcacacattctcacgcaaaacacacatgttctccctcacgcatggctataagtgcacgtgcatgcatccttatacacacattcacacacaaacgtgcactctgtatacacacgaacctgcaccttacatcttcacacatgtccatgcgtataggttaatgtacacgtttaccctcatacacaagcacacacatacatgcattttcacacatgcatatgtgtgcacacattgtcatagtgccttcacacacatgcacacacacatgtgcatcctcacatacatcctcacacctacataccccccatgccctatacttgggtgaacactcatcctctcatacacaaagcccttttgagctgatgcttctcccagagttaatttgactgtctcctccatgacaaggaggggccagtgactgggtctggtttccatttggagctcgcagcctggcacccagcttgacagacagatggtagcaaaggcccatagccccaggtcacccacgggccccagaggagtgttcctgccatccatccatcacccaagagccagcaccctggagttggatcagtgtggtcctcacagtagcttggtgaccatgaataagtttcacagcctgagtcttagtttttcatccaaaaagggtggttaacacttatttcatggagttgagaaggctaagatgacagaggtgaagtggccacacatagtaggtgatcaggaaagagctctttcaggcggctgccctgggccaccagaactccctggccaccattctccagggccccaggcacactggggtgggaactaatgaaatccaaatgtgaaactctaggcctttcatgtggttgctggtcagaagcacatttgataaggtgtcccggctgtcctggccgtccctacatgaagtctgtctagccaaggcatttccaggggtctaatgagaagggaactgtggttgggtgatttcgaaggtgatgggaaagacgttgtttttcatttataaagctgccagggccagttggggaaaagcagaggaaagggaaactacaagaaagtagatccaaagaaacagaacctgaaagagctccccaggctgctgcctagaacatctggaactaagctaatgggcatggagggagagcagctgccaagccatctcttggcacgagctctgagagccgcctgagggagctggagcagacgccgtgggacttttcccctgagttattgcagcttcctcctggagccggcccggggtggcggctcaaacatggaaatgtggtctgaatcctcttcccagcaaccgctgctgggcctcagtttctctctgtgaggcgggcagttgagcgaaatgaaattataatatttaattataatattgcgagtgtcagacactgcgctgagttctgcatgtggatcctcttaatccttaaaacaactccagaggtggcaatgattgcacccactttacagatagaataactggtcagagagggtgtgtgtgtgttacctaaggtcacggagccagcaagggcaccgggtgagaatttgaacccagagccactggcttcctaaccacagcgctctcctgctgagcagggacaagtactcatcttcccagctctccctgcagtcagggagccagaacaccctgggaccggaaactgctgcctggatgacctcagccagctacctcgtttcgcagacggggaaagtgagaaccagagaaggccggtgactggcccaaggtcacgttgtgtcccatatcctcctctcattcccggacgtccagctccccaacagccccagcacagagctggggaaaaatcttcagagacatccccttgggaagacagctggaaggcagggctgagccggggtcatttgtgacccagcggtgaggtgatgaggtactgacgaaagtactgtatttcccccttttgagaaacgctttggcatcagatgagtcttgggggagggaggagaggaatttggcagggatctggttataagccatctggagggtggcgtgaggaccggaaaagccgctgcccgttctgtttggtctcatcccctgaatgaggtcactgaatgtgcacgggaggctcagcgctgccccactccagcctgatggag

SEQ ID NO: 666971 - DNA, 2436 bp, Homo sapiens
tgcctggcactcaacaccaaggaggtctcgaaaaacatctggaagagatcatggggttcctgcccccactgtccatccttcccctgcttctctgcacaagtgcacatagcctcacccaagcacacatgggtacatgtgtacacatacracagcacacatacattcacccttccggcacatgcatcctcacacatgtatacgtgcatgtgcacacatacccacatacataaacacactcctatatgtgagtatgcacacaatccaccttctcacacattctcaaatgcacctgtctgcgcacacattctcacgcaaaacacacatgttctccctcacgcatggctataagtgcacgtgcatgcatccttatacacacattcacacacaaacgtgcactctgtatacacacgaacctgcaccttacatcttcacacatgtccatgcgtataggttaatgtacacgtttaccctcatacacaagcacacacatacatgcattttcacacatgcatatgtgtgcacacattgtcatagtgccttcacacacatgcacacacacatgtgcatcctcacatacatcctcacacctacataccccccatgccctatacttgggtgaacactcatcctctcatacacaaagcccttttgagctgatgcttctcccagagttaatttgactgtctcctccatgacaaggaggggccagtgactgggtctggtttccatttggagctcgcagcctggcacccagcttgacagacagatggtagcaaaggcccatagccccaggtcacccacgggccccagaggagtgttcctgccatccatccatcacccaagagccagcaccctggagttggatcagtgtggtcctcacagtagcttggtgaccatgaataagtttcacagcctgagtcttagtttttcatccaaaaagggtggttaacacttatttcatggagttgagaaggctaagatgacagaggtgaagtggccacacatagtaggtgatcaggaaagagctctttcaggcggctgccctgggccaccagaactccctggccaccattctccagggccccaggcacactggggtgggaactaatgaaatccaaatgtgaaactctaggcctttcatgtggttgctggtcagaagcacatttgataaggtgtcccggctgtcctggccgtccctacatgaagtctgtctagccaaggcatttccaggggtctaatgagaagggaactgtggttgggtgatttcgaaggtgatgggaaagacgttgtttttcatttataaagctgccagggccagttggggaaaagcagaggaaagggaaactacaagaaagtagatccaaagaaacagaacctgaaagagctccccaggctgctgcctagaacatctggaactaagctaatgggcatggagggagagcagctgccaagccatctcttggcacgagctctgagagccgcctgagggagctggagcagacgccgtgggacttttcccctgagttattgcagcttcctcctggagccggcccggggtggcggctcaaacatggaaatgtggtctgaatcctcttcccagcaaccgctgctgggcctcagtttctctctgtgaggcgggcagttgagcgaaatgaaattataatatttaattataatattgcgagtgtcagacactgcgctgagttctgcatgtggatcctcttaatccttaaaacaactccagaggtggcaatgattgcacccactttacagatagaataactggtcagagagggtgtgtgtgtgttacctaaggtcacggagccagcaagggcaccgggtgagaatttgaacccagagccactggcttcctaaccacagcgctctcctgctgagcagggacaagtactcatcttcccagctctccctgcagtcagggagccagaacaccctgggaccggaaactgctgcctggatgacctcagccagctacctcgtttcgcagacggggaaagtgagaaccagagaaggccggtgactggcccaaggtcacgttgtgtcccatatcctcctctcattcccggacgtccagctccccaacagccccagcacagagctggggaaaaatcttcagagacatccccttgggaagacagctggaaggcagggctgagccggggtcatttgtgacccagcggtgaggtgatgaggtactgacgaaagtactgtatttcccccttttgagaaacgctttggcatcagatgagtcttgggggagggaggagaggaatttggcagggatctggttataagccatctggagggtggcgtgaggaccggaaaagccgctgcccgttctgtttggtctcatcccctgaatgaggtcactgaatgtgcacgggaggctcagcgctgccccactccagcctgatggag

SEQ ID NO: 666972 - DNA, 2436 bp, Homo sapiens
tgcctggcactcaacaccaaggaggtctcgaaaaacatctggaagagatcatggggttcctgcccccactgtccatccttcccctgcttctctgcacaagtgcacatagcctcacccaagcacacatgggtacatgtgtacacatacaacagcacacatacattcacccttccrgcacatgcatcctcacacatgtatacgtgcatgtgcacacatacccacatacataaacacactcctatatgtgagtatgcacacaatccaccttctcacacattctcaaatgcacctgtctgcgcacacattctcacgcaaaacacacatgttctccctcacgcatggctataagtgcacgtgcatgcatccttatacacacattcacacacaaacgtgcactctgtatacacacgaacctgcaccttacatcttcacacatgtccatgcgtataggttaatgtacacgtttaccctcatacacaagcacacacatacatgcattttcacacatgcatatgtgtgcacacattgtcatagtgccttcacacacatgcacacacacatgtgcatcctcacatacatcctcacacctacataccccccatgccctatacttgggtgaacactcatcctctcatacacaaagcccttttgagctgatgcttctcccagagttaatttgactgtctcctccatgacaaggaggggccagtgactgggtctggtttccatttggagctcgcagcctggcacccagcttgacagacagatggtagcaaaggcccatagccccaggtcacccacgggccccagaggagtgttcctgccatccatccatcacccaagagccagcaccctggagttggatcagtgtggtcctcacagtagcttggtgaccatgaataagtttcacagcctgagtcttagtttttcatccaaaaagggtggttaacacttatttcatggagttgagaaggctaagatgacagaggtgaagtggccacacatagtaggtgatcaggaaagagctctttcaggcggctgccctgggccaccagaactccctggccaccattctccagggccccaggcacactggggtgggaactaatgaaatccaaatgtgaaactctaggcctttcatgtggttgctggtcagaagcacatttgataaggtgtcccggctgtcctggccgtccctacatgaagtctgtctagccaaggcatttccaggggtctaatgagaagggaactgtggttgggtgatttcgaaggtgatgggaaagacgttgtttttcatttataaagctgccagggccagttggggaaaagcagaggaaagggaaactacaagaaagtagatccaaagaaacagaacctgaaagagctccccaggctgctgcctagaacatctggaactaagctaatgggcatggagggagagcagctgccaagccatctcttggcacgagctctgagagccgcctgagggagctggagcagacgccgtgggacttttcccctgagttattgcagcttcctcctggagccggcccggggtggcggctcaaacatggaaatgtggtctgaatcctcttcccagcaaccgctgctgggcctcagtttctctctgtgaggcgggcagttgagcgaaatgaaattataatatttaattataatattgcgagtgtcagacactgcgctgagttctgcatgtggatcctcttaatccttaaaacaactccagaggtggcaatgattgcacccactttacagatagaataactggtcagagagggtgtgtgtgtgttacctaaggtcacggagccagcaagggcaccgggtgagaatttgaacccagagccactggcttcctaaccacagcgctctcctgctgagcagggacaagtactcatcttcccagctctccctgcagtcagggagccagaacaccctgggaccggaaactgctgcctggatgacctcagccagctacctcgtttcgcagacggggaaagtgagaaccagagaaggccggtgactggcccaaggtcacgttgtgtcccatatcctcctctcattcccggacgtccagctccccaacagccccagcacagagctggggaaaaatcttcagagacatccccttgggaagacagctggaaggcagggctgagccggggtcatttgtgacccagcggtgaggtgatgaggtactgacgaaagtactgtatttcccccttttgagaaacgctttggcatcagatgagtcttgggggagggaggagaggaatttggcagggatctggttataagccatctggagggtggcgtgaggaccggaaaagccgctgcccgttctgtttggtctcatcccctgaatgaggtcactgaatgtgcacgggaggctcagcgctgccccactccagcctgatggag

SEQ ID NO: 666973 - DNA, 1416 bp, Homo sapiens
acaaatattgtaatcccaagtggcatcctccaccgcacccagacagactcacagcgygtgtgggctgcgtttggtgagggagaggctgaatggaacatccatgtattctctcctgcattcattcattcactctcacttagtgagcattcgctgaaacccacctgggcgccctgccaagcgtctggccctaggacacagcaagagcaggatggtgccctttctgcccccagggaggctttggccaggtaggaaaggcagatatcactgtgcaattcattgcttcattagagcaaagatgagtgccaccggggaggagggataagcctctgtctgcctaaacccagggtggggaaggctgcccctcagagctgccatctcagtggcagtttgcggatggcaggaatcagggaactgagggtggagagcgttccaagcgcctggaattccatagtctgggcaaaggcttggatccgactaggatggaaagatggccggtgtagtcggaactggtgagagaggaggagaggagtggggatgggggttccagggtaggtgggccagcactgtcctgcccagtgtccaaaccctctcagacagaactaaggctgcggcgaatgtcttcactttcactattatccttaaagagtaaacaggaagtccaagttaaaagttcccatttctgggccgggtgcggtggctcacgcctgtaatcccagcactttgggaggccgaggtgggcagatcacgaggtcaagagatcaagaccatcctggctaacacgatgaaaccccatctctactaaaagtacaaaaaaaaaaatttagccaggcgtggtggtgggcgcctgtagtcccagctacttgggaggctgaggcaggagaatggcatgaacctgtgaggcagagcttgcagtgagccaagattgcgccactgcactccagcctgggcaacagagcaagactctgtctaaaaaaaaaaaaaaaaaaaaaaaaaaaaaaatttcccatttctgccatttctggccaggtgcagtggtgcatgcctgtaatcccagcactttaggaggctgaggcaggaggattgcttgagtcgaggagttcaagactagcctaggcaacgtagcaaaacctcatatctgcaaaaaaattgaaagaatttagccaggtttggtagcatgcacctgtagtaccagctacttgggatgctgaggtgggaggattacttgaacctaggaggtacaggctgaagtgagccatgattgtgccactgtattctagcctgggcaacagagtgagacccccatctccaaaaaaaaaaaaagaagttatcatttctccccaggttgctgggcttagatggggcctccagtaggcatttaatccagatgctgcatctgtgctgatgtttgcatgtgac

SEQ ID NO: 666974 - DNA, 756 bp, Homo sapiens
aggccagtggttctcagtcttgattacaaattcaagtgggtagactgaaaatgttccaatgcccaggccacagccctgaccaattaaaacagcatttcyatgggttagaaccaagcatgagttatgttttcatgtttttaatattcccaggtggtaccaatgtgcagccaaaattgacaatcactatgctaggttgctcagcttcctactactgcctcctgttattttcagtcccagcttctctttcctatatcctgcaggagtagtcttaaaacttctctcaatttcattattttcctaatcttttttttttttttgagaacagggtctcgctcagttgcccaaactggagtgcagtggcatgatcacacctcactgcaacctctacctcctgggctcaagcgatccttctgcctcagcctcccaagtagctgggactacaggcgtgtgccaccatgcctggctaattgtattttttgtggagatgaggttttgccatgttgcccaggctgctctcaaactactgggctcaggtgaacctcccacatcagactcccaaagtgctaggattacaggtgtgagccaccatgcgtggtgatttttaatcactaataaattataaaagagaaagcacataaacaacaaaactatttcacacacttcctattccttttcccagatctaatactaggtctttagctatcaaaaggctgagataagaaataaaggttcatgtattttaggacactttattac

SEQ ID NO: 666975 - DNA, 2847 bp, Homo sapiens
agaagttttcaaaattacctcttaagttttcctactagtttatggccccagaggcttctactccaggtaagcagttctctgcaactctgaatttgcttgtatttctagattttaaggtgacagtttgccctgtaatatcagttctctgacgggtccaagacaagccatcaattttaagtttctttaactatttcttattgtaaggatgggaattggaaatgctaagctctttaaagatttgggctaaaactggaggtaatgctcatattctgtttttatcaaattcactgttaaatatatatcatctatccttcacactcagacaaaatcaaaacaatattcagtgatcagtcactcatttttagatatttgggttaactgacgaaggctttcatttccttctcctatataatccttgtacaatggaacaaggagataagcagtgaaaggccaagggaatgtctggagttaggacttcaggtgattcacaacttggctgccactcacccgagactgcccaagcccagatttcttccttctataagaatattgattcttgcaaataagatgaacctaaatgtggtccaggagtcagcatcttctacatggtactcagatcttcaaaaagaaaaaaaggaaaaaaatacaaccccattaaataagacagttatagctgctgctttttctttttcatcatccttgtctctgttttccttttcttacccctcttcttcatgtaaggctttccttataacccaatataattagacagaaacataatagtaacrtattaccaagagtgcaattatttctactttaaagtataaaactggtcaaacaaaattgataatattaatctcaagttagttattttaatacagacagatgaaaaaaggactcatcacttcagtaagtttcacataccacctcttctaaccagaaaggagtattctctcaagtaaaatagttcctcattctttcaaaaatttaaagtgctttatctataatgctttggtatcctaatttccctttatctggattacataggccattgacattcaagcatagtaaaagaaaatgctaaaattttatcttgaatgttaaagcacaaggacttctgtgaatgatgagagatttctcgagtgtcactggtcaacactcattccaacatattgacagaacgaaaatactaacacctaactccctagtaaaatatatactttcagtacagaaaataaaataaccctgtcttctacttgttgagaaaaagtaggtaaaatattaaagtggaaaaatatggcattagagagagaagtacctgaatttgaatcctgaacttgctatgcagcttcaatgagttatacaacctctctaatccttggtttccttaaccttaaaatggatacactaatatttaactggaagaattgttgaaatgtttaatttggctcatcaaaataactaatgcagaatgatagatattcaataagtgataactataattattgttaatgtgtaaaagttttcttgcaaagatatatttcattaaaaaccatcacaacttgcatttgaaatgaatagagaaagatctgctactctatttctactcatacctccagatagcatgatgcttcttcctgaaataaaaataggaggaagggctgggcgcggtggctcacgcctgtaatcccagcactttgggaggccgaggcgggcggatcacgaggtcagaagatggagaccatcctggctaacacggtgaaacctcatctctactaaaactacacaaaaattagccgggcttggtggcgggcacctgtagtcccagctactcgggaggctgggacaggaggatggcatgaagccaggaggcggagcttgcagtgagccaagatggcgccactgcactccagcctgggcgacagagcgagactctgtctcaaaaaaataaaatagaggaggaggaaggggaagaggaggaggagaaagaaaggaggaggcagagatggctccactcctgaatacgttttaggtagtgtggtatttaagcacttcatcttggccaaatttgataacaattaaagtttgtttccaggttccttgggactctattttagtgttcgtttccactccagattagacctttccaaatactctcagaaactttagatgtcctccaatcaaactctgctctcttgaaaagactgccagcagtcttttatacctctctatattgccattccagaaatactggtatttggggtcatgtttctaactagggaattgagagttacagatagcataaggagtagtataaggatattgcaacaaggattttgtaaaggatccctgagtaagggatctcaagccttagatggaagaaatatatcatgtttgcatgtgtgttagtgtgttagtgtgtgtgtgtgtgtgtgtgtgtgtgtctcatccagcttgtggccctatgagccctgtacagaaaatggtagaggctgagaacatagacattcccacatttaataatgcaagagggtattcctttagttgaatacttcttttcagaaatccacacaaaatcagatataaagaaattcaacagaaaagaaaaatcaggctaggcacgatggctcactcctgtaatctaagcattttgggagactgaggcaggaggatggcttgagctcaggagttcaagaccagcctggccaacatggcaaaactctgtatctacaaaatatacaaaaattaggtgggcgtggttgtgcatgcctatagttaagctgcttggagactgagacagaaggatcacttgaacgcaggaagctgaggttacagtgagctgccatc

SEQ ID NO: 666976 - DNA, 2847 bp, Homo sapiens
agaagttttcaaaattacctcttaagttttcctactagtttatggccccagaggcttctactccaggtaagcagttctctgcaactctgaatttgcttgtatttctagattttaaggtgacagtttgccctgtaatatcagttctctgacgggtccaagacaagccatcaattttaagtttctttaactatttcttattgtaaggatgggaattggaaatgctaagctctttaaagatttgggctaaaactggaggtaatgctcatattctgtttttatcaaattcactgttaaatatatatcatctatccttcacactcagacaaaatcaaaacaatattcagtgatcagtcactcatttttagatatttgggttaactgacgaaggctttcatttccttctcctatataatccttgtacaatggaacaaggagataagcagtgaaaggccaagggaatgtctggagttaggacttcaggtgattcacaacttggctgccactcacccgagactgcccaagcccagatttcttccttctataagaatattgattcttgcaaataagatgaacctaaatgtggtccaggagtcagcatcttctacatggtactcagatcttcaaaaagaaaaaaaggaaaaaaatacaaccccattaaataagacagttatagctgctgctttttctttttcatcatccttgtctctgttttccttttcttacccctcttcttcatgtaaggctttccttataacccaatataattagacagaaacataatagtaacatattaccaagagtgcaattatttctactttaaagtataaaactggtcaaacaaaattgataatattaatctcaagttagttattttaatacagacagatgaaaaaaggactcatcacttcagtaagtttcacataccacctcttctaaccagaaaggagtattctctcaagtaaaatagttcctcattctttcaaaaatttaaagtgctttatctataatgctttggtatcctaatttccctttatctggattacatagsccattgacattcaagcatagtaaaagaaaatgctaaaattttatcttgaatgttaaagcacaaggacttctgtgaatgatgagagatttctcgagtgtcactggtcaacactcattccaacatattgacagaacgaaaatactaacacctaactccctagtaaaatatatactttcagtacagaaaataaaataaccctgtcttctacttgttgagaaaaagtaggtaaaatattaaagtggaaaaatatggcattagagagagaagtacctgaatttgaatcctgaacttgctatgcagcttcaatgagttatacaacctctctaatccttggtttccttaaccttaaaatggatacactaatatttaactggaagaattgttgaaatgtttaatttggctcatcaaaataactaatgcagaatgatagatattcaataagtgataactataattattgttaatgtgtaaaagttttcttgcaaagatatatttcattaaaaaccatcacaacttgcatttgaaatgaatagagaaagatctgctactctatttctactcatacctccagatagcatgatgcttcttcctgaaataaaaataggaggaagggctgggcgcggtggctcacgcctgtaatcccagcactttgggaggccgaggcgggcggatcacgaggtcagaagatggagaccatcctggctaacacggtgaaacctcatctctactaaaactacacaaaaattagccgggcttggtggcgggcacctgtagtcccagctactcgggaggctgggacaggaggatggcatgaagccaggaggcggagcttgcagtgagccaagatggcgccactgcactccagcctgggcgacagagcgagactctgtctcaaaaaaataaaatagaggaggaggaaggggaagaggaggaggagaaagaaaggaggaggcagagatggctccactcctgaatacgttttaggtagtgtggtatttaagcacttcatcttggccaaatttgataacaattaaagtttgtttccaggttccttgggactctattttagtgttcgtttccactccagattagacctttccaaatactctcagaaactttagatgtcctccaatcaaactctgctctcttgaaaagactgccagcagtcttttatacctctctatattgccattccagaaatactggtatttggggtcatgtttctaactagggaattgagagttacagatagcataaggagtagtataaggatattgcaacaaggattttgtaaaggatccctgagtaagggatctcaagccttagatggaagaaatatatcatgtttgcatgtgtgttagtgtgttagtgtgtgtgtgtgtgtgtgtgtgtgtgtctcatccagcttgtggccctatgagccctgtacagaaaatggtagaggctgagaacatagacattcccacatttaataatgcaagagggtattcctttagttgaatacttcttttcagaaatccacacaaaatcagatataaagaaattcaacagaaaagaaaaatcaggctaggcacgatggctcactcctgtaatctaagcattttgggagactgaggcaggaggatggcttgagctcaggagttcaagaccagcctggccaacatggcaaaactctgtatctacaaaatatacaaaaattaggtgggcgtggttgtgcatgcctatagttaagctgcttggagactgagacagaaggatcacttgaacgcaggaagctgaggttacagtgagctgccatc

SEQ ID NO: 666977 - DNA, 1108 bp, Homo sapiens
ttttttttttttttttttgcattttcttgcactgagtacatttaatgattttcttttatctcctttgttgtcctcctggctaaaacactttatcattttaatggctgctgtagagttcatagtatatttttctttaacttacagaccagtttcaactgctwttacatcctgataatatttgattggatacaaaatattaatttttctcatttctgttggctatttttttttgtattgcaatacatatcccagtgtttggtactatgattcagctagttatgtggagtcagttttatacttttatttcctgcttttatgatttttttaaagcaactccaaagtagtgctgaatctatgactaattatcctctactgatgcatgacttttctgaattatctattcaatatcctgtcatttttttccagttttgttagtgaaaacagccactattcctggctttatatgaatgctagacactgtttttcttaaactgtttcagatgatttttttttcctaaactggaacagtttcctcacagagatgcattgttcagtacactgaaaacttgcagcagatctctgggtttttttttctctacttaaacttgagcactcagcactgactaaaccaaatttgtggctagatgtctttaaacaaaatctcttcttccagttttctgtgttccttaaaaacattttaactttgcaaacttcctaaacacaattaatcttttaactattcctgtatatttccaaagcacattgtgtacacccttattaagaaactcaacactatcttacagaagtgtaagcacttgtctgtcttccttgaagggaaaaaaaaattgatttgttgatttgtacatttttacacttcatagtaagaataataaggattaacatagtagcaattaacaatatttgttgttagataaacaatacagaattctcaatcatttctgtaactcaaaaataaaagtatagtcctggaatctagaaggctaataaaagaaacagaggtaccccaaattttcaaacaggattccaaaaatgagtcaagtgtcaattgttgtgagtaaatgaatcaatttccttctctttattatac

SEQ ID NO: 666978 - DNA, 1668 bp, Homo sapiens
ttttgcttaaagaacttttacataaatgtattattcataacggcctgtggggtttgtggggaaggcactatttttgttaagtggcagaaaagaaaatgcaggcacagagaggctgggcgaattgtccattgtcccatagctggttccttggcagagtaatgatcagacagaccccaatccaagggagtcccacctcttgctagcagtcagaggcactcttttttaatttgccaaattgttctaaaactaaatatacaagtaccatataatccaataattgcactctcgagtacttatctcaaagctttgaaaacttacgttcaccaaagacctgtatatgaatgttcatgatgtctttattcgtaataaacaaaagcaaccgaaatattcttcggcaggtgaatggttaaacacgctgtagtctatccatacaccatacactggaatacttttcagcagtaaaaaggaacaaactattgataaatgcagcaacttagatagctcttaagggaattatgctgagtgaaaagagccaaactgtttttattttattttttttytctggagaaagggtcttgctctggtgcccaggctggagtgcagtgacgtgatcagcctcaaactcctgggctcaggtgatcctcccacctcagcctcccaaagtgctaggattataggaataagccaccacacctagcctaaaagagccaatattaaaaagttatatactatatgatttcatttatataacattcttgaaatgaaaaattctaaagatggagaacagattactgattgttcatcagggtaggagtggatgtaggatagcgacacagccttagtgatggaacagttctatattttgattatagtggtggttacatgaacctatacattacaaaagctgcacagaactatacatacacacacatgcaagaacacatcaaacaggtgaaatgtgaataagctctgtggattggcctaatgccaatttcctggttttggtgttgtgctatagttaggcaggatgttatcactgggggaaacagagtgaacatatatatatatataaatatatatatatatacacacacacacacacacacacacatatatacatatatatatacacatatatatatgtgtgtatatatagatatacattttttttttgagacagagtcttgctcttttgcccaggctgtagtgcagtggcacgatctcggttcaccgcgaactctgtctcccaggttcaagcaattctcctgcctcagcctcccaagtagctgggattacaggcacccagctaatttttgtatttttagtagaggcagggtttcaccatgttagccaggctgttctagaactcctgacctcgtgacctatacattttttataacttcctatgggtctataatttttttcaaaataaatcatgaaaaaaccattttctaagtaatcataaaccacatttaatagtccattcttgaaatttgtctgggattaacacaaagctaaggccagttttcctgtacctccccatttcttcttacctgttggtttgtgatacaatttggatctgtatccccaccaaatctgatgttgcattgtaattgcccatgttggaggtgggacctggtggcaggagactggatcatcagggtggat

SEQ ID NO: 666979 - DNA, 1365 bp, Homo sapiens
ccttttatacctgacacccatagagcacccawgaaaaccagaacaagaagaaacatttaagttggtgattttaaaaatattgattttcaggtgatcactgttttgaaaaagcaaagaaacgaaggaaaaagagttacacctaaacagcattaacaagaaaattcacaaaaaaatggccctataaatgtctattttatgggaaaaacccacctagttaaaacatatcagatttcctttatgtcttagtaacagaggttagcacagagtgctaatttatccctttaatcttgtcatgtaatggctattatcagtatctgataaaacttgtctggaaaattccactttatctggctataaagaaaaaaaatctggtggagtttgaggatatgcaaagtgtccaaatcagtaggacagataagaaaccttataaggtctattttgtttattaattttagcttgtaacagccagacagattccttaggtgtacgtcctcagaagatactcagagaagcaaaaaccatggcaactatgcagggcaaaaggaagaaaaggactgggatcagttggctctagtccttgtcaaccaatgcagttttgatttgggtctcttccatcagcaacaagggattgggcaaagtgtgtattacagcggataaccaaatggtttctctgatctgtagaccagtgattcctttgagagctttttttctcagggctgaatgaccatgataggacaacgttttctacgtatttaacttacagtaaccataatttacaaaccttaagtgaagatatatggtttgacaaatatgtatcgagaaagacaattcaaaatgtgaactgtattgggtagaataagattagcctgaagtctggagctcactaggctcactcctccttccctcctgttctcctttcacaggtgtcaggtcagcactgcagtccaatggctcttcccacctcctcctcctgcctttcccctttatctttcacagatgttcccccaatatttgtttaggttgaggctcatttagttgtattattttcctgcaactgaaaagtccttaaacaactgcagatactcattccctcatctgaaaatcattgagctaagtgcatctgggaattcagaataaagtacgatctatcttatattacaaactaactccatttgggccatcacacagtgactatgctgcaaaacccaaacatgcacacaaaatagaatgaataaaggttacacataatctcactcaagtatgaattgctttttttggccaagaaataagtttagatcagattgggaatgacctctaagtaagttaccaaaaacactttttgtttttcagaactttatagatttc

SEQ ID NO: 666980 - DNA, 1365 bp, Homo sapiens
ccttttatacctgacacccatagagcacccaagaaaaccagaacaagaagaaacatttaagttggtgattttaaaaatattgattttcaggtgatcactgttttgaaaaagcaaagaaacgaaggaaaaagagttacacctaaacagcattaacaagaaaattcacaaaaaaatggccctataaatgtctattttatgggaaaaacccacctagttaaaacatatcagatttcctttatgtcttagtaacagaggttagcacagagtgctaatttatccctttaatcttgtcatgtaatggctattatcagtatctgataaaacttgtctggaaaattccactttatctggctataaagaaaaaaaatctggtggagtttgaggatatgcaaagtgtccaaatcagtaggacagataagaaaccttataaggtctattttgtttattaattttagcttgtaacagccagacagattccttargtgtacgtcctcagaagatactcagagaagcaaaaaccatggcaactatgcagggcaaaaggaagaaaaggactgggatcagttggctctagtccttgtcaaccaatgcagttttgatttgggtctcttccatcagcaacaagggattgggcaaagtgtgtattacagcggataaccaaatggtttctctgatctgtagaccagtgattcctttgagagctttttttctcagggctgaatgaccatgataggacaacgttttctacgtatttaacttacagtaaccataatttacaaaccttaagtgaagatatatggtttgacaaatatgtatcgagaaagacaattcaaaatgtgaactgtattgggtagaataagattagcctgaagtctggagctcactaggctcactcctccttccctcctgttctcctttcacaggtgtcaggtcagcactgcagtccaatggctcttcccacctcctcctcctgcctttcccctttatctttcacagatgttcccccaatatttgtttaggttgaggctcatttagttgtattattttcctgcaactgaaaagtccttaaacaactgcagatactcattccctcatctgaaaatcattgagctaagtgcatctgggaattcagaataaagtacgatctatcttatattacaaactaactccatttgggccatcacacagtgactatgctgcaaaacccaaacatgcacacaaaatagaatgaataaaggttacacataatctcactcaagtatgaattgctttttttggccaagaaataagtttagatcagattgggaatgacctctaagtaagttaccaaaaacactttttgtttttcagaactttatagatttc

SEQ ID NO: 666981 - DNA, 1365 bp, Homo sapiens
ccttttatacctgacacccatagagcacccaagaaaaccagaacaagaagaaacatttaagttggtgattttaaaaatattgattttcaggtgatcactgttttgaaaaagcaaagaaacgaaggaaaaagagttacacctaaacagcattaacaagaaaattcacaaaaaaatggccctataaatgtctattttatgggaaaaacccacctagttaaaacatatcagatttcctttatgtcttagtaacagaggttagcacagagtgctaatttatccctttaatcttgtcatgtaatggctattatcagtatctgataaaacttgtctggaaaattccactttatctggctataaagaaaaaaaatctggtggagtttgaggatatgcaaagtgtccaaatcagtaggacagataagaaaccttataaggtctattttgtttattaattttagcttgtaacagccagacagattccttaggtgtacgtcctcagaagatactcagagaagcaaaaaccatggcaactatgcagggcaaaaggaagaaaaggactgggatcagttggctctagtccttgtcaaccaatgcagttttgatttgggtctcttccatcagcaacaagggattgggcaaagtgtgtattacagcggataaccaaatggtttctctgatctgtagaccagtgattcctttgagagctttttttctcagggctgaatgaccatgataggacaacgttttctacgtatttaacttacagtaaccataatttacaaaccttaagtgaagatatatggtttgacaaatatgtatcgagaaagacaattcaaaatgtgaactgtattgggtagaataagattagcctgaagtctggagctcactaggctcactcctccttccctcctgttctcctttcacaggtgtcaggtcagcactgcagtccaatggctcttcccacctcctcctcctgcctttcccctttatctttcacagatgttcccccaatatttgtttaggttgaggctcatttagttgtattattttcctgcaactgaaaagtccttaaacaactgcagatactcattccctcatctgaaaatcattgagctaagtgcatytgggaattcagaataaagtacgatctatcttatattacaaactaactccatttgggccatcacacagtgactatgctgcaaaacccaaacatgcacacaaaatagaatgaataaaggttacacataatctcactcaagtatgaattgctttttttggccaagaaataagtttagatcagattgggaatgacctctaagtaagttaccaaaaacactttttgtttttcagaactttatagatttc

SEQ ID NO: 666982 - DNA, 1235 bp, Homo sapiens
ggttatgcccagtccctaacctggagcaggctttcagccagttccaaactccttcccctctccacttagtcccaactctgtagatctctgcaaaagaaaggatgtctagctttccactcagttactaatttaatggaactgccttcccagttggtcctcctccccatcactgccacctctgaagtggacagcctcagcacaatctggacatcccagcaccaaattttcaacagcaacagagcattattagtcctgaatatcatttggtatttgttaatacattaagaaagctatatataaatgtagctctgtgaagcaattacccccattttacaggaaactaaacacagacaaactgaggtcaaggagtctatttaggaatggaggaaacagaagcgcagtgatgaagaggatgagctcagacaaaccaagacaaaccattgccattgccatggcaatctcaccaaataatgggaactgtccgcatggaactttaaatcgaggcagttgtacctcaaagcactattgggtagaataaataacgcaggtaaatgctctgctcaatacctgactcacagaaagcatttggttggtgttagcctctataatagttataattattgtcacaactttggtgacagaatcgtctcccttctcctagaacagtgctcttttcaggagccagcccagatctcccatagcgattcaggtctgctcacrataagtgaccattctcctgcattagcaagggacacaaatgggttgaatggagccagagacaaggagggatgtggagaaagaaaaggcagaagaaagaaggaaaaaaaaaacccatgcactggggaaaccaacttctaggctttttttcttttctacttatagctttgagtgtttacctgaaagaccaaagacagcagctctgctcagcttctgctggaccaagatcagcctccagcttctctccctcagtctcagcccagctgctctgcctctccctccctcctctgcacatcagcctccagactctttcctcccctgtgccagcgctggccgctgttcctggggatgggcttggctggctgcctggtcctaggcctggagcggccactgctgagcccaaagggcaatcccagaggctgcagtccctgggttgctctagctccaaagagggatcaggaagttgttcccatctcctaggcagatcatgaaatgacaaccaggcaagtccctgtctt

SEQ ID NO: 666983 - DNA, 3476 bp, Homo sapiens
atcatcttagtttgatctctggagggtcagtaacaggyccagacatggaaaacagacccaagtaaactgctgcagctcgctgggtcaggaagcccactcagaggaatgcatgttggctactactaatggacagcctgtcacccaaggaacagacttgtgaaatgaggagctaaaaaacaggaggcaaatgctggcaccaaaagtcagtgtcagcaaagcacttgagatctgctctgaggcttccttgacagaagggaccaatccattccactcctccattctgttcccatctagaatctattcagcagcaagaaaccactgccagatgctggtgctcctacatattaacaatataaaaagcccatcttttcaactttcatctaaatagtttgtagagctagctgggtgcagctttttatttcttcctacatatgtcagatacccaaaggccagagaacataagtacatgaattcctcagacagcttttctacagctgccaggggctgaggcggttgtactggcacagccatcctccggagagtctcaaggaccacaggagccccttgatcccacctgggagcaagactctgaatgacctgagaaaaagacggaatatggctggtgtccatttgtaaactacttcctagaaagtaaatgtgcaaaaataacaaggaagactgagggaacactttaaatgcacagttgctgctgccacttccaacttaagacttcaaagatcacctttggagattaggtcttacccagagctacttgggagggaaagttgatccctctgccaaagcaaacgagacccgtctgcttctattttccagcttttaaaagactttttgtcctaaaatgtacagcagcaacaagcaacagcagttccagttagggttggggaggaacccatgactttttacatcaaccaatctcaaaagtgcaaaagaaaagagggaggaaggaagggagaaagggggtagggaggacagagaaaacttttaaaaaagaaaactggctatgtttctataaaaatcatcttaggtcacatgactaagaccagccagtttagcataaagtcatttctttttgaaagtgttctcaatgtccctcgcattgcaccctttgaattcactactaagaatatatgtccagttgaggcctcaggactgaagccagtgtgggctggctagaacaaatgcctacttgccaaatacagccaagccaacacacgcacatactataaagtttccaaataccaaataatgaaccatttttttggtctctgggcttccaaactgagctacatgtttaatcccacataactcaaaataaccaaaaaagggctatatcatttcactgacccatacttgaaatattttttgctgtcactattgatctgggcatttctaactacccacttatgtgcaagggggagcatcataaatgggcaccaaatttctaggtcattctttgttttcacaccagcttttccagtgactttccctgtttaaaaccagaaagccatcctggatttgtactgaaccttaactctaataaaaacggcatgcctgctgcactcttcatctccgttataagcttgcagcttgttttattccttaggatggagcctcagtagagcccactgaaagtaaaccactgattagcactaataccctccttccagtcagcatatggttatcagccaccctggaggtttacctgattgtagctgattagtcctcaaaacacccaattaccacatcaactgctcatttttcaatcaccttctgagaacttgggagtcagcaactcactgaaaattagtgaactggagataaggttagatttttgcatctaagtaaaaggcaagaaaggaaattatgaaatgagtccaaagacgacgaaggaacacaacatacagatgataaatgactgcatccaaatgtcttaaagggcacctggatgaccacaaatgtagatatgtggtttcgggagccaaaggcctctaagtaggcctcaggttcaccacgtggtaaccaatcaacctcttaatgtttgctaattcttaaaaaaaaaaaaaaaaatctaaatccattaagaccacatttatcagctttttccccacgatggaggttgactgctaatgcatagcagacaggaagaggaagagggacagaaaagatccacacaataaaagaattcctgctttcaaccacatcagtaacctggtcagaaaagtgaggtcactagactctctttcctgctggcaaattcaaaagtattacataattattttgtgaagtttagaaagtacagagaggcataaagaaaaaaaaagccaatcactaatttcaccacctacggttaatattttggagtatatcctttcagtcttgcttcactgcgaatcacatcaaaaaggctaaccaggctaggcgcagtggctcacgcctgcaatcccagcactttgggaggccaaggcaggtggatcacgaggtcaggagttcaagaccagcctggccaacatggtgaaaccccgtctctactaaaaatacaaaaattagctgggcatggtggcacatgcctgtaatcccagctacttgggaacctgaggcaggagaactgcttgaagtgggacctgggaggcagaggtagcagtgaggaagactgtgccactgcactccagcctgggctacagagcgagactctgtctcaaaaaaaaaaaaaaaaacaactaaccaatccaatgatccagtgattctggctccagggattttaaggaagtgtttttaaatgatgggggaatggggagaaaagcagcttaatcctaaagacatctttcacttatatctaaatttcctcaatttattctttcaaaagaagatcaacttcctcctcacactccctccaaggaaaagaagaggacaaagatgatgaccatcttaaggtctaatgagtaacagtccccttatcaaaggtttaacatcaggggtagaagggtctggcccatggattgagtgattcacattcccagggagcaagaggctcattcaaaagagaaatgtggaatgcctggaaatggtcaatgggctggatttagtgtgaagactaacatgggctgtcaagctgcagactgggtcaaaggacagatttgtagcagacgtgtctgccttcccagcatccaggctcttcatcaggtgattacccaattttcaccagcagatccttttccctcgctctcggccatatggctgggtggggttcataaagaactatgggactcagccccaccaaggcctcacatgcccctggctttaatgactggacccaggatatgcccatgacaagccagccagacagaatctcaaccctgaaaatacaggaggctggagatgctaccagaaagagctaccagagaaaataagaatgcctagggggtcactgtgaggattaaatggtccctgtttatcac

SEQ ID NO: 666984 - DNA, 3476 bp, Homo sapiens
atcatcttagtttgatctctggagggtcagtaacaggtccagacatggaaaacagacccaagtaaactgctgcagctcgctgggtcaggaagcccactcagaggaatgcatgttggctactactaatggacagcctgtcacccaaggaacagacttgtgaaatgaggagctaaaaaacaggaggcaaatgctggcaccaaaagtcagtgtcagcaaagcacttgagatctgctctgaggcttccttgacagaagggaccaatccattccactcctccattctgttcccatctagaatctattcagcagcaagaaaccactgccagatgctggtgctcctacatattaacaatataaaaagcccatcttttcaactttcatctaaatagtttgtagagctagctgggtgcagctttttatttcttcctacatatgtcagatacccaaaggccagagaacataagtacatgaattcctcagacagcttttctacagctgccaggggctgaggcggttgtactggcacagccatcctccggagagtctcaaggaccacaggagccccttgatcccacctgggagcaagactctgaatgacctgagaaaaagacggaatatggctggtgtccatttgtaaactacttcctagaaagtaaatgtgcaaaaataacaaggaagactgagggaacactttaaatgcacagttgctgctgccacttccaacttaagacttcaaagatcacctttggagattaggtcttacccagagctacttgggagggaaagttgatccctctgccaaagcaaacgagacccgtctgcttctattttccagcttttaaaagactttttgtcctaaaatgtacagcagcaacaagcaacagcagttccagttagggttggggaggaacccatgactttttacatcaaccaatctcaaaagtgcaaaagaaaagagggaggaaggaagggagaaagggggtagggaggacagagaaaacttttaaaaaagaaaactggctatgtttctataaaaatcatcttaggtcacatgactaagaccagccagtttagcataaagtcatttctttttgaaagtgttctcaatgtccctcrcattgcaccctttgaattcactactaagaatatatgtccagttgaggcctcaggactgaagccagtgtgggctggctagaacaaatgcctacttgccaaatacagccaagccaacacacgcacatactataaagtttccaaataccaaataatgaaccatttttttggtctctgggcttccaaactgagctacatgtttaatcccacataactcaaaataaccaaaaaagggctatatcatttcactgacccatacttgaaatattttttgctgtcactattgatctgggcatttctaactacccacttatgtgcaagggggagcatcataaatgggcaccaaatttctaggtcattctttgttttcacaccagcttttccagtgactttccctgtttaaaaccagaaagccatcctggatttgtactgaaccttaactctaataaaaacggcatgcctgctgcactcttcatctccgttataagcttgcagcttgttttattccttaggatggagcctcagtagagcccactgaaagtaaaccactgattagcactaataccctccttccagtcagcatatggttatcagccaccctggaggtttacctgattgtagctgattagtcctcaaaacacccaattaccacatcaactgctcatttttcaatcaccttctgagaacttgggagtcagcaactcactgaaaattagtgaactggagataaggttagatttttgcatctaagtaaaaggcaagaaaggaaattatgaaatgagtccaaagacgacgaaggaacacaacatacagatgataaatgactgcatccaaatgtcttaaagggcacctggatgaccacaaatgtagatatgtggtttcgggagccaaaggcctctaagtaggcctcaggttcaccacgtggtaaccaatcaacctcttaatgtttgctaattcttaaaaaaaaaaaaaaaaatctaaatccattaagaccacatttatcagctttttccccacgatggaggttgactgctaatgcatagcagacaggaagaggaagagggacagaaaagatccacacaataaaagaattcctgctttcaaccacatcagtaacctggtcagaaaagtgaggtcactagactctctttcctgctggcaaattcaaaagtattacataattattttgtgaagtttagaaagtacagagaggcataaagaaaaaaaaagccaatcactaatttcaccacctacggttaatattttggagtatatcctttcagtcttgcttcactgcgaatcacatcaaaaaggctaaccaggctaggcgcagtggctcacgcctgcaatcccagcactttgggaggccaaggcaggtggatcacgaggtcaggagttcaagaccagcctggccaacatggtgaaaccccgtctctactaaaaatacaaaaattagctgggcatggtggcacatgcctgtaatcccagctacttgggaacctgaggcaggagaactgcttgaagtgggacctgggaggcagaggtagcagtgaggaagactgtgccactgcactccagcctgggctacagagcgagactctgtctcaaaaaaaaaaaaaaaaacaactaaccaatccaatgatccagtgattctggctccagggattttaaggaagtgtttttaaatgatgggggaatggggagaaaagcagcttaatcctaaagacatctttcacttatatctaaatttcctcaatttattctttcaaaagaagatcaacttcctcctcacactccctccaaggaaaagaagaggacaaagatgatgaccatcttaaggtctaatgagtaacagtccccttatcaaaggtttaacatcaggggtagaagggtctggcccatggattgagtgattcacattcccagggagcaagaggctcattcaaaagagaaatgtggaatgcctggaaatggtcaatgggctggatttagtgtgaagactaacatgggctgtcaagctgcagactgggtcaaaggacagatttgtagcagacgtgtctgccttcccagcatccaggctcttcatcaggtgattacccaattttcaccagcagatccttttccctcgctctcggccatatggctgggtggggttcataaagaactatgggactcagccccaccaaggcctcacatgcccctggctttaatgactggacccaggatatgcccatgacaagccagccagacagaatctcaaccctgaaaatacaggaggctggagatgctaccagaaagagctaccagagaaaataagaatgcctagggggtcactgtgaggattaaatggtccctgtttatcac

SEQ ID NO: 666985 - DNA, 662 bp, Homo sapiens
aaattagccaggcatagcggcgggtgcctgtagtcccagctacttgggaggctgaggcaggagaatggagtgaacccgggaggcggagcttgcagtgagcagagattgcaccactgcacgccagcctgggtgacagagcgagactccgtatcaaagaaaaaaaaaaaaaaamcacgcaaaaaaacctagccctgccgggcgtggtggctcacatctgtaatcccaacactttgcgaggccgaggcaggtgcaccatttgaggtcaggagttcaagaccagcctggccaacatggtgaaaccccatttctaaaattaaaaaaactttttaaaattttttaaaatacaaaaatacaaaaattagctgagtgttagtggcgcatgcctgtaatcccagctacttgggaggctgaggcaggaaggcagcggttgcggtgagctgagatcacaccactgcactccagtctgggcaacagagtgagaccctgtcttaaaaacaaaaacaaaacaaagtaaaacaaaacaaaaacaaaacaaattccaaaaaattagcatggttagtggaaatcttgttatgattcccaggaattattcttgaggctttaccaaggctatggatcaaagagtgaatggactctgagaatctgtattttaattaatgtct

SEQ ID NO: 666986 - DNA, 662 bp, Homo sapiens
aaattagccaggcatagcggcgggtgcctgtagtcccagctacttgggaggctgaggcaggagaatggagtgaacccgggaggcggagcttgcagtgagcagagattgcaccactgcacgccagcctgggtgacagagcgagactccgtatcaaagaaaaaaaaaaaaaaaccacgcaaaaaaacctagccctgccgggcgtggtggctcacatctgtaatcccaacactttgcgaggccgaggcaggtgcaccatttgaggtcaggagttcaagaccagcctggccaacatggtgaaaccccatttctaaaattaaaaaaactttttaaaattttttaaaatacaaaaatacaaaaattagctgagtgktagtggcgcatgcctgtaatcccagctacttgggaggctgaggcaggaaggcagcggttgcggtgagctgagatcacaccactgcactccagtctgggcaacagagtgagaccctgtcttaaaaacaaaaacaaaacaaagtaaaacaaaacaaaaacaaaacaaattccaaaaaattagcatggttagtggaaatcttgttatgattcccaggaattattcttgaggctttaccaaggctatggatcaaagagtgaatggactctgagaatctgtattttaattaatgtct

SEQ ID NO: 666987 - DNA, 645 bp, Homo sapiens
tagactagtttacctttctttgggctagctcacatggattacagaagtgagcttactatttatatgaacaaatataaattgacctttactttctctttttttcccgtagttttgcaagaaaaaacttacttttatgatttttacatgtattaatctttacatttccttttcctcctttttgtacattaactgctgaattcagagtttgagtcattatgtggatttttggttgttaaggagagcatccrgcctgttaatgctctcaaatggggtatccctcagaaacctctccttgcaaaagtagcttatggatattatcttttacctgggtagaggggtttcagctgccttgctgacctatatttagtggagggcagtagactaagtgttttggtttggcatttataatgcctattagatgatttagatatgagaatgaaactagcagagtggtaaaattaactaaaagcttaactatctaaaaaacataataatatcttctagatagaaatatgggtcccagattatccattcctgaaatgctctataggattgtgtatttatgtggcaatattaaaaaacgtggaacagataacttgctataaataagccacaacttagaattcatgcttttagttaacttac

SEQ ID NO: 666988 - DNA, 668 bp, Homo sapiens
aaaatacatctagcaagtaaatgtttaactaagcattttgttacttgatgtgaatacagggagaaagatgaaaatttcaattgtgaagaggtagtttaaacaggcgtatgcccacatattactagtagaaattaatgttgtacttttattaggtaataaccaagccttctcytattatagatatcttactgaaagatcagtgagtgagtgtcatgagtatagtttaggagagaatgcttgctttggataagaatgcttgctttgcccaaatggttgcatattcccgttttttctcatatgctgcctcagctcatttaaattctaaagagcacagccccactcaagctagcaagagcttaggggggcttttgataaacattcacacaagagagaaagaaggtagaaatctcagatccaagagcaggagctgcactggaggctggcctcagtgggacccaaaggtgatggggacaggcgctcccacctgtgtgcctttcatgggctatgtgcattctctttttaatctctattccttttgctccacattctcatctgtccaccaatgcacttcctctgcttattcatggtttctgcttccttgtgatattagcacacacgtgacttccaattggctgctttccttgctccacccatgacatcttttcatc

SEQ ID NO: 666989 - DNA, 1040 bp, Homo sapiens
tttcccagacaaggagagatcagatataaaagagtgctctgtccatctcatactcatttgactgaatataaaaaggcccaggggaactttctgggggaaaaaataccataccaagtatttgagtcaggaggctaacttgcaaggatttcacttgcatgggcccattaaaagaacttgactttgaaaaaagaaaatctgaagatctgaggggttgaataagtaaaacataaatatggtttaaaaaacagaaagatatacgacaaaagtttccctaccatccttgtcctcctctgatcagttctgacacagctccttccattggtaaatactgtacttaatatcttatgcaaattttcatagtttattcaaacatatacaagcaaaaacaagtattgattcttatttttcatttgtttacaaaggtagtatattgcacatactgttctgcaccttgctttaaatatatgtttatatatctatatctgtatagattatagatttattatagatctaataattattatattatagatttattatatatctaaatatatatatcttcttttcctatcagtataaagaaagattcctcattttttttacagcttcccaatgtcctatgtataggtacatcattgtttattgaactagatcctattgatagacatttagttgtttccagtctttggctcttacaaacaatgctacaataaataactttgcacaaaagtcatttctcacctgtgcatgaatatctgcacaatacatttttccataagtaattctgagtctttaatggcttttgttttttgaaagaattcacctgattatcctttctgtgggaatgaacrctggtggaagaaaggatgtgtttctaaaaagctaaaaagctataacatattagggctgaagccactctgttacagggactccttaagatagtccaacccaggaagaagagacatgtttttgtctacttttgcagaaaggatgagtagtggtctaaacatagccaaagagatgaaattggggtggagata

SEQ ID NO: 666990 - DNA, 646 bp, Homo sapiens
ttcctcactgctttgtgctctttcttgtctcacatttattctgtcttattgcttcctcatgctagaagcttcctcatgctcaagaccattctctcaatgtccttacgcctttctcaggccatggaccctggctgaaattctatttcttctttttgcttcaacagaacttccccatctattcccccttcccccagggatttatattctttgcaggggaaatgctaatggatgagcaggctcagtgtgtgtgcagacaacattggtgctctgccccggtcccctgcaatcccttgtccccattttgggggccctcctggctttgtgggcttttactttcaatggccatgatctgttgctttgggagcctctttgctcacaagaagttgggaatttacatgctcttggaatggtccttaatgaacaactgaaaagcatagtattctgaaagcctagctctctcacttgggtcacagggaatgatgaaattcaagctggagcttgctcagcctcctctcctcccctcttctccctccccctcmcctgcttccttctcctcttcctgatatccccggaagtgggtatatctcgtagacataatcttggtctcagagtctacttcgtggtaccaaatttaaggcagtaccaa

SEQ ID NO: 666991 - DNA, 637 bp, Homo sapiens
aaaaaaaaatgacttggctaaggccagtcttagccagaggttgagctgcaatttgaacctcattttgtgtgactccaaggccttcacttttaatcactacactgtttccttagaatataaattgtggggagctaataaatatatttaaaaagggggtaatggaatttgatctcagtattaaaaagatacattatctgacaaaatggaagataaattggaaaccaataggatttttaaaatcatgaatatttgcttttttataaaacaaagaattggtaaaaattatacaatatccaaggcacaaatggtctcatccgatatcctatgtcatttgtctggcaaatggcatctcctccatgtggccactatgcttgtctttcctgcagccaattgacttgattaagtctaaaccctctcttcttttccctccactccttcatcacacctgtgtgttcaaaagttatgttaaaaaaaggaaggccattttttagacgtcaaaatgtctataatggcatctgtgtgtgtgtgcgtgtgtgtatgtgtgcstttgtgtattttcagtagctattaacatggtctaaggtaatgagttcaattctgctaaaacatattagtcacagaccctgcctgcaaagaa

SEQ ID NO: 666992 - DNA, 613 bp, Homo sapiens
tcctcataccatctcatcctaacaagcaatatgagatgcttttcttccagaagtctcggatgtcytcataaaaccataaggaagggccatggctgattgtttaaccaaaagtgtatgattgtaagagtttgaaacagtcattaacacaaagttaaatagcctaagtatgtgggttttgcagctgaccttaatatttgatccaatgttttacattattaccacatgacataggtgatattgtaaagtgtttctgtgaaagccatagcagggttatattatttcactggtagaatcacaaagtttgggctttttagcactgcatttactgtaattaagctaagtaagaaatatatagtttaaaacaaggaaggtttttgtattagtccattttcacactgctgataaagacctacgcgagactgtgttatttacaaaaaaaagaagtttaataatgtacagttccacatggctggggaggcctcacaatcatggtggaaggcaaggaggagcaagtcacatcttaaatggatagtggcaggcaaagaaaaatattgggcagggaaactgctctttataatattgtcagattttgtttattcacaagagcatggga

SEQ ID NO: 666993 - DNA, 613 bp, Homo sapiens
tcctcataccatctcatcctaacaagcaatatgagatgcttttcttccagaagtctcggatgtcttcataaaaccataaggaagggccatggctgattgtttaaccaaaagtgtatgattgtaagagtttgaaacagtcattaacacaaagttaaatagcctaagtatgtgggttttgcagctgaccttaatatttgatccaatgttttacattattaccacatgacataggtgatattgtaaagtgtttctgtgaaagccatagcagggttatattatttcactggtagaatcacaaagtttgggctttttagcactgcatttactgtaattaagctaagtaagaaatatatagtttaaaacaaggaaggtttttgtattagtccattttcacactgctgataaagacctacgcgagactgtgttatttacaaaaaaaagaagtttaataatktacagttccacatggctggggaggcctcacaatcatggtggaaggcaaggaggagcaagtcacatcttaaatggatagtggcaggcaaagaaaaatattgggcagggaaactgctctttataatattgtcagattttgtttattcacaagagcatggga

SEQ ID NO: 666994 - DNA, 880 bp, Homo sapiens
tgggcctttccttacctattaacttattagctccttctsttcctaggaaagcagcacccaaactgggagttatttggcacgtctctatctaaaccaggacttttcaaccttgacactattgcaatttggggatgtacaattctttgttgtatgaagctactttgttcattgtaggatgtttagcagcatctcttgcctctatccaccaaatgccaattgcagacacctccctcccccaaattatgacaactaaagatgtctagacattgacaggtgtcccagggtgggtggggcaaatgtcccctcctgtttgagaacaactactccgaacttcccacaaatattaaatgtgagaggattcagtaagacactctgatagcataaaaatggcataaaattgagaaaactaaggtaaggaatagcaaggttatttagctggttggatcatagaaaggatgaaataggagaaatttgggttatgatggaagagagaacaataatggcatggaaagatttcctatgttatttaagcaagattgttaggtgtttttttgttttgtttttcctcattgctattccttaaatgcggactttctacaaaatatattcttcaaactcttgctctttttttctctactctttccctcttgtgtcttatatactcatgtcttttgtcatctacaccaggaagctgtgtcaaccttcactgctcttcccaatttaagaccgtaatctaaaacaactgtcatatgcttacacccaatatcctctataacaccatactttgtgctcaggctactactcttccaggctttgaggctcccaaatttatgccaataaacatagaaatagaaggattttaaggaaaaattttaaagaa

SEQ ID NO: 666995 - DNA, 1751 bp, Homo sapiens
gaaatcaatcaagcaacagcatctcagagagatgcaccttgtttcctacttttgcatgcaaagttgctgttttttcctttcattgtccacttattgaggtggggtttgagagttctggtttctgtcttttaacactaaaatcaccgctgacttgtccatcaagtcagcaaagtctttccttggtacagcaaagtctgtctggctcaacctccatctgggcctgtggcattctactgaactttgtagttttctctattcttcaaaacaaaactatctgaaacagggtctacttctgggttgtaaattagttgtagaaaatctgggctctgaacaaaaaccacatttgaaagcacatgtcttctcttttattggcttttgctctaaaaagcaaaggctgaaaaacagctgttagctgtttatagagtattttttatttaagtgttagacaatagctgttttcttctccacttacaatggcacattttttctcaggccagttaagtcctctctcggtgtggccctgggtatttgtatgcacctcctccctttccctaggtttctcaggagactaagggttgttgtttttttcttcctttcttcagtttctggtttttggttttgaattcagactttggtctctcagaatagatggctgaatttagtcccaggccagaatccttctgggccaactctacacaggtattcacagaagacactctagaggaagcttctatrggtgcaaagtgttgatggtttgtggctagatggcatgggcagaattagatatagacgtagttattgctctctattctcgagccctgaacatcgttggtttgctttcctctattaggaattcagaagatagtgctttccaatcccctcatcctggaacgtgctctgaggacactgccattgctcattatcctcatggtcccaagcaagcaagatcagcagggctcagggacatattgcacatgagtgaaaacactccctagcctgcaaaaggaaccagccaaaatgtttttcagcactcttgtgctgtgtgctgccatagcaattcctactatataagacaatggtaacaccatcaagttacatgttataccaggttttcctgggattttatttgcctgcagtctgcctccttttaatcaatttctgttctttcagatcatcaacttgtattgatttacatatgggggaatagtctaacctgtgatttctggaaaagacagcttcttatacctcactaagaagacacaggggctggttatatctccctgagatcttagacattcaaatcctgcctaacgaacatgagccccttcatttacccatccatcacaccatgggctgggccacctctaaaccagtttctaggacttgggaattttttttgtttttttagacaaggactcactctgccatccaggctgaagtgcagtgtcacaatcacagctcacagctcactgcagcctctagctccccaggctcaggtgaccctcccacatcagcttcccaagtagctcaggtgacaggaatgcaccaccacacccaggtaatttttgtatttttagtagagatggggtttcgccatgttgcccaagcttgtctcaaactcctgggttcaagcgatcctcccacctcagcctccaaaagtgctgggattacaggcgtgagccaccacacctgatgaacttgggaattcttacaaggtgacaccagggaagcactgcaagcttgttagaaac

SEQ ID NO: 666996 - DNA, 1751 bp, Homo sapiens
gaaatcaatcaagcaacagcatctcagagagatgcaccttgtttcctacttttgcatgcaaagttgctgttttttcctttcattgtccacttattgaggtggggtttgagagttctggtttctgtcttttaacactaaaatcaccgctgacttgtccatcaagtcagcaaagtctttccttggtacagcaaagtctgtctggctcaacctccatctgggcctgtggcattctactgaactttgtagttttctctattcttcaaaacaaaactatctgaaacagggtctacttctgggttgtaaattagttgtagaaaatctgggctctgaacaaaaaccacatttgaaagcacatgtcttctcttttattggcttttgctctaaaaagcaaaggctgaaaaacagctgttagctgtttatagagtattttttatttaagtgttagacaatagctgttttcttctccacttacaatggcacattttttctcaggccagttaagtcctctctcggtgtggccctgggtatttgtatgcacctcctccctttccctaggtttctcaggagactaagggttgttgtttttttcttcctttcttcagtttctggtttttggttttgaattcagactttggtctctcagaatagatggctgaatttagtcccaggccagaatccttctgggccaactctacacaggtattcacagaagacactctagaggaagcttctataggtgcaaagtgttgatggtttgtggctagatggcatgggcagaattagatatagacgtagttattgctctctattctcgagccctgaacatcgttggtttgctttcctctattaggaattcagaagatagtgctttccaatcccctcatcctggaacgtgctctgaggacactgccattgctcattatcctcatggtcccaagcaagcaagatcagcagggctcagggacatattgcacatgagtgaaaacactccctagcctgcaaaaggaaccagccaaaatgtttttcagcactcttgtgctgtgtgctgccatagcaattcctactatataagacaatggtaacaccatcaagttacatgttataccaggttttcctgggattttatttgcctgcagtctgcctccttttaatcaatttctgttctttcagatcatcaacttgtattgatttacatatgggggaatagtctaacctgtgatttctggaaaagacagcttcttatacctcactaagaagacacaggggctggktatatctccctgagatcttagacattcaaatcctgcctaacgaacatgagccccttcatttacccatccatcacaccatgggctgggccacctctaaaccagtttctaggacttgggaattttttttgtttttttagacaaggactcactctgccatccaggctgaagtgcagtgtcacaatcacagctcacagctcactgcagcctctagctccccaggctcaggtgaccctcccacatcagcttcccaagtagctcaggtgacaggaatgcaccaccacacccaggtaatttttgtatttttagtagagatggggtttcgccatgttgcccaagcttgtctcaaactcctgggttcaagcgatcctcccacctcagcctccaaaagtgctgggattacaggcgtgagccaccacacctgatgaacttgggaattcttacaaggtgacaccagggaagcactgcaagcttgttagaaac

SEQ ID NO: 666997 - DNA, 1751 bp, Homo sapiens
gaaatcaatcaagcaacagcatctcagagagatgcaccttgtttcctacttttgcatgcaaagttgctgttttttcctttcattgtccacttattgaggtggggtttgagagttctggtttctgtcttttaacactaaaatcaccgctgacttgtccatcaagtcagcaaagtctttccttggtacagcaaagtctgtctggctcaacctccatctgggcctgtggcattctactgaactttgtagttttctctattcttcaaaacaaaactatctgaaacagggtctacttctgggttgtaaattagttgtagaaaatctgggctctgaacaaaaaccacatttgaaagcacatgtcttctcttttattggcttttgctctaaaaagcaaaggctgaaaaacagctgttagctgtttatagagtattttttatttaagtgttagacaatagctgttttcttctccacttacaatggcacattttttctcaggccagttaagtcctctctcggtgtggccctgggtatttgtatgcacctcctccctttccctaggtttctcaggagactaagggttgttgtttttttcttcctttcttcagtttctggtttttggttttgaattcagactttggtctctcagaatagatggctgaatttagtcccaggccagaatccttctgggccaactctacacaggtattcacagaagacactctagaggaagcttctataggtgcaaagtgttgatggtttgtggctagatggcatgggcagaattagatatagacgtagttattgctctctattctcgagccctgaacatcgttggtttgctttcctctattaggaattcagaagatagtgctttccaatcccctcatcctggaacgtgctctgaggacactgccattgctcattatcctcatggtcccaagcaagcaagatcagcagggctcagggacatattgcacatgagtgaaaacactccctagcctgcaaaaggaaccagccaaaatgtttttcagcactcttgtgctgtgtgctgccatagcaattcctactatataagacaatggtaacaccatcaagttacatgttataccaggttttcctgggattttatttgcctgcagtctgcctccttttaatcaatttctgttctttcagatcatcaacttgtattgatttacatatgggggaatagtctaacctgtgatttctggaaaagacagcttcttatacctcactaagaagacacaggggctggttatatctccctgagatcttagacattcaaatcctgcctaacgaacatgagccccttcatttacccatccatcacaccatgggctgggccacctctaaaccagtttctaggacttgggaattttttttgtttttttagacaaggactcactctgccatccaggctgaagtgcagtgtcacaatcacagctcacagctcactgcagcctctagctccccaggctcagstgaccctcccacatcagcttcccaagtagctcaggtgacaggaatgcaccaccacacccaggtaatttttgtatttttagtagagatggggtttcgccatgttgcccaagcttgtctcaaactcctgggttcaagcgatcctcccacctcagcctccaaaagtgctgggattacaggcgtgagccaccacacctgatgaacttgggaattcttacaaggtgacaccagggaagcactgcaagcttgttagaaac

SEQ ID NO: 666998 - DNA, 538 bp, Homo sapiens
ggcgcctgccaccacgcccagctaatttttttgtatttttagtagagamggggtttcaccgtgttagccaggatggtctcgatctcctgacctcttgatccgcccgcctcggcctcccaaagtgctgggattacaggcgtgagccaccacgcccagcctaacttaatagttaattgtagtattaccactgaaaattctaggtgttttcatgctctatactggggttatgaactccatatgcaacaccaaaaattggtttaattgaatgaatcttgaatccatgatgagaacttggtttaaatctggcttaactctcttctaaaatatttcacacatagggaactttgccagtttttcatttgtagctgttttctttgtaggagtgttgggtaggaaggttataggttgaggtttacccctactcctatggggaaaagtaagtgaatctatcactacactctcaactgtaaaaaaaactgttaaaaaacaaaaacaaaaaaattttgaccactctctccaatgaagcaaagtgtgtttt

SEQ ID NO: 666999 - DNA, 538 bp, Homo sapiens
ggcgcctgccaccacgcccagctaatttttttgtatttttagtagagaaggggtttcaccgtgttagccaggatggtctcgatctcctgacctcttgatccgcccgcctcggcctcccaaagtgctgggattacaggcgtgagccaccacgcccagcctaacttaatagttaattgtagtattaccactgaaaattctaggtgttttcatgctctatactggggttatgaactccatatgcaacaccaaaaattggtttaattgaatgaatcttgaatccatgatgagaacttggtttaaatctggcttaactctcttctaaaatatttcacacatagggaactttgccartttttcatttgtagctgttttctttgtaggagtgttgggtaggaaggttataggttgaggtttacccctactcctatggggaaaagtaagtgaatctatcactacactctcaactgtaaaaaaaactgttaaaaaacaaaaacaaaaaaattttgaccactctctccaatgaagcaaagtgtgtttt

SEQ ID NO: 667000 - DNA, 1394 bp, Homo sapiens
tcctaacacagacaatgagttacaaggcactaatagttctggatccttgggtggtcttgatgttcgcagacgaattcctataaagctcatctccaaacaagcaaacaaagcgaaacctgcaccgcgaactcaaagaactataaacaggatgcctgcaaaggctccacctggtgatgaaggtaatttgtttaactaataggtccaacactctttctgttttatctgattgcttcggacagtctgtgtgatcttatagctacctctttttgtcttacatattctattcattcttcaaccttcttgtttgacttctcattgtagcacattgtatttttattttcctttataaatattttttgatttggttccttttgttgttgaaagcaatactgcccattgttcagtaatctcaacagtattgcagaaagcataacattaaaagtaaaatccttctatccaaagataatccctgttgacttttttatacaaaagtattaattttttatgtgtagttgccattttttcatgtaatatgcatttgagatttttttcttatcagtacttacagatgtacctcattaaaaaaataggtttgggtatttatagatataccataatttatttaacagtttttccagttttttctgttacaaaaaacattgcaccaaatattcttggacatacagtttagtatgtatactttgtagaatttgtactttgcacagatttggccttttttttttttttaagagcaatttgacagtacttgtcaaactctaaaatccacagtatctgtcaagttttaaaatatccaaatttgtagttttaaaggctttggaattaaaaaaawaataataaaaaggtatgttagtttttactgccatacaccaatactgagtactagaaaccttttaaaatttttgttttgatgtaaatttattttaattatgaaagagtgtatattttttcatagcattgaccattcttgtttagatcctttcttctgagttctttgtaaattaatagggtttttgttatatgttatgtatgtgcgtgtgtgtatatatatttttttgtttgtttgtttgtttgtttttgtttttttgagactgagtcttactctgttgcctgggctggaatgcagtggtgggatcatggcttgatattccaggctcaagtgatctttccacctcagtctcctgaggagctgggactacaggtgcaccccacctgcctggctaattttttatatttaatttttgtagtcatggggtcttgctatgttgcccaggctggttttgaactcctggactcaacagtcctcttgccttagcctcccaaggtgctgggattacaggcgtgagccactgtgcctggcctatattgtatatatt

SEQ ID NO: 667001 - DNA, 1394 bp, Homo sapiens
tcctaacacagacaatgagttacaaggcactaatagttctggatccttgggtggtcttgatgttcgcagacgaattcctataaagctcatctccaaacaagcaaacaaagcgaaacctgcaccgcgaactcaaagaactataaacaggatgcctgcaaaggctccacctggtgatgaaggtaatttgtttaactaataggtccaacactctttctgttttatctgattgcttcggacagtctgtgtgatcttatagctacctctttttgtcttacatattctattcattcttcaaccttcttgtttgacttctcattgtagcacattgtatttttattttcctttataaatattttttgatttggttccttttgttgttgaaagcaatactgcccattgttcagtaatctcaacagtattgcagaaagcataacattaaaagtaaaatccttctatccaaagataatccctgttgacttttttatacaaaagtattaattttttatgtgtagttgccattttttcatgtaatatgcatttgagatttttttcttatcagtacttacagatgtacctcattaaaaaaataggtttgggtatttatagatataccataatttatttaacagtttttccagttttttctgttacaaaaaacattgcaccaaatattcttggacatacagtttagtatgtatactttgtagaatttgtactttgcacagatttggccttttttttttttttaagagcaatttgacagtacttgtcaaactctaaaatccacagtatctgtcaagttttaaaatatccaaatttgtagttttaaaggctttggaattaaaaaaataataataaaaaggtatgttagtttttactsccatacaccaatactgagtactagaaaccttttaaaatttttgttttgatgtaaatttattttaattatgaaagagtgtatattttttcatagcattgaccattcttgtttagatcctttcttctgagttctttgtaaattaatagggtttttgttatatgttatgtatgtgcgtgtgtgtatatatatttttttgtttgtttgtttgtttgtttttgtttttttgagactgagtcttactctgttgcctgggctggaatgcagtggtgggatcatggcttgatattccaggctcaagtgatctttccacctcagtctcctgaggagctgggactacaggtgcaccccacctgcctggctaattttttatatttaatttttgtagtcatggggtcttgctatgttgcccaggctggttttgaactcctggactcaacagtcctcttgccttagcctcccaaggtgctgggattacaggcgtgagccactgtgcctggcctatattgtatatatt

SEQ ID NO: 667002 - DNA, 1394 bp, Homo sapiens
tcctaacacagacaatgagttacaaggcactaatagttctggatccttgggtggtcttgatgttcgcagacgaattcctataaagctcatctccaaacaagcaaacaaagcgaaacctgcaccgcgaactcaaagaactataaacaggatgcctgcaaaggctccacctggtgatgaaggtaatttgtttaactaataggtccaacactctttctgttttatctgattgcttcggacagtctgtgtgatcttatagctacctctttttgtcttacatattctattcattcttcaaccttcttgtttgacttctcattgtagcacattgtatttttattttcctttataaatattttttgatttggttccttttgttgttgaaagcaatactgcccattgttcagtaatctcaacagtattgcagaaagcataacattaaaagtaaaatccttctatccaaagataatccctgttgacttttttatacaaaagtattaattttttatgtgtagttgccattttttcatgtaatatgcatttgagatttttttcttatcagtacttacagatgtacctcattaaaaaaataggtttgggtatttatagatataccataatttatttaacagtttttccagttttttctgttacaaaaaacattgcaccaaatattcttggacatacagtttagtatgtatactttgtagaatttgtactttgcacagatttggccttttttttttttttaagagcaatttgacagtacttgtcaaactctaaaatccacagtatctgtcaagttttaaaatatccaaatttgtagttttaaaggctttggaattaaaaaaataataataaaaaggtatgttagtttttactgccatacaccaataytgagtactagaaaccttttaaaatttttgttttgatgtaaatttattttaattatgaaagagtgtatattttttcatagcattgaccattcttgtttagatcctttcttctgagttctttgtaaattaatagggtttttgttatatgttatgtatgtgcgtgtgtgtatatatatttttttgtttgtttgtttgtttgtttttgtttttttgagactgagtcttactctgttgcctgggctggaatgcagtggtgggatcatggcttgatattccaggctcaagtgatctttccacctcagtctcctgaggagctgggactacaggtgcaccccacctgcctggctaattttttatatttaatttttgtagtcatggggtcttgctatgttgcccaggctggttttgaactcctggactcaacagtcctcttgccttagcctcccaaggtgctgggattacaggcgtgagccactgtgcctggcctatattgtatatatt

SEQ ID NO: 667003 - DNA, 1394 bp, Homo sapiens
tcctaacacagacaatgagttacaaggcactaatagttctggatccttgggtggtcttgatgttcgcagacgaattcctataaagctcatctccaaacaagcaaacaaagcgaaacctgcaccgcgaactcaaagaactataaacaggatgcctgcaaaggctccacctggtgatgaaggtaatttgtttaactaataggtccaacactctttctgttttatctgattgcttcggacagtctgtgtgatcttatagctacctctttttgtcttacatattctattcattcttcaaccttcttgtttgacttctcattgtagcacattgtatttttattttcctttataaatattttttgatttggttccttttgttgttgaaagcaatactgcccattgttcagtaatctcaacagtattgcagaaagcataacattaaaagtaaaatccttctatccaaagataatccctgttgacttttttatacaaaagtattaattttttatgtgtagttgccattttttcatgtaatatgcatttgagatttttttcttatcagtacttacagatgtacctcattaaaaaaataggtttgggtatttatagatataccataatttatttaacagtttttccagttttttctgttacaaaaaacattgcaccaaatattcttggacatacagtttagtatgtatactttgtagaatttgtactttgcacagatttggccttttttttttttttaagagcaatttgacagtacttgtcaaactctaaaatccacagtatctgtcaagttttaaaatatccaaatttgtagttttaaaggctttggaattaaaaaaataataataaaaaggtatgttagtttttactgccatacaccaatactgagtactagaaaccttttaaaatttttgttttgatgtaaatttattttaattatgaaagagtgtatattttttcatagyattgaccattcttgtttagatcctttcttctgagttctttgtaaattaatagggtttttgttatatgttatgtatgtgcgtgtgtgtatatatatttttttgtttgtttgtttgtttgtttttgtttttttgagactgagtcttactctgttgcctgggctggaatgcagtggtgggatcatggcttgatattccaggctcaagtgatctttccacctcagtctcctgaggagctgggactacaggtgcaccccacctgcctggctaattttttatatttaatttttgtagtcatggggtcttgctatgttgcccaggctggttttgaactcctggactcaacagtcctcttgccttagcctcccaaggtgctgggattacaggcgtgagccactgtgcctggcctatattgtatatatt

SEQ ID NO: 667004 - DNA, 610 bp, Homo sapiens
aaagtgacggagtgccagttatcagcttaggcctcaagaggccatacaagcttttactttctcttagcctcctgccactaccatgtgaacatgccaggctagcctgccagaggatgagtgaccacatggagcagagccaagtcatccagctgaggccatcctaaagcagccagccctcagacactccatcagcagaccaaaatcacatgagcaagcacagctgaaatcaagcaagcacamctcagaactgcagaactacccagccaaccaagagacatgtgagaaaataagaaatggctgttgttttaagccattaagtttaggggtggtttggtctgtagtcccgttggcaaggttggccctaaagcatgtaatcagtccctagggtacgcatctaagctgctttgctctgaataatgtgcttcaggagatcttctccttgtgatttggctgttatgacaggggtctgcaggaagaagacccaccagccaagccacacagtgtctcaaccactgcaaatcaataagctggcatgcaggtgaacaaggtcactgtgacgtggcccggaaagacagatcaggtttctgaggcagcaatactaaaagccaga

SEQ ID NO: 667005 - DNA, 653 bp, Homo sapiens
aatactaagattcaaaagaagcacaaacacagtcctccatccggatgggagaaatctgaatgttgcgttccacagtgtccttaattcctgtgcttcctgttgccttgcaaagacctatgctttctgcttcctgcattcgtttatgctctgaatgaccacaagtacttatatctaccaaccaaccttcttctaaacacagagtttaggatttcatccagttccttaaacaataactcagcacatacatcatagtgacaaataggaatcctaagaggcaatatctcaaatacctgccgtgttgcccctatgacctcaggtcctactgctgtcccgggtgtctgactcaacagcagcttccgtggcctcctttctgggtctcttgggaacacacctctctcctatctcagggttttgcaggtgctgcctgcaacctctggcttcctccctcacttccccagatgtctggtaaaatgtcatttaccagaatccctggcttcctccctcacttycccagatgtctggtcaaatgtcatttaccaaaaagccttccctggccaagctgtataaaaataaataacaagccccaccctgccctctggcagcactccccagtcctctcagccagctttatttttctccattacagtgtctca

SEQ ID NO: 667006 - DNA, 1410 bp, Homo sapiens
tataagacgcaactgatatctatgtgttgatctcgtaccctgcgactttgctgaatttgtatcttttcttatatatatgatcgtgtcttgacttcctcttttccaaaagcccacatactcttgtaccacagcatactggcctgtgatacctttagccccgccccctacctttcccaaataaaatctctgtgttaaccagtaaacagccctcttgaatcaagttactactctgaaggatagtggtaattttaagaaagagaccaagtcttcagtattaaaaccctattagatagcattcagttgtgggtttgagtgtatgagattacttgactgctagccagggcacacagacagggagcctagccctcttaaagcctctatctctctggctactctgattcaggtgcaggtgcacagagaacacaggggcaggcagtggacccatgcagctccgtgagggccaggggtgtttgtctcctttgtgtcctctgttgtatctcttcacggcctacacatagatgttcaatatttgttgaatgactagaggaataaaagccacagagagcaggatgatacctgtctggtgattatagtacatgggctttgttttgttttagatattttgggggctataagcccctttgagaatccagtgaaagttgtgcagtcttcagaaaaacagcatacattcatgtatttgcatacaacttcgcaggatgttctttgatcactgagacccattcacatcactcaagttagaatttatgattccagtgtcaccagtgtactcctgatcttacttttatgtaacctgaaagcatacaatctcagcctatcagtacagggagcggagactgattatggaaccaaaaaactgctgtgacgaccagtgcttgggccctccagtgcgttgactgctctttgaatcaagtgccagatgccagtcagtagagtcatttcctggacaacactctggacaagtagggctgtaggaaactattgccagcagcaagaggtaccctcttgccatttaactcttggtagacataaaagggctgactagtgtccctggcatatgtgttttagagttaatgtgtccactccccaggtgctaagtgcggccagccacaaagatagtgttttgacagttctaataatgattaggattggcctgttccatagagtgaaaattaataaggatgatgcattaggtatgtgcttcctcttaatytgttgataaggtcagccacatctcccaggtgtagtttgccccgtgaactgagttggtatctacccacatcaagattggtctgccctctaagactatactttcagggatcatttctatagttcattactagagaagtttctctgaaggtgtagagcacccctccctccaaaaaaaaaaaa

SEQ ID NO: 667007 - DNA, 1410 bp, Homo sapiens
tataagacgcaactgatatctatgtgttgatctcgtaccctgcgactttgctgaatttgtatcttttcttatatatatgatcgtgtcttgacttcctcttttccaaaagcccacatactcttgtaccacagcatactggcctgtgatacctttagccccgccccctacctttcccaaataaaatctctgtgttaaccagtaaacagccctcttgaatcaagttactactctgaaggatagtggtaattttaagaaagagaccaagtcttcagtattaaaaccctattagatagcattcagttgtgggtttgagtgtatgagattacttgactgctagccagggcacacagacagggagcctagccctcttaaagcctctatctctctggctactctgattcaggtgcaggtgcacagagaacacaggggcaggcagtggacccatgcagctccgtgagggccaggggtgtttgtctcctttgtgtcctctgttgtatctcttcacggcctacacatagatgttcaatatttgttgaatgactagaggaataaaagccacagagagcaggatgatacctgtctggtgattatagtacatgggctttgttttgttttagatattttgggggctataagcccctttgagaatccagtgaaagttgtgcagtcttcagaaaaacagcatacattcatgtatttgcatacaacttcgcaggatgttctttgatcactgagacccattcacatcactcaagttagaatttatgattccagtgtcaccagtgtactcctgatcttacttttatgtaacctgaaagcatacaatctcagcctatcagtacagggagcggagactgattatggaaccaaaaaactgctgtgacgaccagtgcttgggccctccagtgcgttgactgctctttgaatcaagtgccagatgccagtcagtagagtcatttcctggacaacactctggacaagtagggctgtaggaaactattgccagcagcaagaggtaccctcttgccatttaactcttggtagacataaaagggctgactagtgtccctggcatatgtgttttagagttaatgtgtccactccccaggtgctaagtgcggccagccacaaagatagtgttttgacagttctaataatgattaggattggcctgttccatagagtgaaaattaataaggatgatgcattaggtatgtgcttcctcttaatctgttgataaggtcagccacatctcccaggtgtagtttgccccgtgaactgmgttggtatctacccacatcaagattggtctgccctctaagactatactttcagggatcatttctatagttcattactagagaagtttctctgaaggtgtagagcacccctccctccaaaaaaaaaaaa

SEQ ID NO: 667008 - DNA, 593 bp, Homo sapiens
ggcatgaggatcgcttgaatccaggagttcaaaaccagcctaggcaacatagtgagacaccccccccaacccccgatcttgaaaataaagtagctattagtaaagcattttctcattcatcaaacctttgtttcatgcacactactgaatgaaatcaataatagttaagtatatgaattctgcaggtcaatagactgcttcaaacaccagctcgcccacttaccagactgtgtgatgtttggaaaagtcatttaatcttatcaagcctcatttcctttacctgtaaaaatgaaacaacatctacttcccagggttgctgttaagaattaagtgagatgctgcaggtaacacactaggtgtgttactgtatactaggagatatatatatatatatacacacacacacacactaggatatatatatatatatatacacacacactaggatatatatatacatatatactaggatatgtgtgtatatatatactaggatatatgtgtrtatatatatatacatatatactaggatatacatatatatgtatatatatacacatatatatgtatactaggatatatatagtaaggtg

SEQ ID NO: 667009 - DNA, 2548 bp, Homo sapiens
gaactcctggcctcaagtgatctgtccacctcagcctcccaaagtgctgggattacagatgtgagccaccacacctggcctaaaatgtcatatattttgaactgactgacttctccaaaaacttatggttattagttgagagagaaaacttgagagaaagtttccctgcacttggatgagaggagagcggaacagcctgcatctctggtgctggggagtatcaaataaggggaattgggagaaggatggaggcaacagcgtagctctttgcctttcaaaattaaaatgggatgctgctttatattacaaatctaaggaattagaagagcagcaaactaagcaactaagtttgttctccttgcataaactttaaaaagccagcttaaaagttctcaagcttaaaattcgaaaaatgaaaacaaatgcatggcatgacagaggggataattcctgcacttttggaaatgttctcatgttttcttcatttcatcctatgaatgaaaatgccgtcaaaggggaataaggctattcgcagagtgctcatcaccacggtaaccactgagcatctgtaccctttagtatcttcattttgattataataaatgagttacgaatctatatctggggccctagttatatatttgccatatgttcacaccacatgcacacacacacacacacacacacacacacacacacactcacatatatggtgactaagactaagagtcagcctaaaagaagaatgatttggagcgggagctcttggagggaatggtaggaaaataacagggatccactcagtctcattttctactaaatttcaataatgagaagtgtgctcagcaaatgtttgttgactatatgaataaatgaaatggtgcatttaaccagaattgcatatttaaatatggtggtagtgtgtacaatattagaggaaggaaatgcaggcaacaaggagaaggcttctgcgatgatccatgacactctgatattgccattctgtgcaaagttgctcacattttgacattcatgatcatttttaattccccaaaacaagcaactgaactttcaacttccttttattaccataaaatagatgcaatagataccctcaccccattcctcacccaccccccaattagctttacctggtgcctaatccacagcccatcccagactcaccctatccctccttagacttctctgtatcttttacccgatccttccaggtgtccaaacagtgtcatccggtgtcctgacatgcggccccaatggactgatccagggtggaaaggaagagtgagaagaaatcagacagaagaattcaggagatgtggcaacagagtggatgtagcagaagggacatagagagtgcctaaagatgagtctttggtcagcatgtgatgaaaagaatgaagacactggggaagtggggagcagaagcggatgtgggcccaggaggaagaaggtaggtttggactggggcatgctgaggtcagtagcaacatcaaagtcctgagcaccctcatattgttgcagattccagagagcagagatggcaaaaagatgcatggaagagagacacagcagggtcgggttctggcctcaggagccaagggggaagtgcctgaggagacccccaaatgaggcctgtgtcaatgaggtctttaggggactggtttccatgtatgccaggccatactccctggattcccagcattgagaagaccaaacacttctacacatttattactgaagccccctgcaagctgaaggcggaggaagtggccaatctcctaagccgtgtgtggctgaggcagttgtcagagctgtgatgagggaaatgctcattattcttctatccctcacttggccaaataaagaacttcttagaattcttcccctgtgacaaaacggggctgtgatttggaaagcctcaggcaagtttgctagggccgcggtaaccaagcaccacagactgggtggcttcaaaactggayggcttcaacagaaagttattgttgctcagttctggaagccagaagtccaaaatcaaggtacttgcagggtcagttcgatctgagggctgcgagggaaggatctgttgtagacctctctcctaggtttgcaggcattggtcctgatgttcacagggcatccttcctgtgccttcacatcatcttctctctgaatgtatctctgggtccaaatttccctattttaaaataaggaaatcagtcctattgggttagcaccccgcccctcactttaacttgattacctctgtaaagaccctacctccaaataagatcacattctgcgtactgagggctaggacctcaacatctgaattcagggtgggtggatgcacaattcattccataacattaagaaggaagggataagtgcccaaggaatcacatgctcgcttggggagagttccaagcgtgcagagctggtggtcatagcctagcctcaggccttcggaaatcccctgaatctggttttcccagttctcataatctcatttcaccaaaatacggca

SEQ ID NO: 667010 - DNA, 2548 bp, Homo sapiens
gaactcctggcctcaagtgatctgtccacctcagcctcccaaagtgctgggattacagatgtgagccaccacacctggcctaaaatgtcatatattttgaactgactgacttctccaaaaacttatggttattagttgagagagaaaacttgagagaaagtttccctgcacttggatgagaggagagcggaacagcctgcatctctggtgctggggagtatcaaataaggggaattgggagaaggatggaggcaacagcgtagctctttgcctttcaaaattaaaatgggatgctgctttatattacaaatctaaggaattagaagagcagcaaactaagcaactaagtttgttctccttgcataaactttaaaaagccagcttaaaagttctcaagcttaaaattcgaaaaatgaaaacaaatgcatggcatgacagaggggataattcctgcacttttggaaatgttctcatgttttcttcatttcatcctatgaatgaaaatgccgtcaaaggggaataaggctattcgcagagtgctcatcaccacggtaaccactgagcatctgtaccctttagtatcttcattttgattataataaatgagttacgaatctatatctggggccctagttatatatttgccatatgttcacaccacatgcacacacacacacacacacacacacacacacacacactcacatatatggtgactaagactaagagtcagcctaaaagaagaatgatttggagcgggagctcttggagggaatggtaggaaaataacagggatccactcagtctcattttctactaaatttcaataatgagaagtgtgctcagcaaatgtttgttgactatatgaataaatgaaatggtgcatttaaccagaattgcatatttaaatatggtggtagtgtgtacaatattagaggaaggaaatgcaggcaacaaggagaaggcttctgcgatgatccatgacactctgatattgccattctgtgcaaagttgctcacattttgacattcatgatcatttttaattccccaaaacaagcaactgaactttcaacttccttttattaccataaaatagatgcaatagataccctcaccccattcctcacccaccccccaattagctttacctggtgcctaatccacagcccatcccagactcaccctatccctccttagacttctctgtatcttttacccgatccttccaggtgtccaaacagtgtcatccggtgtcctgacatgcggccccaatggactgatccagggtggaaaggaagagtgagaagaaatcagacagaagaattcaggagatgtggcaacagagtggatgtagcagaagggacatagagagtgcctaaagatgagtctttggtcagcatgtgatgaaaagaatgaagacactggggaagtggggagcagaagcggatgtgggcccaggaggaagaaggtaggtttggactggggcatgctgaggtcagtagcaacatcaaagtcctgagcaccctcatattgttgcagattccagagagcagagatggcaaaaagatgcatggaagagagacacagcagggtcgggttctggcctcaggagccaagggggaagtgcctgaggagacccccaaatgaggcctgtgtcaatgaggtctttaggggactggtttccatgtatgccaggccatactccctggattcccagcattgagaagaccaaacacttctacacatttattactgaagccccctgcaagctgaaggcggaggaagtggccaatctcctaagccgtgtgtggctgaggcagttgtcagagctgtgatgagggaaatgctcattattcttctatccctcacttggccaaataaagaacttcttagaattcttcccctgtgacaaaacggggctgtgatttggaaagcctcaggcaagtttgctagggccgcggtaaccaagcaccacagactgggtggcttcaaaactggacggcttcaacagaaagttattgttgctcagttctggaagccagaagtccaaaatcaaggtacttgcagggtcagttcgatctgagggctgcgagggaaggatctgttgtagacctctctcctaggtttgcaggcaytggtcctgatgttcacagggcatccttcctgtgccttcacatcatcttctctctgaatgtatctctgggtccaaatttccctattttaaaataaggaaatcagtcctattgggttagcaccccgcccctcactttaacttgattacctctgtaaagaccctacctccaaataagatcacattctgcgtactgagggctaggacctcaacatctgaattcagggtgggtggatgcacaattcattccataacattaagaaggaagggataagtgcccaaggaatcacatgctcgcttggggagagttccaagcgtgcagagctggtggtcatagcctagcctcaggccttcggaaatcccctgaatctggttttcccagttctcataatctcatttcaccaaaatacggca

SEQ ID NO: 667011 - DNA, 964 bp, Homo sapiens
aacaaaagctttgttccatgatgcacacaacagccatattgaaagtgacttctccctaaagctgggtttttccagcatgctgagaaggaggactgaaggaacaaggaaggtcatttgagtcagacaggctaggcttccagaccttgccacttggccactatataatcttggtcgatttacttaagtttctgagtctcttcttcctcatctgtgaaatgggggagaatgacactgtcttacaatgctaacctcccaaggatgacttgggaagtgtacccttagcgcctgcataatttccattagccactcatccgtagaggtactacaggttaagataaattaggtaaaaatactatgattgccctgaagacaaagcttcaaggtaagtccttaaactcttcctccttttcatttcctccatacagtattcatggaattatataactgcttctaagacactcccatataacaagccttagttaaaaaattttggtggtaagttacagaagttctttcaagctaagtaagcaaaagtgtattagaaggatactagtagatctcttggagttcaaggaagataaaaattgggagctggaaaaccatcagcaacccaggaaggccagtctcagttcttccctctactcctctccacaaatgcattttcaagtttgacgttttaaaataaaaagcagattatrgagcaaaaattttaaaatatacacataaaaaatgttcaccttgaatttgacagttctgatcaattctagaaatagtggccacaaattttaagtacatgaataatttgtcttctatgtagagagagaacgctgctctgcaaaactagctggataccatcacaaagcatgtacattttgtctcccattgccctcttaaaattccctcaggtcgggctaccttttccccggcccatgggttagaattgagaaatgcaattactttgatg

SEQ ID NO: 667012 - DNA, 964 bp, Homo sapiens
aacaaaagctttgttccatgatgcacacaacagccatattgaaagtgacttctccctaaagctgggtttttccagcatgctgagaaggaggactgaaggaacaaggaaggtcatttgagtcagacaggctaggcttccagaccttgccacttggccactatataatcttggtcgatttacttaagtttctgagtctcttcttcctcatctgtgaaatgggggagaatgacactgtcttacaatgctaacctcccaaggatgacttgggaagtgtacccttagcgcctgcataatttccattagccactcatccgtagaggtactacaggttaagataaattaggtaaaaatactatgattgccctgaagacaaagcttcaaggtaagtccttaaactcttcctccttttcatttcctccatacagtattcatggaattatataactgcttctaagacactcccatataacaagccttagttaaaaaattttggtggtaagttacagaagttctttcaagctaagtaagcaaaagtgtattagaaggatactagtagatctcttggagttcaaggaagataaaaattgggagctggaaaaccatcagcaacccaggaaggccagtctcagttcttccctctactcctctccacaaatgcattttcaagtttgacgttttaaaataaaaagcagattatagagcaaaaattttaaaatatacacataaaaaatgttcaccttgaatttgacagttctgatcaattctagaaatagtggscacaaattttaagtacatgaataatttgtcttctatgtagagagagaacgctgctctgcaaaactagctggataccatcacaaagcatgtacattttgtctcccattgccctcttaaaattccctcaggtcgggctaccttttccccggcccatgggttagaattgagaaatgcaattactttgatg

SEQ ID NO: 667013 - DNA, 684 bp, Homo sapiens
aataaacttttattgtattaagcaactgggattggaaaattagttggcacagaagttagtctactttggctgctacattaaatamaattgacgcaagaagaaatataaaacctggataaacaataacccttgaagaaatcagttaagtgtttaaaaatatccctcttaccttaatagatgttaggtgaaatgactgttataggccaaatttacaaaattttcaaagaatagatcccattctatctatctatctattcatctatctatctatccatctatctatctatctatctatctatctatctatctatctatctatctatgtatctatctatctgagagaggaggggagagagagagtgcttcagatgctagtaagaaaagaaagctgtcaaactcattttacaaagttgatattaacttgacattgaaaccaaagataacacaagaaaaaaaaagtacaaatgcagatgcacatagatttttttaaagaagagttctaaataaaatatccatatatcaaatccaacagtgacattcaaaattaatacatcaactttagtagagtttgtttacactcgggaatgcaagactaataaaatgacagaaaagtacactgatctaataatcacataaacaacttatgtgagagaaaacatttgactctccggacagaaacaaaaa

SEQ ID NO: 667014 - DNA, 684 bp, Homo sapiens
aataaacttttattgtattaagcaactgggattggaaaattagttggcacagaagttagtctactttggctgctacattaaatacaattgacgcaagaagaaatataaaacctggataaacaataacccttgaagaaatcagttaagtgtttaaaaatatccctcttaccttaatagatgttaggtgaaatgactgttataggccaaatttacaaaattttcaaagaatagatcccattctatctatctatctattcatctatctatctatccatctatctatctatctatctatctatctatctatctatctatctatctatgtatctmtctatctgagagaggaggggagagagagagtgcttcagatgctagtaagaaaagaaagctgtcaaactcattttacaaagttgatattaacttgacattgaaaccaaagataacacaagaaaaaaaaagtacaaatgcagatgcacatagatttttttaaagaagagttctaaataaaatatccatatatcaaatccaacagtgacattcaaaattaatacatcaactttagtagagtttgtttacactcgggaatgcaagactaataaaatgacagaaaagtacactgatctaataatcacataaacaacttatgtgagagaaaacatttgactctccggacagaaacaaaaa

SEQ ID NO: 667015 - DNA, 584 bp, Homo sapiens
tatattttaagcctgtttgggttcctattgtttaataaatatgtcttcatagtataaattgtcatgtcttcttattccctgactcctctcctgattgaattttttcatccctctcaagctgactataacagcttctttaggaactttgtctttagatttctttgaagagcctasagctaaatattttcagcctattagacctacttcctttttttgtaacatttaggcatgcctcatttactgtcttgaagtggaattcaaagataatacaactcacctatacatataacttttaaaaatatatatgtatttaaatccctatctttaggatacaagagaaaggtaagaacagtaatccacagtaaactactctgaatttcaacccatcagtactctgacaccattacatgggaggcatgctgagatagtaggatgtgtgtacctctcacacagccaccatggatgcaccgcctcctcagccccaggtggactgtcacaggtatgggccaggtgtgggccaggtgatgccctatataatttcccctgtataatttcccaggtgttataatttcccaaattgatgg

SEQ ID NO: 667016 - DNA, 1311 bp, Homo sapiens
tgaggagccccccacacagatgtaagaaacactaagttctcagatttgtctccatgacaccccttttcccacttccccccaccacagcaccagatggcagagaagcaagctctccaaagtsccctacaaattgcacaggggtaccagaccaaattttatgatctatcatccctacggtgcttctaggttcagagatgttaaattcccacccagatggttgaggtctgcaacataccctgaggctcatttcactggatacgagcagagtaacagcagcaaagcacacaccaactggcaccagcttaaaaactatcagtaggctgggcacggtggctctcgcctgtaatcccagcactttgagaggccgaggagggtagatcacctgaggtcaggagttcgagaccagctgggccaacatagtgaaacccatctctacaaaaaattacaaaaattcgccaggtgtggtggcacgcacctgtgatctcagctactcgggaggctgaggcaggagaattgcttgaacctgggaggcagaggttgcagtaagcggagatcacgccactgcattccagcctgggtgacagagcgagactctgtctcaaaaaaacaaaaacaagaacaaaaacacaaaaaatctatccgtacacatgagcatgtaaatggtggcacactcctgaggccagcatcacctgcagtcctgaaaccatttatttcagaagctttttttttttcttagagtatcactctgttgccaaggctggagtgcagtggctggagtgcgatcatagctcactgcagcctcaaagtcctgggcttaagcaatcctcctgcctcagcatcacaaatagctgggactacaggtgtgcacatcacgcttggataactttttcaacgattttctgtagagatgggatcttcctatgttgcccaggcaagtctcaaattcctgggctcaagtaatcctcctgcctcggcctccagaagtgctgggattataggcatgaatcaccacacccagcttattttagcagctttacaggaaaaaaacaccaccaccacatacttttttcaccatcaccataaaactttagtggaacaaacaaactcttaatattgaagttgatgagtagagtttggaagcaccactgaaacaaaaatggccttgaatgttaaccagatgacgttagggaaaccgcaagaggagtgagaataatcagggaaaaggaacactcctgaaaataggcatgctaacatccaccaccagcaacacggatggttgggctcttcccattttcagaaagcttcgctctt

SEQ ID NO: 667017 - DNA, 633 bp, Homo sapiens
gccatgcttgaagaagtttccaaaaccgaaacatcactttgctttagtatacaatgtctaagtaaacataattgtccttcaaagaagagaaaaccattaatccactcaatgggaaccctgggagagtagggactaggtggtcattaagaccttcttatggacgttaatgaatgtgaccctataaaacaatgactggtaaagcactatgtccaaagcacggttttcctctgaaggagaagtgcctcattatccattctgtagcacctaggctatcttcatctaatctgatctggccggcaggtaaaaagtcatggagttcaggaaggggctgggtaggagagatgcaaattgtgtactcccaagagygacagagtgcagggaactgcagatgccatgagaagcacacccctgaaacaggaaactgcaccctacctgaattaccccactcttgactctgacaactaacaacatgcattttttgggaatatgtattcattaaataagcactcagccattctatttctcaattacctctagtgaccctaagatctgaccacgggcatagaagaggaaaaattcttccctagtgacagccagctgtaactgagtcaaatgcccgtcattttttcttca

SEQ ID NO: 667018 - DNA, 633 bp, Homo sapiens
gccatgcttgaagaagtttccaaaaccgaaacatcactttgctttagtatacaatgtctaagtaaacataattgtccttcaaagaagagaaaaccattaatccactcaatgggaaccctgggagagtagggactaggtggtcattaagaccttcttatggacgttaatgaatgtgaccctataaaacaatgactggtaaagcactatgtccaaagcacggttttcctctgaaggagaagtgcctcattatccattctgtagcacctaggctatcttcatctaatctgatctggccggcaggtaaaaagtcatggagttcaggaaggggctgggtaggagagatgcaaattgtgtactcccaagagcgacagagtgcagggaactgcagatgccatgagaagcacacccctgaaacaggaaactgcaccctacctgaattaccccactcttgactctgacaactaacaacatgcattttttgggaatatgtattcattaaataagcactcagccattstatttctcaattacctctagtgaccctaagatctgaccacgggcatagaagaggaaaaattcttccctagtgacagccagctgtaactgagtcaaatgcccgtcattttttcttca

SEQ ID NO: 667019 - DNA, 1052 bp, Homo sapiens
gctttatgatttctagttaaaaagttagaaatgaatgaagaagaaaactatccactatattcacagtactataatcacaattaaaactttagaacatgcccttccaagtttttaaaatctattcatatacacatacgaataaaatagacatgtgcttccatttctaccaaattgtgaacaagctgcatatattaggttgtgtttttttgtgtttttaactaaagttttcataaatgttttttcgtattactaagtatctttctaaagataatttttaatgtatacatatatcacatacatttttatctgtagtgaaataatcacaaaatgaatgatgaagaaaataatcacctatagccacctataaccactacttaaaccataaaaacataaccatataaktaaccatgcatataatcactattaaaattctaaaatatgttttaatacacatatgaattttaaatatatgtaattatatatacacacactttcatttttactaaaatattaatcaaactatatgtattattttataccccgattttaaagaaaatttaataagcagtttgtatacttgcaattttttttacaaaaagtttaaaaaatacagaaatgaatgaagccaattatcaccaataactcaagtaatacagataatcactatttaaactttggaatatatacttctggacagatatagaaaaaaccattttattattaaattctatttttaatttaaattttatatgagcatttttccatgttattatatatcttcttaagaaataattttaagcagcagaatagttttataacatgaagtacttttgataacattggatataataaaatcttttaaatcttggccaattttatagcaaaacttttcatttttaaaaaacatacaatcttttgattagtattgaagttaaatgtgtttttcaaatgctcatagaccattttaaatgatgtcttatttattttgtccattctgtatgctataaataatttttccattttatcatttccttttatggcaattttcatgc

SEQ ID NO: 667020 - DNA, 1052 bp, Homo sapiens
gctttatgatttctagttaaaaagttagaaatgaatgaagaagaaaactatccactatattcacagtactataatcacaattaaaactttagaacatgcccttccaagtttttaaaatctattcatatacacatacgaataaaatagacatgtgcttccatttctaccaaattgtgaacaagctgcatatattaggttgtgtttttttgtgtttttaactaaagttttcataaatgttttttcgtattactaagtatctttctaaagataatttttaatgtatacatatatcacatacatttttatctgtagtgaaataatcacaaaatgaatgatgaagaaaataatcacctatagccacctataaccactacttaaaccataaaaacataaccatataagtaaccatgcatataatcactattaaaattctaaaatatgttttaatacacatatgaattttaaatatatgtaattatatatacacacactttcatttttactaaaatattaatcaaactatatgtattattttatacccygattttaaagaaaatttaataagcagtttgtatacttgcaattttttttacaaaaagtttaaaaaatacagaaatgaatgaagccaattatcaccaataactcaagtaatacagataatcactatttaaactttggaatatatacttctggacagatatagaaaaaaccattttattattaaattctatttttaatttaaattttatatgagcatttttccatgttattatatatcttcttaagaaataattttaagcagcagaatagttttataacatgaagtacttttgataacattggatataataaaatcttttaaatcttggccaattttatagcaaaacttttcatttttaaaaaacatacaatcttttgattagtattgaagttaaatgtgtttttcaaatgctcatagaccattttaaatgatgtcttatttattttgtccattctgtatgctataaataatttttccattttatcatttccttttatggcaattttcatgc

SEQ ID NO: 667021 - DNA, 1052 bp, Homo sapiens
gctttatgatttctagttaaaaagttagaaatgaatgaagaagaaaactatccactatattcacagtactataatcacaattaaaactttagaacatgcccttccaagtttttaaaatctattcatatacacatacgaataaaatagacatgtgcttccatttctaccaaattgtgaacaagctgcatatattaggttgtgtttttttgtgtttttaactaaagttttcataaatgttttttcgtattactaagtatctttctaaagataatttttaatgtatacatatatcacatacatttttatctgtagtgaaataatcacaaaatgaatgatgaagaaaataatcacctatagccacctataaccactacttaaaccataaaaacataaccatataagtaaccatgcatataatcactattaaaattctaaaatatgttttaatacacatatgaattttaaatatatgtaattatatatacacacactttcatttttactaaaatattaatcaaactatatgtattattttataccccgattttaaagaaaatttaataagcagtttgtatacttgcaattttttttacaaaaagtttaaaaaatacagaaatgaatgaagccaattatcaccaataactcaagtaatacagataatcactatttaaactttggaatatatacttctggacagatatagaaaaaaccattttattattaaattctatttttaatttaaattttatatgagcatttttccatgttattatatatcttcttaagaaataattttaagcagcagaatagttttataacatgaagtacttttgataacattggatataataaaatmttttaaatcttggccaattttatagcaaaacttttcatttttaaaaaacatacaatcttttgattagtattgaagttaaatgtgtttttcaaatgctcatagaccattttaaatgatgtcttatttattttgtccattctgtatgctataaataatttttccattttatcatttccttttatggcaattttcatgc

SEQ ID NO: 667022 - DNA, 668 bp, Homo sapiens
tatcattttacatgttccaaaggaaaaattaaatgggatttaacctctttgaaaataatatcctgaattttctaacttccctagtgtcaatgataccaactacaaactatagaccaaaagctttaggtttaatagaatattaaatgattgyttcaagtgataacagagattaaaataaataaataaataagtctcctatgctttaggaagccgggacctctaacaagattctatagttattcaaacctactccctagaaatttatcacccaaagagcagccccaaagattagctgttaatgccatgaagatgccaaagataatcccatgacagtctaattaccttatctcgtatgtcagcctcatgggtcttctaggccacagtcggcctggattcctttattcacctctccttcagagctgaaaactgactgtagcacatctgtaatagtctttcttttgaatcacgtagttctaacagtttcaaacaaggctactcatttgctgctctccagggaattttacaatagcggaaagttcagatctcccaaatttctgacctgctattgacttacacatttccataacctttattactggagtaccctccttctgagagtggcttctaatagtcttgttaattagaaccaaaatacatcagaggccttc

SEQ ID NO: 667023 - DNA, 668 bp, Homo sapiens
tatcattttacatgttccaaaggaaaaattaaatgggatttaacctctttgaaaataatatcctgaattttctaacttccctagtgtcaatgataccaactacaaactatagaccaaaagctttaggtttaatagaatattaaatgattgcttcaagtgataacagagattaaaataaataaataaataagtctcctatgctttaggaagccggracctctaacaagattctatagttattcaaacctactccctagaaatttatcacccaaagagcagccccaaagattagctgttaatgccatgaagatgccaaagataatcccatgacagtctaattaccttatctcgtatgtcagcctcatgggtcttctaggccacagtcggcctggattcctttattcacctctccttcagagctgaaaactgactgtagcacatctgtaatagtctttcttttgaatcacgtagttctaacagtttcaaacaaggctactcatttgctgctctccagggaattttacaatagcggaaagttcagatctcccaaatttctgacctgctattgacttacacatttccataacctttattactggagtaccctccttctgagagtggcttctaatagtcttgttaattagaaccaaaatacatcagaggccttc

SEQ ID NO: 667024 - DNA, 1890 bp, Homo sapiens
ctttatcaataggttcagtgggcacagaagacatgaatagtctgtttagtagaatctcttgtgtagacttaagggcttaacttatgattgctaaataataacttttgcataatttcaatagaatatatgcttcaattcctaaaacttccttatatatttgactttttatttattggaattactttaggaaagctcaatattttaaaatgacaaatggtactaaaatatttaaagtctcctagaatttgtatttagaaatcactttttcaagttcttaaaatgctgctttacattatttattttaaaataaaagcaatacaaaataattttataaggttaaaaaaaacaaataatttgtgtgatgaacaataaaaattatcttctattacctcctcccaaatgaccccaaatattgcaaatgttagcattttgttatgcatgcttagcagagtaagagccagcaggtgggattttgctacatatttcctattctcaagcatgcttattcctcccgataatatttctaaagagttgtccataaaaatagcctccatttattttattgattaattatatttaaattttaattgtagattacactaaaaaaatcaagctgatatttatttttgatatttgcagttttttgtcaatacattaaatgcaatgatgaaaaacagatgagaagactctttggaaagtctgggtgaatatgtatcaggagaagtgctgggcaaagtatatatgctgttaaaatttacagagctaatgtcaaattgccctctagaaaaccataaaaaatgtatactacaatcagaaaaacataaaagcatctgtttccaatctactctgccttagtctgttttgctgttggtataacaggataccacagactgagtaatttataaacaacagaaacatttggctcatggttctggaggctggaaagtccaaggctagggcttcacttagtgagggtcttcttgtggtatcatcccatggtgaaaggcagaagggcacaagagtatccacaagagagcaagaggggtttgaatttgcttttataacaaacccattcttcagataactaatgcactcccctgataatgacattaatccactcacaagggcagaatcatcataatctagttatctcttaaaggtctcacctctcaaaactgttgcattggggatgaaattttcaacacaagatctttgggagacctattcaagccatagcaccctccaacaacaaaatgttaataaacactacatacacacacatatatttttcaactggagaattgaaaaaaaaagatatctgacttttattttacattgcttcaattatgcagtgggacattcagatccttgatggtcatttgctgttgttactgttttctcaaactatcttacgttttgtaaattgtctactaatattgtctatttctttattgtgtatgtttttgtttaattaataaaattatcttattttctgccatagttgcgaatttttccccagacttgttctttgcttgatttatttttttcattcagaataatttttattattgcttttaagctttcaattaaaaaataattttggtttctagagtattgatcaaacttagaaaagttttcctcacttaaagatttttaaaagtgtagttaacgcatactatgttttgatactttatgtgattttagtgtgctttctgtcttgaaattggtagcaggtgttcccacgtgaagcatgttcagtgatgtttgctaactattgacagctaggccactatgctgatgccacagggycacctgaagcatctgctggtgtcatctcaatatgcccagcagacatattcttcttatcttttcccccttctgcctttctca

SEQ ID NO: 667025 - DNA, 1280 bp, Homo sapiens
cttctcctgcccctgctgcccccaggctgcccaccctggaaagcatctcatccattcattcactcaaacagtattcggtaggtgcaggctgtgtcaagaactaggctacgaggcctagagatgtataagtaagggcttccaccttacaggaactcatgggtcagaagagaaggacctgagaaacatgtggtgatcatggaagaggagggagccatagtgtttgggagcccggaggacagtgttaccagggcaagggaagacacgggtgggaggtccaaggaagctcttggagtcttccccttctacagcaatctgtctgccttaagttgccctgcccccagacaagctgtcaacctcctgaaagcagagctaggtgtaccctgcccatggggcatccccagggcctggcaggggcctggcaggtacctggcataataccacacttgcagtgggttttcaggcttattgatgaattaatctatgtaggacttatgtggtccttcaaagacaaaacacactgaattcaggagatggaaaaagggaatgggctattattattttgccttatttaaatcatttatgtatttgagtagctaatatagtcacagagttcaaaaatcaaaacaatataacaagaaatacattaasaggtcttacctctaccctgattcccacctattccttttcccaccccatcatactcacctcagcctcctatgagttataattttagtttttggtatattactccagtgtacccttatgcaaataaaatcacacacatagtttttcttatttttactcctttccacacaaatggtggtaactgaataaatttgcttttttcttttactcaacaatatatccaggagctctttccctaatagtacattgagaatgactcattcttttttacagttgcatagtactccatggtaccttatctgaaactcattttaagcacctgtatttgactagcccttttctcctcccccatcacaccaaaacttgccctcaagacactaatcttctttaagtgtctaatttaataaaacaatcatgacagtgcattcaaaaaatggcagggtgtgtttatatgtatactttgtaaaacaggccatgagggcaaatgtctcatttcagaggagtcaactccaaaggaagcaagtggagaagcatcttggtgcagggactgtgtctccaggctattcatattcttaaaaggatccccccatgcttaagacactgaggggctgagctcattctggttgaggaaaatc

SEQ ID NO: 667026 - DNA, 644 bp, Homo sapiens
aaaatgatttgagattgtcttatttggggataagtttacaaccccaggaaaactgcaagaagagaacgcctctaagagaagggccaaatgacatcaagatgctctgaattcygcactaaagaaagtctcagaattctttcccatatttacacgttgccaagtccagtgtcttcaacttgtcttccattatattgggattaataccttagagcattttttttttccattgtgtagtgtgcattaccttcataggggcaaagagaatgccccaaagcagattcaaagtgtataactcaggattaagaaaaaaggcttcaacgtttgcattttaccaagatagaacaaagacatcaaggagagtcctgatgggcaaaaattacagatccagatgaaatagtccagaagtctaaggcaaagaaaaactaggtaaaaatacaaatatttttctttacatttagagaagggaggaagacatggccatggccacctcatagtgataggggtgcttcaacatgtccttaaggccacacccaggatcattctgaatcatcagcacatatctgagataatgacagggatgggccagtgagagcatcctgtgcatccagtgggatagtaaagagagtttcagcttttgaaatagg

SEQ ID NO: 667027 - DNA, 1087 bp, Homo sapiens
tgggctaaggtggtgatgaaagtgaagaaatgtgattgcactagagacaaaacaggattaaaaacaacaggatttggatatgggcaccatagcaaagagtggtacccaagggtgacttctaggttctcggcttaagtatctggacagatgccagtgctgctcaattagatgggcaacagtgtctaggacagaaatagcatgtcctgccagccagataactgcacatttacctaatgcatggtcaacatagtgagtttgttcctgttatgacaggtcaggggaatcccactagcctgcacctcctaaaaattgtatactcacttgccactctgagaatgtaacctgccttatttgtaggatatgtccaagttcaaggttccaacactgcgttatcattatttttattacttacaatctccctaggttataaattccaacccaggaacagagaaagagatggcatcagaattgttttcaagaatgtgtcatcattcaacactgacttcaatcattctatttgcaagttactaatagtactctctcaggtattcccttttaaacaaaaagctgaatagtcaatgtgatgacctgctttaaatataaacatagaaaagtaaaacatttcccctttccattatctttttaagattttgtcaacaatgaagtattatcacgggaacacatgttataacaccttaaacytgtaattaatagaaatgcttatgttaaaataatctcatcctatctgctttttctaaaaaattttatttatttatttgtttattttgagacagggtctcactctgtcacccagactggagtgcagtggtgtgatcaaggctcactgtagccttgacctcctgggctcaggacatcatcctatttcagcctcccaagtagaatggaccatgggcatgagccaccacgaccagctaatttttaaattttttgtagagatggggtctcctcatatttcccaggctggttttaaactcctggcctcaagcaatcttcccatcttggcctctcagtgttggaattataggcatgagccactgcacccagccatatctgcttttttctaagc

SEQ ID NO: 667028 - DNA, 1087 bp, Homo sapiens
tgggctaaggtggtgatgaaagtgaagaaatgtgattgcactagagacaaaacaggattaaaaacaacaggatttggatatgggcaccatagcaaagagtggtacccaagggtgacttctaggttctcggcttaagtatctggacagatgccagtgctgctcaattagatgggcaacagtgtctaggacagaaatagcatgtcctgccagccagataactgcacatttacctaatgcatggtcaacatagtgagtttgttcctgttatgacaggtcaggggaatcccactagcctgcacctcctaaaaattgtatactcacttgccactctgagaatgtaacctgccttatttgtaggatatgtccaagttcaaggttccaacactgcgttatcattatttttattacttacaatctccctaggttataaattccaacccaggaacagagaaagagatggcatcagaattgttttcaagaatgtgtcatcattcaacactgacttcaatcattctatttgcaagttactaatagtactctctcaggtattcccttttaaacaaaaagctgaatagtcaatgtgatgacctgctttaaatataaacatagaaaagtaaaacatttcccctttccattatctttttaagattttgtcaacaatgaagtattatcacgggaacacatgttataacaccttaaacctgtaattaatagaaatgcttatgttaaaataatctcatcctatctgcyttttctaaaaaattttatttatttatttgtttattttgagacagggtctcactctgtcacccagactggagtgcagtggtgtgatcaaggctcactgtagccttgacctcctgggctcaggacatcatcctatttcagcctcccaagtagaatggaccatgggcatgagccaccacgaccagctaatttttaaattttttgtagagatggggtctcctcatatttcccaggctggttttaaactcctggcctcaagcaatcttcccatcttggcctctcagtgttggaattataggcatgagccactgcacccagccatatctgcttttttctaagc

SEQ ID NO: 667029 - DNA, 1559 bp, Homo sapiens
ctctgtagctgccaaagagaaagatataggagggtgtatacattaaccacatccacagtaatgctgcacaacaaacaaaaacccaaatagtggcatacaacaataagcatttatttagctcatgcatctgtgatcaaccaagggctggcttatctcactggactcggctagatggttttattgaccttaaatggagtcactcatgcttctgggtgttagctgggagttggatgctctaagctggggtctcaagagcaggttggctggggcagctctgctccatatgtgctccatctttctcctgggctagcctggtcatgttcttctcatcatgatagaagacatataagtgagcaaacattttaaatcttttgtcatttaacatttactaatattctcttggtcaaagcaattccacagacaaacttaaagtcaagttttaggaaaacgcagtccacttctttaatgggaaaacttcaaagtcacatggctagagtcagatattcaaagagaggagaattgaggccatgaatgtaatttatcattgtagaagaacatggtgactggccagacctttggaaaccccacatctgctgtaataatttgtatgttttatcggcatatacatgttgataacatataaatttaattaggagtaccccagctataaaagacttgaacacagttcagagaaattttaaaaacaaaattaacatatactatttggatgatatggaattagtactaaaaaaaataagctttgataatgagggcctagccatatccatgggatgttccactggaaaattgttgggaagttagaagaaagtgtaaaagctcagggcattggccatctggtagggtagcgcattgaacaatgaagaaaggctaaaagtgaaagatgattagcaatttttaaaaasccaaactttggcccaaagacagccctaaaggcaattttctgtcaaacctatctggccatctaatgtcattaaaatggaaatgctgatggtattttcagtgaaaaaattttcctcttgagataaatatatagctacctctgcaacagctgaattttattaaggaagttccaaaaatattaggttggtgcaaaagtaatggaggtttttgccattaatagatgcttaccttcaaagtcagaatgttcaagtttattctctctctcctttgggcacctggacaaataaaggccaagaaaaccaaaacaaatgataaaatgagaaatgggcaaacaaccttttgttcattcagattcaaaaaaatctcttgaactggtttcaaaatatttgattcagaaaacctaaaccatgtttgtcaactgcattcttgttctcatttaaaaagaaaaagaaaaagacaaaagggcctcctatcttcccatgagtataatggtggaaattcaacctgtatgttttctgattcatttacacttatctcatcaaaatattttgtaagagctgagctctttggtggccaaagatgttttgtggtccttttcccttgcaacagaaatattgtggtttatcatcagcttacac

SEQ ID NO: 667030 - DNA, 1559 bp, Homo sapiens
ctctgtagctgccaaagagaaagatataggagggtgtatacattaaccacatccacagtaatgctgcacaacaaacaaaaacccaaatagtggcatacaacaataagcatttatttagctcatgcatctgtgatcaaccaagggctggcttatctcactggactcggctagatggttttattgaccttaaatggagtcactcatgcttctgggtgttagctgggagttggatgctctaagctggggtctcaagagcaggttggctggggcagctctgctccatatgtgctccatctttctcctgggctagcctggtcatgttcttctcatcatgatagaagacatataagtgagcaaacattttaaatcttttgtcatttaacatttactaatattctcttggtcaaagcaattccacagacaaacttaaagtcaagttttaggaaaacgcagtccacttctttaatgggaaaacttcaaagtcacatggctagagtcagatattcaaagagaggagaattgaggccatgaatgtaatttatcattgtagaagaacatggtgactggccagacctttggaaaccccacatctgctgtaataatttgtatgttttatcggcatatacatgttgataacatataaatttaattaggagtaccccagctataaaagacttgaacacagttcagagaaattttaaaaacaaaattaacatatactatttggatgatatggaattagtactaaaaaaaataagctttgataatgagggcctagccatatccatgggatgttccactggaaaattgttgggaagttagaagaaagtgtaaaagctcagggcattggccatctggtagggtagcgcattgaacaatgaagaaaggctaaaagtgaaagatgattagcaatttttaaaaagccaaactttggcccaaagacagccctaaaggcaattttctgtcaaacctatctggccatctaatgtcattaaaatggaaatgctgatggtattttcagtgaaaaaattttcctcttgagataaatatatagctacctctgcaacagctgaattttattaaggaagttccaaaaatattaggttggtgcaaaagtaatggaggtttttgccattaatagatgcttaccttcaaagtcaraatgttcaagtttattctctctctcctttgggcacctggacaaataaaggccaagaaaaccaaaacaaatgataaaatgagaaatgggcaaacaaccttttgttcattcagattcaaaaaaatctcttgaactggtttcaaaatatttgattcagaaaacctaaaccatgtttgtcaactgcattcttgttctcatttaaaaagaaaaagaaaaagacaaaagggcctcctatcttcccatgagtataatggtggaaattcaacctgtatgttttctgattcatttacacttatctcatcaaaatattttgtaagagctgagctctttggtggccaaagatgttttgtggtccttttcccttgcaacagaaatattgtggtttatcatcagcttacac

SEQ ID NO: 667031 - DNA, 1559 bp, Homo sapiens
ctctgtagctgccaaagagaaagatataggagggtgtatacattaaccacatccacagtaatgctgcacaacaaacaaaaacccaaatagtggcatacaacaataagcatttatttagctcatgcatctgtgatcaaccaagggctggcttatctcactggactcggctagatggttttattgaccttaaatggagtcactcatgcttctgggtgttagctgggagttggatgctctaagctggggtctcaagagcaggttggctggggcagctctgctccatatgtgctccatctttctcctgggctagcctggtcatgttcttctcatcatgatagaagacatataagtgagcaaacattttaaatcttttgtcatttaacatttactaatattctcttggtcaaagcaattccacagacaaacttaaagtcaagttttaggaaaacgcagtccacttctttaatgggaaaacttcaaagtcacatggctagagtcagatattcaaagagaggagaattgaggccatgaatgtaatttatcattgtagaagaacatggtgactggccagacctttggaaaccccacatctgctgtaataatttgtatgttttatcggcatatacatgttgataacatataaatttaattaggagtaccccagctataaaagacttgaacacagttcagagaaattttaaaaacaaaattaacatatactatttggatgatatggaattagtactaaaaaaaataagctttgataatgagggcctagccatatccatgggatgttccactggaaaattgttgggaagttagaagaaagtgtaaaagctcagggcattggccatctggtagggtagcgcattgaacaatgaagaaaggctaaaagtgaaagatgattagcaatttttaaaaagccaaactttggcccaaagacagccctaaaggcaattttctgtcaaacctatctggccatctaatgtcattaaaatggaaatgctgatggtattttcagtgaaaaaattttcctcttgagataaatatatagctacctctgcaacagctgaattttattaaggaagttccaaaaatattaggttggtgcaaaagtaatggaggtttttgccattaatagatgcttaccttcaaagtcagaatgttcaagtttattctctctctcctttgggcacctggacaaataaaggccaagaaaaccaaaacaaatgataaaatgagaaatgggcaaacaaccttttgttcattcagattcaaaaaaatctcttgaactggtttcaaaatatttgattcaraaaacctaaaccatgtttgtcaactgcattcttgttctcatttaaaaagaaaaagaaaaagacaaaagggcctcctatcttcccatgagtataatggtggaaattcaacctgtatgttttctgattcatttacacttatctcatcaaaatattttgtaagagctgagctctttggtggccaaagatgttttgtggtccttttcccttgcaacagaaatattgtggtttatcatcagcttacac

SEQ ID NO: 667032 - DNA, 2114 bp, Homo sapiens
cctcagtgctaagaaaattaattgtatagctctaggtcattgacctgtagtagttttacaacctgaaacagatcatgtccctgtccctgtaggtcttgtggttaacagagaagtaatagtagtcttcaaggagtttagacctttacatgatttcatggggaaaaattagaataagtatctgcaggtatttgggacattcctttgttttcttgttcaagaatgaaacaaccaaaaatcaagagaaatttatcttttccatgtaatcatgtgataaatactatagaataaaggcaactgggccttctccagtatggaaatttcccggtactagatgtagtattgtatgcaatgatgtacagtcttccgcagatttaccaccacaactatccacacctaaccccagtatacagaacaagtattcccccctcattgaatttatcactattgcaattaattcatggagtactttcttcattgaatgtttagtgtctgtttcctcctgtttgtccacaaactccataattcctattatctacttgcaaagcttagcacatggtagttgttctgtaaatgtttctggaacaaaagaagggaagaagagtaaaaaggaaaaaagagaactctgaccataaaacatgacatataattaaaagaaaagactctctaatattcagcaaatacagagcagctagactaacatttaagcactttgaaaccgtcagttgacaaatttaagccataaccactgacagtttctcatttcctgagaaaatgtaagacacaaattcttagcctgctttaaaccttaaaaggtcccaaaacatccttttcaattgtcccatatcaaatctgcctcccttaactggtgctgtcttggctgcctggttactgagctgtaatctcctcataccccattttctgagaagccctagctaagttacaatgattgcctgtataaattaatctccactgcaataacaaaggcaatcccgtcagcagttgacattctggcttttaattcactgaacaactttttgtttgttaatcaaagctgcatctcatcccattgaggatgtgatttgtctctgcttctctgggtcgtggtgtcccttacgccagtgctgctcaaaatgtgatccctgggctagcattagcaccttctgggaactcattagaaatacaggcctttatgctcagtctattgaaacagaatatctggcaacgagtccaaggactctgttttaacaagttcttcagaagattcttgtgtatgctgactttgagatgcatagctctacacactactgtaatactagtctgtggcatagacattagtccctcatactttcttaggtacagtttgcattaggaaaacatgaatcagctagcatagacattccagtaccctctctcgctatcctgcctcttcaccagcytccagtgggagtagtgacttaaagcatgcattctggacttggattgctggcatttgattcccgcctctactatctggtagccgtgtgacctcaggtgacttattcaatctctctgtgcttcagtctcctcatccataaaaggcaggtaaaaggagtatcatctcatatggttttaataagagttgaatgagttaatatatatttagctgcatagaaaaatgtgacatatactaagggctatatttattaagatagatttaactgatttaaaaaagttcttgttttctgtccaaagagcatgattatttcacccatcatctttgctctggaaaacaaatccatgtaaatgtctcatgcaagctgaaatctggtctttatgacagatacaacggttagactctttaaaagcattttcctagtttgaagtgtgggatacagtattataatggaaaaaaatacaccactatttctttcttttatgaatatatttcttacaaaattagttataaacatgccatgtctgtcatgaaatgctgatacacaaagatattactggctttgcaaggtatcctcttgtgtgattcaaatatatacattaaattgtcaggtggcctccaagaaggaagtgaaggaaacctctaccaggctgatttctattcttgataaaataaaaataca

SEQ ID NO: 667033 - DNA, 623 bp, Homo sapiens
tggcctaaacttgcagtttcacctattacattgtttgaggagccacagatcatagcgtgtgtggtccaaaaaaagtcagaaagaataaaattgatattagcattttttgtttacttctcttaatattgctgaaaaaagcaaagacactcttcatcctccttgatgtgatgctgattttccattcaagtggaatcccacagcaggacattggaattaagcaataaagtgctcttggtgaccaaacaccagacatgtcacaattaacatgagtaaattaggttacatcttatttgtcaactcattttcattactagttttctctaaccaccaaatggatgggttagaaagtgatggattatatgcctgttcaccaagctgctataagtrtcttagaggctttgtcaagaaagtcacccacgactgggcaagctaaagggacttgccaaaggagtcaagaggaggtaggcagagcatgaaagcccttcttaggagaatgaaaaaagaaatgggaacagaagctaaaaggtaaagcagataattgtaattaaagtttcattagaaagtattctccaaaatcaaccaaataaagttagtgggaaacggtatatagataatggataaca

SEQ ID NO: 667034 - DNA, 880 bp, Homo sapiens
ctgaattaaattcagcagcagagataaattatgaactggaagagatattgtccagaaaatagtctggagagacaaagagatggaagacaaaaaatgaagtgaaggggcacagacagaaaagggctgatcaatatgtaattgttgtttcaaagggagatagaaaaaaatgggaaataaacgatcacagaaagagataatagttgagaacgtcatagaatgttttaaaaaaaaccacaaattctcagttctaagaatatcagtgaatactaagaagggtaaataaatacatttgcaagaygacaaatcataactaaactgtgaaacacggaaaaaaaaagtctttattgaagccaaggagaataaacaaattacccacaaagaaaaggcaattatattggtagctgacttcacaaccacagaaagaaaaaaatagatgtcttgaatattattttcaagatgctgagatgaaataactataatcttaaaactttgtactgagcaaaaatatcaaccaagaataagggtggataaggatattttcagaccaagagagttaacacgagaattaaatatttaaagctatgcttcagaaagaaagataatgatcccagatagaaatctgagatgaaagaaaaataatggacaaagatactggtaaatatgtgaataaatcataaaataagaatgtctatacaagtatgatttatcaataatatttaaacattaaaacattaaaaaaagaatgtcttgggtgtaggtgggtgggaacagattcaaaataaattataggtctcatacagttacaagggaaatgatagaacttacaggattcttatattcaggtaaggttgccagatttaggaaatgaaaatatgctttt

SEQ ID NO: 667035 - DNA, 880 bp, Homo sapiens
ctgaattaaattcagcagcagagataaattatgaactggaagagatattgtccagaaaatagtctggagagacaaagagatggaagacaaaaaatgaagtgaaggggcacagacagaaaagggctgatcaatatgtaattgttgtttcaaagggagatagaaaaaaatgggaaataaacgatcacagaaagagataatagttgagaacgtcatagaatgttttaaaaaaaaccacaaattctcagttctaagaatatcagtgaatactaagaagggtaaataaatacatttgcaagacgacaaatcataactaaactgtgaaacacggaaaaaaaaagtctttattgaagccaaggagaataaacaaattacccacaaagaaaaggcaattatattggtagctgacttcacaaccacagaaagaaaaaaatagatgtcttgaatattattttcaagatgctgagatgaaataactataatcttaaaactttgtactgagcaaaaatatcaaccaagaataagggtggataaggatattttcagaccaagagagttaacacgagaattaaatatttaaagctatgcttcagaaagaaagataatgatcccagatagaaatctgagatkaaagaaaaataatggacaaagatactggtaaatatgtgaataaatcataaaataagaatgtctatacaagtatgatttatcaataatatttaaacattaaaacattaaaaaaagaatgtcttgggtgtaggtgggtgggaacagattcaaaataaattataggtctcatacagttacaagggaaatgatagaacttacaggattcttatattcaggtaaggttgccagatttaggaaatgaaaatatgctttt

SEQ ID NO: 667036 - DNA, 2639 bp, Homo sapiens
cttcctgaaacagaaaacaagccctgattaacactaaggatgctgtatttcttttgaatttcctattttcttcatgcagagcaatgtgtcaaatccaagttgagcttcctgcacagggctgcttaggatctgttcatgatacacaaagtgagttactgggttggaggtttctagcagagagagtcagaataaagatgagaaaaaatagaagaatgccatttttaaatgcttattagatgcgacataaaaaaatgtattctaaggtctgtattaaaaagattttgcccataattccagggtaaaaaatgttaagcatgactgcacagaaatgataaggcactgatttatgtatagactaggggagacaacaattttttggttagactattccgtcacacattataaaatggcttttccttttttactgtttagttcaataaatcttcttgtctattaatctgaattgctggctcaagctacataccatgattttctcactgaaataaagtctgtgggagaggcccctggcataaactaaaatcttatatcaagtgcagaattcttctgtctcctgcaggcccattgcaagattttactgtgtttgcttactaatataagctagagaaattcccattaatgtttaaagcagttgtaagccccatgaggacccgaaatcacttaaaatcctttaagtgtttttcataacacacattaatcactatttcagtcaagacatatatgacaaggagtgatgagcaaataaaatgttataaataaaatgcctagaaaaatatttattagtattacattatagtatagtttatgaagttaaaaaaagaagataacaaatattagctaacaatgatataaacctgataaaacagtaattggaactaaagtgttctaatgtcctaaaattctaaagccaaggctttggtagctgggaacaagaacagctatactccagaggccaatgtggggaaagtggagmcagtccttcaaagtcaaagatgcagcaagtaagaaagagtgagctgcctagacgtgtgacagtaggatgagccaaggaagctctgtggctgagtcttctggcaacacaattttggggatattgactcttgaaagacaagctgagtctgagttacctgctctgaacccaaaacacttaagagcacaaaaattctatagggttagttggcaaaatttccagagataaaaatgaaaatttatgaataacttcacaaagattgcacagacataagaaagtaacccacttggagtcaatccagccaaaacaagaaataaaagagtaataataaattaatacctgcaagacaaagattttgaaattgtcagtcctggcagtcagaagaaatatgtatgaaatatttagagaaataaaatgggcaatagcaaaaataagcataaatcaagaaaatatcagaagtgaacagacaaaattgaaaaacagaaattctagaaaaaaatttgaaataaataattcaacaaatgtttaaaacagccagaaagatatagttgaaatgagaattagagagctagagatacatagaaataatttatctggaatgaaaaaagagagataatgaaatgaaaaatgtgacataggttaggagatgtgggtgtgatgagtcttatctattgtgattacagaagagaaacatttgactttatcatggggctactacataatatattgttcagtcttaagtttttattaaaaaaacttaaggctaatcacttaaagaacagaatgtgtaaactgcaaaacaaatgttgggaggagtataataagagggaaaatatgttaataaatcaatcagtgtgaaaaaaagtaatgaaggagaacatgtataaagaaagaaaagcagaatagatagaaacaaaaacaccagaggaacttgagagtaaaaacaaatctaagcatataaatacccacgataaatataaataagctaaattttgcattgacagatactgtcagaaaagacataggagttagcatacttactatatatcaagtaattacagttagttttaatattgatgtttaacacacagaccttctatttttaactaatgagggcctctaaagttaagttctgagctcttgacatgacaacggaggtagctagaattgttctagatttaagttcccatttctccaagatgtgttggtttctaaaacgacagggaatggtatttagagaccatgatcaaggtattatggagattcaatcctagagaactgatgatagtttctaggccttttcagtagacaaagcaaggaaataggcatttcttaaaagggaatgcagcataaagcctgagttcatatcagtaattcctattcgaaattaaattgtttctatctcttttctcttgcactgaaaattttcagttcctaatgacattaacatattttacttattttattctactaataataaaataacaatcctaatgatacaggaattaaaaagaaattacttaggcagagagtgagggtatggaagtcctcgataaggttttccttttaatgaaaagcagccccaaattatttttccttctaacaaaaaaaagcagcctgtaaaatcgaactgcagacatagatgctggca

SEQ ID NO: 667037 - DNA, 2639 bp, Homo sapiens
cttcctgaaacagaaaacaagccctgattaacactaaggatgctgtatttcttttgaatttcctattttcttcatgcagagcaatgtgtcaaatccaagttgagcttcctgcacagggctgcttaggatctgttcatgatacacaaagtgagttactgggttggaggtttctagcagagagagtcagaataaagatgagaaaaaatagaagaatgccatttttaaatgcttattagatgcgacataaaaaaatgtattctaaggtctgtattaaaaagattttgcccataattccagggtaaaaaatgttaagcatgactgcacagaaatgataaggcactgatttatgtatagactaggggagacaacaattttttggttagactattccgtcacacattataaaatggcttttccttttttactgtttagttcaataaatcttcttgtctattaatctgaattgctggctcaagctacataccatgattttctcactgaaataaagtctgtgggagaggcccctggcataaactaaaatcttatatcaagtgcagaattcttctgtctcctgcaggcccattgcaagattttactgtgtttgcttactaatataagctagagaaattcccattaatgtttaaagcagttgtaagccccatgaggacccgaaatcacttaaaatcctttaagtgtttttcataacacacattaatcactatttcagtcaagacatatatgacaaggagtgatgagcaaataaaatgttataaataaaatgcctagaaaaatatttattagtattacattatagtatagtttatgaagttaaaaaaagaagataacaaatattagctaacaatgatataaacctgataaaacagtaattggaactaaagtgttctaatgtcctaaaattctaaagccaaggctttggtagctgggaacaagaacagctatactccagaggccaatgtggggaaagtggagacagtccttcaaagtcaaagatgcagcaagtaagaaagagtgagctgcctagacgtgtgacagtaggatgagccaaggaagctctgtggctgagtcttctggcaacacaattttggggatattgactcttgaaagacaagctgagtctgagttacctgctctgaacccaaaacacttaagagcacaaaaattctatagggttagttggcaaaatttccagagataaaaatgaaaatttatgaataacttcacaaagattgcacagacataagaaagtaacccacttggagtcaatccagccaaaacaagaaataaaagagtaataataaattaatacctgcaagacaaagattttgaaattgtcagtcctggcagtcagaagaaatatgtatgaaatatttagagaaataaaatgggcaatagcaaaaataagcataaatcaagaaaatatcagaagtgaacagacaaaattgaaaaacagaaattctagaaaaaaatttgaaataaataattcaacaaatgtttaaaacagccagaaagatatagttgaaatgagaattagagagctagagatacatagaaataatttatctggaatgaaaaaagagagataatgaaatgaaaaatgtgacataggttaggagatgtgggtgtgatgagtcttatctattgtgattacagaagagaaacatttgactttatcatggggctactacataatatattgttcagtcttaagtttttattaaaaaaacttaaggctaatcacttaaagaacagaatgtgtaaactgcaaaacaaatgttgggaggagtataataagagggaaaatatgttaataaatcaatcagtgtgaaaaaaagtaatgaaggagaacatgtataaagaaagaaaagcagaatagatagaaacaaaaacacmagaggaacttgagagtaaaaacaaatctaagcatataaatacccacgataaatataaataagctaaattttgcattgacagatactgtcagaaaagacataggagttagcatacttactatatatcaagtaattacagttagttttaatattgatgtttaacacacagaccttctatttttaactaatgagggcctctaaagttaagttctgagctcttgacatgacaacggaggtagctagaattgttctagatttaagttcccatttctccaagatgtgttggtttctaaaacgacagggaatggtatttagagaccatgatcaaggtattatggagattcaatcctagagaactgatgatagtttctaggccttttcagtagacaaagcaaggaaataggcatttcttaaaagggaatgcagcataaagcctgagttcatatcagtaattcctattcgaaattaaattgtttctatctcttttctcttgcactgaaaattttcagttcctaatgacattaacatattttacttattttattctactaataataaaataacaatcctaatgatacaggaattaaaaagaaattacttaggcagagagtgagggtatggaagtcctcgataaggttttccttttaatgaaaagcagccccaaattatttttccttctaacaaaaaaaagcagcctgtaaaatcgaactgcagacatagatgctggca

SEQ ID NO: 667038 - DNA, 1710 bp, Homo sapiens
ttaaatgaggggtgataaaatcttagcaactctgcattgaaaaaaaaaaagaatcaaactttacactccccaaattcagctcaatttcagtaatatatgtaacataccaaaatttccaaagggaatccccacattccaaaaactttcaagttttattaaagaacaataaaacatcctcatatttaaatagtaggattttatgcttcttttttttttatagtatgtcataataataaattttcatttttaattttcatgaatctatagtaggtatatgtatttatagggtacatgacatgttcttgaatcatattaaatttatgccactttgtttaaaatcttgccattgtttactttctaaactccataacaaaaggtataatatttcatactgtagcaaggtgtcctgtagcacacaaaattttggctgtatgcaactttcacmtttttattttataacttatttttatgtttggtctatttggggatcttgggtccttgttacatgattttcacttctactttatgttaccagtatattgagaactaaaattattttaaaacacggaaagctatctaaaaggcttgctgtctattttaggacataaaaatgtctcttgaacggttgtatttttattcaagcacgtctttataatttttatttaatcaggtatctgtcttattcaagcttcctttttttggcctctatgggcttttcagatacacagtatgccatttaagatttatgacgattataaaatcatgcttatctgcttctgtgttcagggctctacaacctcttctcagaaggcttaaagaattcctacttactgaactcttttagatgcattccttctgaatcttcacaaaactctaagaaatattatccctgcttttgaataagaaaaaattggggcttagaaagtttaagcaacagtgacacctgaaattagtccagaataagcaaccaaaaggtgtggctagaggtgtcataaaggtatagataagcagggaccctcaaccactgctatttctttctgaccctgtaattaccagtccaaagcacctgacaggataataccaatccagagaaaaccaaataggtaggtcttacagatttcccatttataaaggcagtatgttatactgaaaaattaattataagtatagtggagagtatggtctgacttatatctggaatctaaaaaagttgaatgcagaaacagagaatagaatgctggtttccatgggctaggcggttggaagaaatgaggagatgtttgtcaaaggacactaactttcagttatgagatgaataagctctagggatctaatgtacagcatggtgactacagttaataacactgtattgcgtactcgaaatttgctaaaaatgtttaaatattcttaaatattcttaccacaaaaaaagggtaaccatgtgaggtgatcaatgtgttaacttacctgattgtggtaataattgtaatatatatatatatatatatatatatatatatatatacacacacacaccaagtcatcacattgtacacctgacataccatattatttgtcaattatgcctcaataaagctggaagttttttttaaaatacatatattcaagaaaactgggaccagaactaattctatagttgcttcccacaaaatctttgggaagattaacttaatatccttgtacctcagt

SEQ ID NO: 667039 - DNA, 1710 bp, Homo sapiens
ttaaatgaggggtgataaaatcttagcaactctgcattgaaaaaaaaaaagaatcaaactttacactccccaaattcagctcaatttcagtaatatatgtaacataccaaaatttccaaagggaatccccacattccaaaaactttcaagttttattaaagaacaataaaacatcctcatatttaaatagtaggattttatgcttcttttttttttatagtatgtcataataataaattttcatttttaattttcatgaatctatagtaggtatatgtatttatagggtacatgacatgttcttgaatcatattaaatttatgccactttgtttaaaatcttgccattgtttactttctaaactccataacaaaaggtataatatttcatactgtagcaaggtgtcctgtagcacacaaaattttggctgtatgcaactttcacatttttattttataacttatttttatgtttggtctatttggggatcttgggtccttgttacatgattttcacttctactttatgttaccagtatattgagaactaaaattattttaaaacacggaaagctatctaaaaggcttgctgtctattttaggacataaaaatgtctcttgaacggttgtatttttattcaagcacgtctttataatttttatttaatcaggtatctgtcttattcaagcttcctttttttggcctctatgggcttttcagatacacagtatgccatttaagatttatgacgattataaaatcatgcttatctgcttctgtgttcagggctctacaacctcttctcagaaggcttaaagaattcctacttactgaactcttttagatgcattccttctgaatcttcacaaaactctaagaaatattatccctgcttttgaataagaaaaaattggggcttagaaagtttaagcaacagtgacacctgaaattagtccagaataagcaaccaaaaggtgtggctagaggtgtcataaaggtatagataagcagggaccctcaaccactgctatttctttctgaccctgtaattaccagtccaaagcacctgacaggataataccaatccagagaaaaccaaataggtaggtcttacagatttcccatttataaaggcagtatgttatactgaaaaattaattataagtatagtggagagtatggtctgacttatatctggaatctaaaaaagttgaatgcagaaacagagaatagaatgctggtttccatgggctaggcggttggaagaaatgaggagatgtttgtcaaaggacactaactttcagttatgagatgaataagctctagggatctaatgtacagcatggtgactacagttaataacactgtattgcgtactcgaaatttgctaaaaatgtttaaatattcttaaatattcttaccacaaaaaaagggtaaccatgtgaggtgatcaatgtgttaacttacctgattgtggtaataattktaatatatatatatatatatatatatatatatatatatacacacacacaccaagtcatcacattgtacacctgacataccatattatttgtcaattatgcctcaataaagctggaagttttttttaaaatacatatattcaagaaaactgggaccagaactaattctatagttgcttcccacaaaatctttgggaagattaacttaatatccttgtacctcagt

SEQ ID NO: 667040 - DNA, 1710 bp, Homo sapiens
ttaaatgaggggtgataaaatcttagcaactctgcattgaaaaaaaaaaagaatcaaactttacactccccaaattcagctcaatttcagtaatatatgtaacataccaaaatttccaaagggaatccccacattccaaaaactttcaagttttattaaagaacaataaaacatcctcatatttaaatagtaggattttatgcttcttttttttttatagtatgtcataataataaattttcatttttaattttcatgaatctatagtaggtatatgtatttatagggtacatgacatgttcttgaatcatattaaatttatgccactttgtttaaaatcttgccattgtttactttctaaactccataacaaaaggtataatatttcatactgtagcaaggtgtcctgtagcacacaaaattttggctgtatgcaactttcacatttttattttataacttatttttatgtttggtctatttggggatcttgggtccttgttacatgattttcacttctactttatgttaccagtatattgagaactaaaattattttaaaacacggaaagctatctaaaaggcttgctgtctattttaggacataaaaatgtctcttgaacggttgtatttttattcaagcacgtctttataatttttatttaatcaggtatctgtcttattcaagcttcctttttttggcctctatgggcttttcagatacacagtatgccatttaagatttatgacgattataaaatcatgcttatctgcttctgtgttcagggctctacaacctcttctcagaaggcttaaagaattcctacttactgaactcttttagatgcattccttctgaatcttcacaaaactctaagaaatattatccctgcttttgaataagaaaaaattggggcttagaaagtttaagcaacagtgacacctgaaattagtccagaataagcaaccaaaaggtgtggctagaggtgtcataaaggtatagataagcagggaccctcaaccactgctatttctttctgaccctgtaattaccagtccaaagcacctgacaggataataccaatccagagaaaaccaaataggtaggtcttacagatttcccatttataaaggcagtatgttatactgaaaaattaattataagtatagtggagagtatggtctgacttatatctggaatctaaaaaagttgaatgcagaaacagagaatagaatgctggtttccatgggctaggcggttggaagaaatgaggagatgtttgtcaaaggacactaactttcagttatgagatgaataagctctagggatctaatgtacagcatggtgactacagttaataacactgtattgcgtactcgaaatttgctaaaaatgtttaaatattcttaaatattcttaccacaaaaaaagggtaaccatgtgaggtgatcaatgtgttaacttacctgattgtggtaataattgtaatatatatatatatatatatatatatatatatatatacacacacacaccaagtcatcacattgtacacctgacataccatattatttgtcaattatgcctcaataaagctggaagttttttttaaaatacatatattcaagaaaactgggaccagaactaattctatagttgcttcccacaaaatctttgggaagattaasttaatatccttgtacctcagt

SEQ ID NO: 667041 - DNA, 1058 bp, Homo sapiens
gaaaattgttgcccaaaacagaaaccgtattgagtatgtaaagccaagtttagttaccaagacctactgatttcctttcatatatgtatggtcacatctctcacctcatctgtcctgtttcttgttttactagtggtcctttggcgtgctcctctgggagctgatgacaagaggagccccaccttatcctgaygtaaacacctttgatataactgtttacttgttgcaagggagaagactcctacaacccgaatactgcccagaccccttgtaagtagtctttctgtacctcttacgttctttacttttacagaaatgcctgccttcaaagggtctcttacagcatgtctttctttttggaacagatatgaagtaatgctaaaatgctggcaccctaaagccgaaatgcgcccatccttttctgaactggtgtcccggatatcagcgatcttctctactttcattggggagcactatgtccatgtgaacgctacttatgtgaacgtaaaatgtgtcgctccgtatccttctctgttgtcatcagaagataacgctgatgatgaggtggacacacgaccagcctccttctgggagacatcatagtgctagtactatgtcaaagcaacagtccacactttgtccaatggttttttcactgcctgacctttaaaaggccatcgatattctttgctcttgccaaaattgcactattataggacttgtattgttatttaaattactggattctaaggaatttcttatctgacagagcatcagaaccagaggcttggtcccacaggccacggaccaatggcctgcagccgtgacaacactcctgtcatattggagtccaaaacttgaattctgggttgaattttttaaaaatcaggtaccacttgatttcatatgggaaattgaagcaggaaatattgagggcttcttgatcacagaaaactcagaagagatagtaatgctcaggacaggagcggcagccccagaacaggccactcatttagaattctagtgtttcaaaacacttttgtgtgttgtatggtcaa

SEQ ID NO: 667042 - DNA, 1058 bp, Homo sapiens
gaaaattgttgcccaaaacagaaaccgtattgagtatgtaaagccaagtttagttaccaagacctactgatttcctttcatatatgtatggtcacatctctcacctcatctgtcctgtttcttgttttactagtggtcctttggcgtgctcctctgggagctgatgacaagaggagccccaccttatcctgacgtaaacacctttgatataactgtttacttgttgcaagggagaagactcctacaacccgaatactgcccagaccccttgtaagtagtctttctgtacctcttacgttctttacttttacagaaatgcctgccttcaaagggtctcttacagcatgtctttctttttggaacagatatgaagtaatgctaaaatgctggcaccctaaagccgaaatgcgcccatccttttctgaactggtgtcccggatatcagcratcttctctactttcattggggagcactatgtccatgtgaacgctacttatgtgaacgtaaaatgtgtcgctccgtatccttctctgttgtcatcagaagataacgctgatgatgaggtggacacacgaccagcctccttctgggagacatcatagtgctagtactatgtcaaagcaacagtccacactttgtccaatggttttttcactgcctgacctttaaaaggccatcgatattctttgctcttgccaaaattgcactattataggacttgtattgttatttaaattactggattctaaggaatttcttatctgacagagcatcagaaccagaggcttggtcccacaggccacggaccaatggcctgcagccgtgacaacactcctgtcatattggagtccaaaacttgaattctgggttgaattttttaaaaatcaggtaccacttgatttcatatgggaaattgaagcaggaaatattgagggcttcttgatcacagaaaactcagaagagatagtaatgctcaggacaggagcggcagccccagaacaggccactcatttagaattctagtgtttcaaaacacttttgtgtgttgtatggtcaa

SEQ ID NO: 667043 - DNA, 1058 bp, Homo sapiens
gaaaattgttgcccaaaacagaaaccgtattgagtatgtaaagccaagtttagttaccaagacctactgatttcctttcatatatgtatggtcacatctctcacctcatctgtcctgtttcttgttttactagtggtcctttggcgtgctcctctgggagctgatgacaagaggagccccaccttatcctgacgtaaacacctttgatataactgtttacttgttgcaagggagaagactcctacaacccgaatactgcccagaccccttgtaagtagtctttctgtacctcttacgttctttacttttacagaaatgcctgccttcaaagggtctcttacagcatgtctttctttttggaacagatatgaagtaatgctaaaatgctggcaccctaaagccgaaatgcgcccatccttttctgaactggtgtcccggatatcagcgatcttctctactttcattggggagcactatgtccatgtgaacgctacttatgtgaacgtaaaatgtgtcgctccrtatccttctctgttgtcatcagaagataacgctgatgatgaggtggacacacgaccagcctccttctgggagacatcatagtgctagtactatgtcaaagcaacagtccacactttgtccaatggttttttcactgcctgacctttaaaaggccatcgatattctttgctcttgccaaaattgcactattataggacttgtattgttatttaaattactggattctaaggaatttcttatctgacagagcatcagaaccagaggcttggtcccacaggccacggaccaatggcctgcagccgtgacaacactcctgtcatattggagtccaaaacttgaattctgggttgaattttttaaaaatcaggtaccacttgatttcatatgggaaattgaagcaggaaatattgagggcttcttgatcacagaaaactcagaagagatagtaatgctcaggacaggagcggcagccccagaacaggccactcatttagaattctagtgtttcaaaacacttttgtgtgttgtatggtcaa

SEQ ID NO: 667044 - DNA, 660 bp, Homo sapiens
aggttatttagctagcttagtgttgaactaaattttttttaaacaaggcaaggtctaatgctgttttgagattctgaaattaatgaaaatacttatttcagaaatgcatttaatgctttttttcttgtgacagttacgcaaatcagcttgaattccatatgtccctgagttatttttatcataaagccacaaatgtattataacaaggcaaattgtaatatatataatcctgaactcatgaccatgtctcrgtttattttttttttcttggattgaaaagtactgaaattcaatgtgacattaaaatgcaaattttcctatttatttgagtagaaaatcacttaccagtgagcatatatattttaaaatactttctttggatattgtaattcttaactggttgtaaattagaaaagctgggattacatatggtgtgcggttacagtctaaattttttcatcctcctatgcatcataagcatgtttgtaatattttcaaaaatagttctactgatgctacaggaatttcaagcctgtggtgaatgttagtatttaccatagggagtgaagtggagttatggtttcattcaatagagtattgctgattatacttgagtggaatcctttcctcacgtactcccacagacgtctgggcctggaa

SEQ ID NO: 667045 - DNA, 1758 bp, Homo sapiens
tctgatatgcagagaaacacacgcatactcactaaaagcactgaataaagttgaaatattcacagtgctctctatcataatttgtcttgtttggctatgctgtttactatcctccccctttctgaaactgagattaacagatgggagatatacctagatatggcaacagaaggggagaaagttccagaaccatggagcagtggtaggtacacattttctctaaagggccaaatagcaaggatcttggactttgcagccatcgtagtcacgtgtacctggaagccactggcaatctgtaaacaaatgggtgtgtttatgcaaacagatgtgtatgtgttccaataaaactacctacaaaagcaggctgcaagccagttggcctgtgtgcagtagtttgctgagccctaccttagagcagtatcatattagattgattaagctgtgcactcctaacacattactaaagtagaacagataacctactaatatcatcaaggtgaccctagacaactaacatgcagaagaagaagatccgtattccacaagtagagcaggtttgtcttggttacttagaatggccccactgacaggcccacaggtgcctgagggcaacctcagcacaggttttggtccctggatgctttcacagctgccaccaggagtctttggggcagtcatgcaacatcactttctgttaagctgatgcttacagaacacaagcccaaaacgcctcgtaaaaacatccaagtctgccaggcgcagtgcctcatgcctgtaatcccagcactttgggaggccaaggtgggaggatcacctgaggtcaggagtttgagaccagcctggccaacacggagaaaccctgtctctactaaaaatacaaaaattagctgggcatggtggcacacacctgtaatcccagctacttgggaggctgaggcaggataattatttgaatccaggaggcagaggttgccagtgagctgagatcacgccattgcactccagcctgggcaacagagcaagactccgtctcaaaaaaaaaagaaaagaaaaagaaaaaaaaagtccaactcttctgagtcttcaatatgtgaagctgtacagactagccttgtcagtttggaaatgacatctttttttttaagttgctattaaaattacagaagtaatgcatgtttatattggggaaattttcagtggttctcaagcaggcgtgattttgccccccaggggacattggacaatgtctggagacacttatggtggtcaccatacggagagggtgctgctggcatccagtgggggacgcccagggatgctgctgaacctcctacagtgcacaggaaggacctcccacagatagttctccagccctacatgtcaacagtgccacagttaggaaaccctaatgtaaaaggaaaacattaaaaatcttctctttccaagtcctctcagtcttaatgcacaggcagcctctgctctaagcttmttccacaagttcagcagaaatgtattcttaatttttacacaaacatagcatcttttaattgagtcatgagaaccacatatcaactgttttcattcctaacattcttgaacagcaaggctggttatgcatcttctaaatacagtaactcctcactttcccattcagaaagaaagagtctatttaatattatgtccattatataactgaaccatcacatcagccctgtttattctcattttgtagataaagaggctgctttctgaagagtg

SEQ ID NO: 667046 - DNA, 632 bp, Homo sapiens
atggataatgacatattatccttcaatttttttagccatctgaaaatattaaaaatatccttagcatgttgcctgtacaaaattagcaagggctaaatttggcttgcaggatacagtgggttaacctttgcatcaaatcataggagtcacggtyggaccctacctttatcacatctcacaaaaacttaaaccttcagaaaaacagtatggcaggccctcaaaagagtaaacagaattaccatgtgatccagcaagtccacttctaggtatatgcaaaggaactggaagcagagactcaaacagacacttgttcctcaatgttcacagcagcatcattcacaatagccaaaagctattttggaatagcaacccaaatgtctatgaacggatgagtggataaacaacatgctgtttatacgaacaatgacatatttggcctttaaatggaatgaaattctgttcaggcacagtggcacacgcctgtaatcccagcactttgggaggccaaggtgagcagatcacttgagaccaggagttcgagaccagcctggccaacatggcaaaaccccatctctactaaaaatacaaaaaacaaacaaagaaacaaacaaacaagcaaacaaaaaacacaa

SEQ ID NO: 667047 - DNA, 620 bp, Homo sapiens
tttcctaccacgccctccaggtgattctgatggacttcaaagtttgagagccatgtacctagcccatagttacaagtgatggaagcctaaggcagctgtcacagtgagtaggtggaaggcatttgcaggaagccaagtgaggatagaggaactgaggaatctaaaggctttgagtatctggtatggccaacctggagaagaaaaggcaaaaagaagggctgatgttcttcaacagggcttggcaaaccttttatgtaaagggccagacagttaatattttaggcttcgtggaccacatggtctctgtcacgtggtctctgtcatgactattaaactctgccattgtaacacaaaagcagccataatcaagacataaataaatgaatggggctgtgttccaataaaactatctacaaaaataagtggcaggccagatttggccctcaggcattagtttattctagcagaatgttttactcagtgggtagtgatggtgwttgtttttgagcagtagaaacccttttttcctatttaaccaaacaaagcaggaagtgctcaggttgaagaacggggtggaaaatccagagcctccttgttcatatccccctgctcttcctcag

SEQ ID NO: 667048 - DNA, 1561 bp, Homo sapiens
tgccttgggtttacccagtgacaagctttctccagttatatgtgagtgcaagtaatatttgtcactctggatccaggcccaagatcgtgggcatgccagctcacaatctcttctcccttctctcagagggagcaacttggatatggtggtaacttggcttctacagagcagatgataacatggccccagaggatgttaaaacttgggtctctgaactactgaatgaagcaaagctgtctgctcttctgaattgttacaagagagaaagatagggttgtgttttctctcaggcattgtggtgtatgtctcttgtgctacagcagaactgcctcaccctaactacgtattattcttgctttactgttcctgtgatcccccatgcgaagtgaattcaagtatcttaccatatatatgcttttattttccctgcattgctataatgaatgcctggtgaatgtgacaactaggttatctgttgcatagatatttataatagctatacctgcatttaatttgagtgacactatgatatattacataactccttgccaatgtacttaatgctttttggccagaattgtatcttgttggataatcaaatcatgacatttatttttttatttgcctggtatgccattgctcatcttttactttccaacctcttgagtttgcattaggtgtgtctcctgcacacagtatagagttggattttattttgagatttaatctgaaaatattaaaaaaaaaacaattaattatagatatataacaagtaaagaggttgaatcagtaatagaaaacttcccgtgaaagaaaagcctagggctgtggccaggcgcggtggctcatgcctgtaatcccagcactttgggagctgaggtgggcggatcatgaggtcargagatcgagaccatcctggctaacacggtgaaaccccgtctctactaaaaatacaaaaaattagccagtggtgggcacctgtagtcccagctactcaggagggtgaggcaggagaatcacttgaacctgggaggcagaggtggcagtgagcccagatcacgccactgtgctccagcctgggtgacggagtgagacattgtctcaaaaaaaaaaaaaaaaagaaagaaatgtctagggccaggtggttgtttcactgatagatttctgaaatcactgatgatttccaccaaacattttaagaagaattaacatcagtacacctcaaaatcattcaaaaaatagaaaaggagggaacactttccgactcattctatgaggccagcattaacctgataccaaagccaaagacaccaaaagactacagaacaatattcctatagatctagatacaaaaatcctcaagaaaatactagcaaacaagtccaaaagcatattaaaaaggattatacaccatgactgatgggatttattccaggatgcaagggtgattcagtgtaagaaaatcaaccaaggtaatacaccacgttaagacaacaaagggtaaaaaaacacaggaacttcttaattgatgcagaaaaagcatttgacaaaacctaacaca

SEQ ID NO: 667049 - DNA, 605 bp, Homo sapiens
aaatgtcttaatcattctctaatataaaatatacatttttaagtgatgataatttttctctctcygagagagacagaaacttacaaagatcctataacaactttttatatggtttattttttctggctgccaatgagaaccctctttgtcaggatgactgccttcccctagtcatcttcttcagtgcatttttcacatccttgttcctcaggctatagattagaggattcagcatggggattattgtgatgtagaacacagaagacaccttctctttttccatagtagtgctggaagggggcttgaaatacatgaatgttatagacccaaaaaagatgcccacagccaagagatgggagctacaagtgccaaaggctttggattgcccctcagtggaatgaataccaaggatactagagaaaatgaaagcataagagataaggaccgccagtgtagttgctaaggtattaactcctccaataatgaacagcagaatctcattgatgtgggtgctggagcaagacagagtcaataaggggagaatatcacaaaaataatgactgaccgtatgagacctacagaatgacaacactgacatgcgggta

SEQ ID NO: 667050 - DNA, 970 bp, Homo sapiens
ttgaagaaaaatagcagagagcttatttagagagagacagtacactctggaaaggtgagacagagctggctgctgaaggggagtgagccagcagcagcttgagagttctgcactgggtttttgagatgatgtccgacactttcttgaagttcccacctctgtcgtgagcctctgccttttcctttgtccaggttcctgcttctgccttaagtccccttctcttccctgcctagttcccatgccaggcttgtggaaccctcccttactattggctgatgtgcatgcatggaccctgtgttggatatgaatcctgcctaacagccgcattgccacccaagggaggctgcttaataataggtctagtgattgaagcacattctttcctatatccgtaacatttctatattgatatattcccaaattattttcatcacagaactatcacaaataacgcctagagtatttcttttagaaaagactatctcaataaagtagaaaggttaagaatttaaaattacgtgctatggaatgagaactttaccctctttattactcattaagctaagcataatgatatataacatactactttttttactttaaattctggtgtacatgtgcagaacgtgcaggtttgctacataggtatgcatgtgccatggtggtttgctgcaccccaartgcattaggttttaagccccaaatgcattagctgtttgtcctgatgctctccctctacaaatttataccatgagattgtatttatactttcttctcccacagacatcaagagtaatgactacatttatcatctggtgtggtaaagacaatcatctcttccttgctatgatctgaattactctaagttttttaaaagtgttaccctacctctgccgattctcctttctgtgagccatctgtactaggaagttgttcccacatactgaggccttattctcaatcttgttca

SEQ ID NO: 667051 - DNA, 970 bp, Homo sapiens
ttgaagaaaaatagcagagagcttatttagagagagacagtacactctggaaaggtgagacagagctggctgctgaaggggagtgagccagcagcagcttgagagttctgcactgggtttttgagatgatgtccgacactttcttgaagttcccacctctgtcgtgagcctctgccttttcctttgtccaggttcctgcttctgccttaagtccccttctcttccctgcctagttcccatgccaggcttgtggaaccctcccttactattggctgatgtgcatgcatggaccctgtgttggatatgaatcctgcctaacagccgcattgccacccaagggaggctgcttaataataggtctagtgattgaagcacattctttcctatatccgtaacatttctatattgatatattcccaaattattttcatcacagaactatcacaaataacgcctagagtatttcttttagaaaagactatctcaataaagtagaaaggttaagaatttaaaattacgtgctatggaatgagaactttaccctctttattactcattaagctaagcataatgatatataacatactactttttttactttaaattctggtgtacatgtgcagaacgtgcaggtttgctacataggtatgcatgtgccatggtggtttgctgcaccccaaatgcattaggttttaagccccaaatgcattagctgtttgtcctgatgctctccctctacaaatttataccatgagattgtatttatactttcttctcccacagacatcaagagtaatgactacatttatcatctggtgtggtaaagacaatcatctcttccttgctatgatctgaattactctaagttttttaaaagtgttacyctacctctgccgattctcctttctgtgagccatctgtactaggaagttgttcccacatactgaggccttattctcaatcttgttca

SEQ ID NO: 667052 - DNA, 657 bp, Homo sapiens
tgaaaacagacacaaccccttaactttcaaacatataatctagatggagaaagctagaagaaacagatattgacacataattagaaatacagtaagtgtgccaggaagaggctatagagttctgtgaaaacatttaaagtgggccctaccaagtcttcaaggtcagagaaggcctccctaaagaagtgaaattcagttttaaagctaaatttaagtagacatttaaaaatrtatagctgtttgtttgtgactgtccagcattggaattccttccaaattgaggactctgcccctgtgtgagccttggctgaagcaaggacccagcctccttctgtgaaagcaccccagagaacatcagagctagctcagccagtcagatgttcccaggcagaactcttcagtttggggtgagtgacagaaaaaaaacaggagcaatttatatttcatttttgcaaaatcaaaaacaaaaatctaccaatcaataaaaatgttaggtactagtggtgccaacatgaacaatcggtgcagcctaaccagatagttgtgtggtataacttggctgagattccacctgtctggctccaaaaactagttccctagcctgttctaagattctatgaactaccccatttattgctaatgagctcccttttttgc

SEQ ID NO: 667053 - DNA, 869 bp, Homo sapiens
ggccacggggtgaattcctatgtgtgttcaccaaatatacgtgtgtgtgtgtgtgtgtgtgtgtttagtattaattttattttttaaattgtttacagaggcaaaatacacgacataaaatttaccattttaaccattttttaagtgtatagttcagtggcattaagtacactcatgttattgtgtaaccaccaccaccatccatttctagaactttctcaaactcccacccatatttttcattttaatttttaatttttattttgagacaggctctcactctgtcacccaggctacagtgcagtggtaccatcagagctcaatgcagcctcaaacacctgcgctcaagtgatcctcccacctcagcctcctgagtagctgggactagaactgcacaccaccacacttggctaatttttttttttttttttttttttttttgtagagatggggtctcactatgttgcctatactggtctcaaactctyggcctcaagcaatcctcacgcctcagccacccatattttttaaagtatcattcaataaaatattttatactcacccgcaaaaatgtcactatacttttcaaacttaacagcataacaatattatttctatcagcaaagtgcctcaggagctatgggtatcacgtgacaaaacctcatcagccagaacagggcattctggttaattaaactgtcaggctcactaagggttaaacagaatactctttggagtccaatttttcattataaagtgcatttgtccttgcaggtcaatcctaaagaacaaagcggaatcatcagtgattcaacacacagggctctggttggggagtgggaggtagtcatcaatttaaatagccgttc

SEQ ID NO: 667054 - DNA, 869 bp, Homo sapiens
ggccacggggtgaattcctatgtgtgttcaccaaatatacgtgtgtgtgtgtgtgtgtgtgtgtttagtattaattttattttttaaattgtttacagaggcaaaatacacgacataaaatttaccattttaaccattttttaagtgtatagttcagtggcattaagtacactcatgttattgtgtaaccaccaccaccatccatttctagaactttctcaaactcccacccatatttttcattttaatttttaatttttattttgagacaggctctcactctgtcacccaggctacagtgcagtggtaccatcagagctcaatgcagcctcaaacacctgcgctcaagtgatcctcccacctcagcctcctgagtagctgggactagaactgcacaccaccacacttggctaatttttttttttttttttttttttttttgtagagatggggtctcactatgttgcctatactggtctcaaactcttggcctcaagcaatcctcaygcctcagccacccatattttttaaagtatcattcaataaaatattttatactcacccgcaaaaatgtcactatacttttcaaacttaacagcataacaatattatttctatcagcaaagtgcctcaggagctatgggtatcacgtgacaaaacctcatcagccagaacagggcattctggttaattaaactgtcaggctcactaagggttaaacagaatactctttggagtccaatttttcattataaagtgcatttgtccttgcaggtcaatcctaaagaacaaagcggaatcatcagtgattcaacacacagggctctggttggggagtgggaggtagtcatcaatttaaatagccgttc

SEQ ID NO: 667055 - DNA, 592 bp, Homo sapiens
tttggatctacacaaatgaatgaagagccctggagagatggtaaaacaaaacaaaccaaaaatagattagttgctgaaaatagccagaagagaattataacgttcccaacacaaagaaaagataaatgtttgaggtgatggatatcccaattaccctgatttgatcattacacattgtaggcatgtatcaaaatgtcacatgtatctcaaaaatatgtacgactgtgatataycaataaaaaaatacataaaataccaaaaatagatagttgcatagacagaatcacagacagatttataaataaaaagttattgtttagaattgacttcctaaataactagcctatattctatggactaatttaacagatcttaattttttttctaaaaatctacctgctttttgcccagcaataatgagagatttattcctttgttaagataagaatactgcttacccaaagtaagactgtggctatctgcactatgtcaaaatctcatctgtgaccaagcagcagcctagacccaaggaccacacaaccccctttagtgtcttccatgatcaccaaaaaccaaaggcaaggattcttcc

SEQ ID NO: 667056 - DNA, 1130 bp, Homo sapiens
ggccattgcagttgggggcctgtgaattagttcagtgtatgatccctccctactttcaaacataacagctatgcttttgttttctatgactgccttacatataacatttggtttatgatgggtttttagtaaaatgttttgaaaccataggttctaggccaactcttcaaattttgtagatgaggaaactgaagctaccataatttggaaggcttaacttgggtcatacattgaattacagtagagctagaattagaatctaagtctcctgtgtctcaatcaagagcttttaaaaatgatttgggctgggcaccgtggctcaggcctataatcccaacactttgggaggccaagatgggaggttcacccgatctcaggagttcaagatcagcctgagcaacacgacgaaatctcgtctctacaaaaaatataaaaattagctgggcacagtggtatgcacctgtattcccagttactcaggaggctgaggtaggaggatcgcttaagcctaggaggccaaggctacagtgagccatgttcacaccgtcgcacccctgggtgacaaactaagaccctgtcccaaaaaaaaagacaaagaaaagattatataaaaaggaagagcaggctctgatgccttagtctactgagagaaaagggtaaacttttgtatatttaatgcaataagagtaggagtttagtatttgtgaggtactttgacttttgtcatcacattctactaatagtgctcaaattttagtgtgcataagaattgcctgggaaactattaataatgttttaaaagtcagcttcccagttatcctttctagaaattctgatgtggaatatctgcattttagtcaaacatcccaggtgcttccatacaatgttttatgtaccatacttagaaaaatactgtcttaaagccttatagttgtatcaggaaggctagcagtacagacattataagagattccttggtaccaggccctctattgaggcaaactactacaaagtagatacktttaatatataaggcaagttaggttaggctatgctgcagtaacaaagcaaccctgcaccaggtgccatgtctcaagcctgttatcccagcactttgggaggccaaggcg

SEQ ID NO: 667057 - DNA, 607 bp, Homo sapiens
tactatatatactatatatattactatattactatatatactatatatagtaatatagtatatatagtaaatatatagtaatatatatagtatatatagtatatataatatatagtatatatagtatatatatagtatatatatatatatataaaatatatatatatatatatatatatagtctcattctgttgcccaggctggagtgcagtggtatggtcacggctcactgcagactcgacctgccgggcccaagcaatcctcctgcctcagcctccaaaaatgctaggattatgggcatgagccaccacacccaggccccaaataaatattttgtatacagagagtatagtgggtaaattcmggccctgaagtcagcttgagtctcaatctgagcacttttacttgatgtagagctttgagcaagttgattaatttagtgtcagcctcctcattgtaaaaggattaaatgaagcaatacttataaagcagttaacacatggcttggctagtcccccagtagtaggtttcctcttagcttagtagttcctttattccaacaaagcattgatgaacagcctgccaggatcaagcttacacataaggc

SEQ ID NO: 667058 - DNA, 644 bp, Homo sapiens
ttatataggaaagaggtttaattgactcacagttccacagggctggggaggcctcaggaaacttacaatcatagcagaaggggaagcgaacacgtccttcacaaggtggcaggagagagaagaatgagagctgagtgaagggggaagcccttgtaaaaccattagatctcgtgagaacttactatctcgagaacagcatgggggaagctgcccccatgattcaattacctccactgggtccctcccacaacacgtggaaattatgggaactacarttcaagatgagatttgggtggggacacagacaaaccatgtcagtcctcagtagaacatactggtctcacctagagagattagattggcaaaaccagtattgggtggggttggagtagggaggggtcaatttttcaatgatctgagaactaaattgtgctgtatgtgcagcctttcaattaaatctggacacaacaatttattaaacgaccagaggtagcagtatttatacttacgcaccatataatcagcgatgagctgggctctgagacacaaggacaaataagagattccttgccttcagggagctaacagtatagtaggagttataggcaagtgcacaggccattcaaacactgagtgaggagaag

SEQ ID NO: 667059 - DNA, 644 bp, Homo sapiens
ttatataggaaagaggtttaattgactcacagttccacagggctggggaggcctcaggaaacttacaatcatagcagaaggggaagcgaacacgtccttcacaaggtggcaggagagagaagaatgagagctgagtgaagggggaagcccttgtaaaaccattagatctcgtgagaacttactatctcgagaacagcatgggggaagctgcccccatgattcaattacctccactgggtccctcccacaacacgtggaaattatgggaactacaattcaagatgagatttgggtggggacacagacaaaccatgtcagtcctcagtagaacatactggtctcacctagagagattagattggcaaaaccagtattgggtggggttggagtarggaggggtcaatttttcaatgatctgagaactaaattgtgctgtatgtgcagcctttcaattaaatctggacacaacaatttattaaacgaccagaggtagcagtatttatacttacgcaccatataatcagcgatgagctgggctctgagacacaaggacaaataagagattccttgccttcagggagctaacagtatagtaggagttataggcaagtgcacaggccattcaaacactgagtgaggagaag

SEQ ID NO: 667060 - DNA, 644 bp, Homo sapiens
ttatataggaaagaggtttaattgactcacagttccacagggctggggaggcctcaggaaacttacaatcatagcagaaggggaagcgaacacgtccttcacaaggtggcaggagagagaagaatgagagctgagtgaagggggaagcccttgtaaaaccattagatctcgtgagaacttactatctcgagaacagcatgggggaagctgcccccatgattcaattacctccactgggtccctcccacaacacgtggaaattatgggaactacaattcaagatgagatttgggtggggacacagacaaaccatgtcagtcctcagtagaacatactggtctcacctagagagattagattggcaaaaccagtattgggtggggttggagtagggaggggtcaatttttcaatgatctgagaactaaattgtgctgtatgtgcagcctttcaattaaatctggacacracaatttattaaacgaccagaggtagcagtatttatacttacgcaccatataatcagcgatgagctgggctctgagacacaaggacaaataagagattccttgccttcagggagctaacagtatagtaggagttataggcaagtgcacaggccattcaaacactgagtgaggagaag

SEQ ID NO: 667061 - DNA, 1844 bp, Homo sapiens
attaaacatcagcgaaatcatactggagaaaggccttataagtgtagtgaatgtggaaaagccttcagcctcaaatacaatgttgttcaacaccagaaaattcacactggagaaaggccttatgagtgcagtgaatgtgggaaagcttttcttagaaagtctcacctacttcagcaccagaggattcacaccaggccaaggccttatgtgtgtagtgaatgtgggaaggccttccttacacaggctcaccttgttggtcaccagaaaattcatactggagaacggccttatggatgcaatgaatgtgggaaatactttatgtacagttcagcactcattagacatcagaaagttcacactggagaaaggcctttttattgctgtgaatgtgggaaattctttatggacagctgcacactcattattcaccagagagttcatactggagaaaaaccttatgaatgcaacgaatgtgggaaattctttagataccgttccacactcattagacatcagaaagttcacactggagaaaagccttatgagtgtagtgaatgtgggaagttctttatggacacttccacactcattattcatcagagagttcatactggagaaaagccttatgaatgcaacaaatgtgggaaattctttaggtattgcttcacactgaatagacatcagagagttcactctggagagaggccttatgaatgcagtgaatgtggcaaattctttgtggacagctgtacactgaagagtcatcagagagttcacactggagaaagaccttttgaatgcagcatttgtgggaaatcctttagatgtcgctccacacttgatacacatcagagaattcacactggtgaaaggccttatgagtgtagtgaatgtgggaaattctttaggcacaactcaaatcatattagacatcggagaaatcactttggagaaaggtcttttgagtgcactgagtgtgggagagtttttagccaaaattcccacctcattcggcaccaaaaagttcacactagggaaagaacttacaaatgcagcaaatgtgggaaattttttatggacagctccacactcattagtcatgagagagttcatactggagaaaagccttatgagtgcagtgaatgtgggaaagtctttagatacaactccagcctcattaaacatcggagaattcacactggagagagaccttatcagtgcagtgaatgtggaagagtctttaaccaaaattctcatctcattcagcaccagaaagttcacaccagataaagaatgtatatataaagcagatggggaaagacttcacacagaaatctactctgatttagcactgggacctacgttttaaaaaaagtattcttgtagaatacagataacataaaatctaacatcttaaccatgttaaagtgtatagttcagtacygttaagtcattcacattgtgcaatgaatatctagaagtcttttcaacttatgaaactaagtctataccttttaaaaccttattcctcactccatccagcctcttgacaagcaccgctctgtatgaattttactagtccgggtacctcatataagaaaacttaagttttggtcttcttgtggtttattttgtggcttattttgcttaacgttatatttttaaggtttcatgttctaatccattagaatttccatcctttttaaaggctgaataaaattctgttagtcatgtgttgcttaacagtggggaagtgtcctgagaaaagtgttattaggtgattttctttctttttttggtggtgggggggttgcgtgaatgcctaggctgtatggtatatccta

SEQ ID NO: 667062 - DNA, 1538 bp, Homo sapiens
atcctcccacctcagcctcctgagtagctgggactacaggcacacaccactatgtctggctgattttttgtattttttagtaaaggcagggtttttccatgttgcccagactagtctcagactcctgggctcaagcgatccacctgcctcagcctcccaaagtgctgggattacagatgcgagccaccgtgcccagtcagaatttcctttcttaaagccctttcacaaagaagtagaacccatacccatttagaagggaagtttctgcattgtcattcttgagctttggagaggaagaagaagatagaacattttgcccccaaagaagaaaactaaatggggcctgaagtggtctcataatagtatcttattttagatttgaggctcacagggaaggggactctggtaacttgtcctcatttggtgagatcaaaccttacactgcccactaagtgtcattcctaaaagccttgagtgttacctgttcaattattttttcaaatgcagagagctccttagcaatttcatttattaagcaaagcttccattcctattatttctctttgtaagtaatttgcaygtaaatgaggtccacctatgcatactgagcatgttaccaaatgtacaaaaaatatacatggtccaatttttctccacagagctgacaggtacccatccctcttgctgaagatgacatagtatttcacgtagcctagttttccctaagtctttttggcttttggacgatggatggagtttttgtttttatttttccatttttcttttttctccctcattttcatcatttggaattcgtggtgtgaaacccacaggggagaacagaggctcattagcattcaagctctgtttttggcagcatattttagttgctttatatgatattcagcatccctcctgggatctagcctgcctttgctcggctcacgctgggtgaatctgtgatatttcccattctgtagcccttcatttataacacaggcatagcctgctttcccattagtgagatggcatgcctggactacccacacacagatcaagaattaggcggaacttggccgggaagataaatcaagttaaccgtctcattaggcttgaaagacacaaattaagctgaagttgggattaacagagaagcctttcaaagagacatgcagcacaacaaggggtggaagaagttgccgtagccattactctcagaaaatttccagcatttgatggaacagaggaaacatgaagtctcttttataaaaggtcaacagacagaaatttaggctcaaaatagcagtataacatttgttgagctcttaccacctgcttggcactgtgtgctgagagctttacacacattatttcatagaaattgcacattgacctatgagagaagcactactaaaattcctgtttaactaataaagaaactgaggctcagagaggttacttcgcctgcctcagagacacagagcttggtcaaatgatagagccaggattcactcccaggatatttggtcccatggccc

SEQ ID NO: 667063 - DNA, 630 bp, Homo sapiens
caaactcccatgtcaatctcctctggcaatgccctcccagacacattcagaaacaacgctacctccgggattgaggcatccctcaatccagtcaagttgacacctaaaatcaaccatcacatcaacttgatactttcctatacagtatttttgaaggttctaaagtgatygaaaggtagctaacatatatggaatgcttatcatgcgacaaacatttttctaaccacttgtatgagggaagtattgatttcttcccattttgcagttgagaaaactgaggattagaggggttaagtaatcagcatataatcacacagcaacaggtctggagtctgaacaacaatgcatctgaattgaaagccatgaaatgaactggcatctattgcctcttttataattgtggtgaaggggtaagggactttgtttaattgataaacaacattttttaaaagctaataaattaagggagatagatgattgacagataaatagatgatagagattagatagacagacagacagagggagagagataaaagagagagagagggagaatcttaatggaacttcaagatgccatgaacacagtgtatgtattgggagagagaaaagataggccaccactcaata

SEQ ID NO: 667064 - DNA, 630 bp, Homo sapiens
caaactcccatgtcaatctcctctggcaatgccctcccagacacattcagaaacaacgctacctccgggattgaggcatccctcaatccagtcaagttgacacctaaaatcaaccatcacatcaacttgatactttcctatacagtatttttgaaggttctaaagtgattgaaaggtagctaacatatatggaatgcttatcaygcgacaaacatttttctaaccacttgtatgagggaagtattgatttcttcccattttgcagttgagaaaactgaggattagaggggttaagtaatcagcatataatcacacagcaacaggtctggagtctgaacaacaatgcatctgaattgaaagccatgaaatgaactggcatctattgcctcttttataattgtggtgaaggggtaagggactttgtttaattgataaacaacattttttaaaagctaataaattaagggagatagatgattgacagataaatagatgatagagattagatagacagacagacagagggagagagataaaagagagagagagggagaatcttaatggaacttcaagatgccatgaacacagtgtatgtattgggagagagaaaagataggccaccactcaata

SEQ ID NO: 667065 - DNA, 630 bp, Homo sapiens
caaactcccatgtcaatctcctctggcaatgccctcccagacacattcagaaacaacgctacctccgggattgaggcatccctcaatccagtcaagttgacacctaaaatcaaccatcacatcaacttgatactttcctatacagtatttttgaaggttctaaagtgattgaaaggtagctaacatatatggaatgcttatcatgcgacaaacatttttctaaccayttgtatgagggaagtattgatttcttcccattttgcagttgagaaaactgaggattagaggggttaagtaatcagcatataatcacacagcaacaggtctggagtctgaacaacaatgcatctgaattgaaagccatgaaatgaactggcatctattgcctcttttataattgtggtgaaggggtaagggactttgtttaattgataaacaacattttttaaaagctaataaattaagggagatagatgattgacagataaatagatgatagagattagatagacagacagacagagggagagagataaaagagagagagagggagaatcttaatggaacttcaagatgccatgaacacagtgtatgtattgggagagagaaaagataggccaccactcaata

SEQ ID NO: 667066 - DNA, 630 bp, Homo sapiens
caaactcccatgtcaatctcctctggcaatgccctcccagacacattcagaaacaacgctacctccgggattgaggcatccctcaatccagtcaagttgacacctaaaatcaaccatcacatcaacttgatactttcctatacagtatttttgaaggttctaaagtgattgaaaggtagctaacatatatggaatgcttatcatgcgacaaacatttttctaaccacttgtatgagggaagtattgatttcttcccattttgcagytgagaaaactgaggattagaggggttaagtaatcagcatataatcacacagcaacaggtctggagtctgaacaacaatgcatctgaattgaaagccatgaaatgaactggcatctattgcctcttttataattgtggtgaaggggtaagggactttgtttaattgataaacaacattttttaaaagctaataaattaagggagatagatgattgacagataaatagatgatagagattagatagacagacagacagagggagagagataaaagagagagagagggagaatcttaatggaacttcaagatgccatgaacacagtgtatgtattgggagagagaaaagataggccaccactcaata

SEQ ID NO: 667067 - DNA, 630 bp, Homo sapiens
caaactcccatgtcaatctcctctggcaatgccctcccagacacattcagaaacaacgctacctccgggattgaggcatccctcaatccagtcaagttgacacctaaaatcaaccatcacatcaacttgatactttcctatacagtatttttgaaggttctaaagtgattgaaaggtagctaacatatatggaatgcttatcatgcgacaaacatttttctaaccacttgtatgagggaagtattgatttcttcccattttgcagttgagaaaactgaggattagaggggttaagtaatcagcatataatcacacagcaacaggtctggagtctgaacaacaatgcatctgaattgaaagccatgaaatgaactggcatctattgcctcttttataattgtggtgaaggggtaagggactttgtttaattgataaacaacattttttaaaagctaataaattaagggagatagatgattgacagataaatagatgatagagattagatagacagacagacagagggagagagataaaagagagagagagggagaatcttaatggaacttcaagatgccatgaacacagtgtatrtattgggagagagaaaagataggccaccactcaata

SEQ ID NO: 667068 - DNA, 2052 bp, Homo sapiens
agttgttgaacaggcagtgtatcatggtggttatctggacttcctaggttcaaatcccaactctgctacatagtagctttgtagttttggataagttacctaacactgcctccattttctcctctgtattttggggattaattaaatctaccacgtaggattgtaaaggttaaatggtgttaattcacttagtggagtcgacagaatcagcaaagaaaatacaggaacatacttagagtaaaaaattatttgtcgtttgctggaattcaaatttatttgggtgccctttatttttatttactaaatctggcagcaaccctatcacttaaagcactaagaaaagtgcccagcaagtgctcataagtgtttgctattattattattatttctattacttgatttttattgagtccactccattcccagcctctctttcagactagagtccttcagaaccttactaatttggcttctaatatttaatgcaaacccattcaaatagagggtagtttagagcttttcagcactaaccaaacactccctcaaaaataaaataaaattatgttcaaaacaagatcatagtgggaatacttaaaataactaactgaacaagacatttttatgacccttcacatgtttggaaagctctcatttccgtacaattaggataattataaactgttttgtgctcagaagaaggtccactcagcaatgccttcgtaagtcggtgcaggttaacagtatcagctgaagaaaacaaacccttcttaacggaactttctttaatttcaagatagtgtcagaaaattagtgtttaaatcccagacctactgctaaacagctgtgtgtctttgggccaaggcatttcttgttycaggacctttgtttcctaattttaaagacctggtccccatatcatatgatttccttaagggccattgactctacatcccatttcccactgaggtttgtatctgagcagaaaaggtaaccagcacagcatgtaaggcaacctgtgtttgcaaacacaagttacgttggtcgttaccaagccaggaggcgtaaaaacagacaaaacccatggtcgtggcaccccgggaaataccttataccccactgagctcgactcgggctgcactttggaatcagctagtgaactctatgtattttatttttatttttatttcaattgctttacaggtacaaatggtttttggttgcatgtatgaattgtatcaaccaatgagtggataaagaaaatgtggtatatttataccatggaatactactcacccataaaaaaggaactttaaattagatgcctaggccaggtctccaaccccagagatactactgattcaattggtctgcggaggggtcagagaacttaagcaacctgggtgttgctaatatgcacctggggttaagaaccactgacccggctagcccctgtgagctcagtgtttgtcattctttgacattcttctcaaactcaccctacatcccccaacatgaggctcacaggatcacctgtcatgttgctcatgattgattactctttatttaatgcatgcggttctgctcattatgatgcagttggcacaaagacggagagccccatcagtggacaccgagaagcggcagcagtttagtcttggctgcatcctctgcttctcttgcttgaacaaggtgtttacagctcaccttacttctggggtcccaagaaagtaaactttctgcagccttcccacacttataaacctaactttccaggatatgttctgctcaatccaccaatttagcacatatcattgattggattattataaaatgttatgaacagacaaaagaatatagattcatttaataaaccagcaagcaaccacactcctatctcctagactgaacacatgttaatgttttgttcagaacttcctttgtagtgttcctaatctcgtagccctaatgttctcccaggtgttgacaactactctgaaattagcaagcactcatcttatccacaatgttatatcctttctatatacggaaata

SEQ ID NO: 667069 - DNA, 2052 bp, Homo sapiens
agttgttgaacaggcagtgtatcatggtggttatctggacttcctaggttcaaatcccaactctgctacatagtagctttgtagttttggataagttacctaacactgcctccattttctcctctgtattttggggattaattaaatctaccacgtaggattgtaaaggttaaatggtgttaattcacttagtggagtcgacagaatcagcaaagaaaatacaggaacatacttagagtaaaaaattatttgtcgtttgctggaattcaaatttatttgggtgccctttatttttatttactaaatctggcagcaaccctatcacttaaagcactaagaaaagtgcccagcaagtgctcataagtgtttgctattattattattatttctattacttgatttttattgagtccactccattcccagcctctctttcagactagagtccttcagaaccttactaatttggcttctaatatttaatgcaaacccattcaaatagagggtagtttagagcttttcagcactaaccaaacactccctcaaaaataaaataaaattatgttcaaaacaagatcatagtgggaatacttaaaataactaactgaacaagacatttttatgacccttcacatgtttggaaagctctcatttccgtacaattaggataattataaactgttttgtgctcagaagaaggtccactcagcaatgccttcgtaagtcggtgcaggttaacagtatcagctgaagaaaacaaacccttcttaacggaactttctttaatttcaagatagtgtcagaaaattagtgtttaaatcccagacctactgctaaacagctgtgtgtctttgggccaaggcatttcttgttccaggacctttgtttcctaattttaaagacctggtccccatatcatatgatttccttaagggccattgactctacrtcccatttcccactgaggtttgtatctgagcagaaaaggtaaccagcacagcatgtaaggcaacctgtgtttgcaaacacaagttacgttggtcgttaccaagccaggaggcgtaaaaacagacaaaacccatggtcgtggcaccccgggaaataccttataccccactgagctcgactcgggctgcactttggaatcagctagtgaactctatgtattttatttttatttttatttcaattgctttacaggtacaaatggtttttggttgcatgtatgaattgtatcaaccaatgagtggataaagaaaatgtggtatatttataccatggaatactactcacccataaaaaaggaactttaaattagatgcctaggccaggtctccaaccccagagatactactgattcaattggtctgcggaggggtcagagaacttaagcaacctgggtgttgctaatatgcacctggggttaagaaccactgacccggctagcccctgtgagctcagtgtttgtcattctttgacattcttctcaaactcaccctacatcccccaacatgaggctcacaggatcacctgtcatgttgctcatgattgattactctttatttaatgcatgcggttctgctcattatgatgcagttggcacaaagacggagagccccatcagtggacaccgagaagcggcagcagtttagtcttggctgcatcctctgcttctcttgcttgaacaaggtgtttacagctcaccttacttctggggtcccaagaaagtaaactttctgcagccttcccacacttataaacctaactttccaggatatgttctgctcaatccaccaatttagcacatatcattgattggattattataaaatgttatgaacagacaaaagaatatagattcatttaataaaccagcaagcaaccacactcctatctcctagactgaacacatgttaatgttttgttcagaacttcctttgtagtgttcctaatctcgtagccctaatgttctcccaggtgttgacaactactctgaaattagcaagcactcatcttatccacaatgttatatcctttctatatacggaaata

SEQ ID NO: 667070 - DNA, 1434 bp, Homo sapiens
tgcttgagcccaggagatcaaggttgcagtgagctgcgatcacaccactgcactccagcctgggtgacaaagtgagaccctctctcaaaaagaaaaaaaaaagatactatatccggatggagtgcctgatataattctaatgtacatccagagcttagtagtagtcgtggaatgaatgagggaatgaatgagtaaatgaatgaataagtggaccacaactctactcacaactttttgatagtaagtcagtgaagaggtctaccacactcttccctcytatttatccaaacctaacagatctccccaggcctggcatttactcatcaatagagcaggtgggttacctgaatcgtctcacttttcacaaggttgctgttagattcttcctctcatagcaccagcgtcactgctggttggcatttacgtcactagactctttgcaactcaagatgcaaagcacattcacttaccctctcagcctcgtgccctcgctgggcatcgcagatgttgaatggctggaagtttctgagagaatcgctccaggatcgctcatccccctggcttccatccactcaacatcttgagctgcaaagtaaaactgggcaaagacgtggagaaacgtgggaatagtgcatggagggaattgtggttttacattcgccatttctgttatgaaaggaactacaagcatccttcaaataacatgcaggtcttgcttttctttccatgatcacatcaccaggaggtgagagggagatcctatctccagctagtaaagtcataaaatgggctgggcgcagtggttcgtgcctgtaatcctagcactttgggaggccaatgcaggtggatcacttgaggtcaggagttcaagaccaccctagccaacatggtgaaaccctgtctctactaaaagtacaaaaattagtcaggcgtggtggtgcacgcctataatcccagctactcaggaggctgagaaagaagaattgcttgaacccggggggcggaggttgcagtgaactgagatcactccactgcactccagcctgggcaacagagcgaaactccatctcaaaaaaaaaaaaaaaagtcataaaatgtaagtaaatcccaacaacagagaaatccatttagtaatgttcatgctaaccagcagtaccattggagatatgtcaggaagattccattgcaaccaggtgaaaggcgagaagtatcaaagagaacccactcactctatttatgagcaaagggtaggcctaaagagatctttccatacagaaaagaaagggggaaatcattgcaaataagacactggggacaattctaccacctgaaaaagaggaaggatatactcaaggtagacaataaaagcaggtccttgagacgtgcttgttagaggaaacacacaatcattcacgaaagcatgtgtttgcgtcc

SEQ ID NO: 667071 - DNA, 1434 bp, Homo sapiens
tgcttgagcccaggagatcaaggttgcagtgagctgcgatcacaccactgcactccagcctgggtgacaaagtgagaccctctctcaaaaagaaaaaaaaaagatactatatccggatggagtgcctgatataattctaatgtacatccagagcttagtagtagtcgtggaatgaatgagggaatgaatgagtaaatgaatgaataagtggaccacaactctactcacaactttttgatagtaagtcagtgaagaggtctaccacactcttccctcctatttatccaaacctaacagatctccccaggcctggcatttactcawcaatagagcaggtgggttacctgaatcgtctcacttttcacaaggttgctgttagattcttcctctcatagcaccagcgtcactgctggttggcatttacgtcactagactctttgcaactcaagatgcaaagcacattcacttaccctctcagcctcgtgccctcgctgggcatcgcagatgttgaatggctggaagtttctgagagaatcgctccaggatcgctcatccccctggcttccatccactcaacatcttgagctgcaaagtaaaactgggcaaagacgtggagaaacgtgggaatagtgcatggagggaattgtggttttacattcgccatttctgttatgaaaggaactacaagcatccttcaaataacatgcaggtcttgcttttctttccatgatcacatcaccaggaggtgagagggagatcctatctccagctagtaaagtcataaaatgggctgggcgcagtggttcgtgcctgtaatcctagcactttgggaggccaatgcaggtggatcacttgaggtcaggagttcaagaccaccctagccaacatggtgaaaccctgtctctactaaaagtacaaaaattagtcaggcgtggtggtgcacgcctataatcccagctactcaggaggctgagaaagaagaattgcttgaacccggggggcggaggttgcagtgaactgagatcactccactgcactccagcctgggcaacagagcgaaactccatctcaaaaaaaaaaaaaaaagtcataaaatgtaagtaaatcccaacaacagagaaatccatttagtaatgttcatgctaaccagcagtaccattggagatatgtcaggaagattccattgcaaccaggtgaaaggcgagaagtatcaaagagaacccactcactctatttatgagcaaagggtaggcctaaagagatctttccatacagaaaagaaagggggaaatcattgcaaataagacactggggacaattctaccacctgaaaaagaggaaggatatactcaaggtagacaataaaagcaggtccttgagacgtgcttgttagaggaaacacacaatcattcacgaaagcatgtgtttgcgtcc

SEQ ID NO: 667072 - DNA, 1434 bp, Homo sapiens
tgcttgagcccaggagatcaaggttgcagtgagctgcgatcacaccactgcactccagcctgggtgacaaagtgagaccctctctcaaaaagaaaaaaaaaagatactatatccggatggagtgcctgatataattctaatgtacatccagagcttagtagtagtcgtggaatgaatgagggaatgaatgagtaaatgaatgaataagtggaccacaactctactcacaactttttgatagtaagtcagtgaagaggtctaccacactcttccctcctatttatccaaacctaacagatctccccaggcctggcatttactcatmaatagagcaggtgggttacctgaatcgtctcacttttcacaaggttgctgttagattcttcctctcatagcaccagcgtcactgctggttggcatttacgtcactagactctttgcaactcaagatgcaaagcacattcacttaccctctcagcctcgtgccctcgctgggcatcgcagatgttgaatggctggaagtttctgagagaatcgctccaggatcgctcatccccctggcttccatccactcaacatcttgagctgcaaagtaaaactgggcaaagacgtggagaaacgtgggaatagtgcatggagggaattgtggttttacattcgccatttctgttatgaaaggaactacaagcatccttcaaataacatgcaggtcttgcttttctttccatgatcacatcaccaggaggtgagagggagatcctatctccagctagtaaagtcataaaatgggctgggcgcagtggttcgtgcctgtaatcctagcactttgggaggccaatgcaggtggatcacttgaggtcaggagttcaagaccaccctagccaacatggtgaaaccctgtctctactaaaagtacaaaaattagtcaggcgtggtggtgcacgcctataatcccagctactcaggaggctgagaaagaagaattgcttgaacccggggggcggaggttgcagtgaactgagatcactccactgcactccagcctgggcaacagagcgaaactccatctcaaaaaaaaaaaaaaaagtcataaaatgtaagtaaatcccaacaacagagaaatccatttagtaatgttcatgctaaccagcagtaccattggagatatgtcaggaagattccattgcaaccaggtgaaaggcgagaagtatcaaagagaacccactcactctatttatgagcaaagggtaggcctaaagagatctttccatacagaaaagaaagggggaaatcattgcaaataagacactggggacaattctaccacctgaaaaagaggaaggatatactcaaggtagacaataaaagcaggtccttgagacgtgcttgttagaggaaacacacaatcattcacgaaagcatgtgtttgcgtcc

SEQ ID NO: 667073 - DNA, 1434 bp, Homo sapiens
tgcttgagcccaggagatcaaggttgcagtgagctgcgatcacaccactgcactccagcctgggtgacaaagtgagaccctctctcaaaaagaaaaaaaaaagatactatatccggatggagtgcctgatataattctaatgtacatccagagcttagtagtagtcgtggaatgaatgagggaatgaatgagtaaatgaatgaataagtggaccacaactctactcacaactttttgatagtaagtcagtgaagaggtctaccacactcttccctcctatttatccaaacctaacagatctccccaggcctggcatttactcatcaatagagcaggtgggttacctgaatcgtctcacttttcacaaggttgctgttagattcttcctctcatagcaccagcgtcactgctggttggcatttacgtcactagactctttgcaactcaagatgcaaagcacattcacttaccctctcagcctcgtgccctcgctgggcatcgcagatgttgaatggctggaagtttctgagagaatcgctccaggatcgctcatccccctggcttccatccactcaacatcttgagctgcaaagtaaaactgggcaaagacgtggagaaacgtgggaatagtgcatggagggaattgtggttttacattcgccatttctgttatgaaaggaactacaagcatccttcaaataacatgcaggtcttgcttttctttccatgatcacatcaccaggaggtgagagggagatcctatctccagctagtaaagtcataaaatgggctgggcgcagtggttcgtgcctgtaatcctagcactttgggaggccaatgcaggtggatcacttgaggtcaggagttcaagaccaccctagccaacatggtgaaaccctgtctctactaaaagtacaaaaattagtcrggcgtggtggtgcacgcctataatcccagctactcaggaggctgagaaagaagaattgcttgaacccggggggcggaggttgcagtgaactgagatcactccactgcactccagcctgggcaacagagcgaaactccatctcaaaaaaaaaaaaaaaagtcataaaatgtaagtaaatcccaacaacagagaaatccatttagtaatgttcatgctaaccagcagtaccattggagatatgtcaggaagattccattgcaaccaggtgaaaggcgagaagtatcaaagagaacccactcactctatttatgagcaaagggtaggcctaaagagatctttccatacagaaaagaaagggggaaatcattgcaaataagacactggggacaattctaccacctgaaaaagaggaaggatatactcaaggtagacaataaaagcaggtccttgagacgtgcttgttagaggaaacacacaatcattcacgaaagcatgtgtttgcgtcc

SEQ ID NO: 667074 - DNA, 1484 bp, Homo sapiens
tagctctatctagtaggaaatgggaaatgcctctttcattacagacaggacaacattcctttctctcctcttttttttgagaaagcgtcttgctctgtcaaccaggccagaggattgtagtgatcttggctcactgcagcctagacttctggggctcaagtgatcctcccgcctcagcgccccctcccatagcggggactacaggcgcatgccaccacacccagctaaatttttttgtctttttagtagagacaggtttcgtcatgttgtccaggttggtcttgaactcctggactcaagcgatctgctcacctcagcctcccaaagtgctgggattacaggtgagccaccacgcctggagttgaaagacattcctttctgagtgaaggggaaaaaacccaagacctggctagtttctctctgcctactctgcgtggaaacctggaaatggatgccagggaaggcagtgtttgtctttgtcccagcataacaatcaactaaggaacttgttacaaatacaaacttgtatttgtatttctgattgctggggagcaatgagaaagcaatcaaaaaggagcacttccrgtcagtcaagaaagtgagggcaaaagaactaaggttcccaaagtcccacgaagtcctcgtgatcagaacagttattatcagaaaacaatataccaatatgcacctggtgtttaaatcctgttctacactaaaaatgcatttccaaacatcttttaatgtgtctgtgtttagcagttctaatattagctttgttttatgtaaccaataaatgaaaacactgctaatcatactggctattaaggtcatgtagtcataacaagagccttctctcacattttattctaaatgaagacaaaatattaataacaagtatgtttaagcactgggcttggaaatctaagcagtgcagaaagatagggacctatcaaatgattcaggatctttgagacatcatctcactacaaagttgagatgactgacagatataccttttttttttttttttgagacggagtttcactcttgttgcccaggctggagtgcactggcgcgatctcagctcactgcaacctccgcctcccaggttcaagcgattctcctgtctcagcctcctgagtatctgggattacaggcgcatgtccccacgcccggctaatttttgtatttttagtagagatggggtttcatcatattggttaggctggtcttgaactcctgacctcaggtgatctgcccgcctcagcctcccaaagtgttgggattacgggcgtgagccactgcgccccgccaactgaacagataagatatatctatattgcttaacagagtaagttcaaataatggacttatctttggatttcagacagaaaaacatgtcttatccctgctaaacctcagtgcaaatgggcccagtacaagaagaggaggaggaacggactggcaatacaaacgctacggtt

SEQ ID NO: 667075 - DNA, 1337 bp, Homo sapiens
aattcatttaaattagctgttatttctaattacatttaccaatattaatgtgcaatggacattcaaggaatggatggccacgtctgggtaataattgacttccattgatttcctgaatgaaaagtatgttggtctcttgattagcagaaaaagctgcagtaaaaggtaaatgttgcagacttatcagcatttctttattatattggaaaagaaatcgcaggactttgccatgcttgtttggctaagtgaaactctggtaaatatatgattggttaaatatgttggtgcttggttttgaaagtccactttcacaaatactgatgaattacccttctattatatcttacacaggagacttactgagtggaactaaattggttgccataagttataaactcttttaagccaagttttaaaatatttatgtagaagtcaatgccacatacatacgaaaccattctataaataccaacaggaatttaaaatggtgggattaagatatagtccttatacaaaatatcatcttgtccttatacacacactgttgaaaaaatcctctttcagaataaagtacaactgattttattaaatgatgaaactggaagggatcttagaattcaaatatccccaacttctcactctatagatgagcaaaagaaaacctactgaatgatttattttaaatctgtttgaaagttagtggaagagctctaattaaaactctatcatagggtccaacctagttcatgttctaaattactaatctgtctcgcattaaagatttttcctagttggcttcaatattctgcagtgaagttctaaagcttggtctagtaggggtagaaataaccataatgatagttcatcctcttgcccagtttaatttctcttagtcacctttaacattctgtttggttctgatatcaagactattttaagaaagaaagtgcttagacttgaataaaatgaggttaaagaaaaggacatctggggtgttgttcaacgtatttaacaattgttgccactgcaacatccaccaattagaacaattgctggctgttagccacaggccctgttgtaccaatacttactagcaataaaccagtctggggttcttaattttctgcctctcccccataaccttgctatgcattgtacatacatttatctttgtatgtttgtgtttgcagaaatggaggtggggtagaatgaagcagagcacttactgtgtttataaattcactcatcaaatatttrctgaatccaaatccaggacttgctcttacggagtctttctgtattgcagagaaagcttgaatgggagctatcctcatgca

SEQ ID NO: 667076 - DNA, 806 bp, Homo sapiens
taaaaaattggcacattataattttacaaatttatgaggtacaatgatgaaatcaccagttcactttttaaaaattaagtatataaaaaattacagcacataaaacaaggtttaatcaaccccacaaacttaatcaggaataccaaagaattaatctgaactaatgtgattttgtttggggatgcagatgggataataactgagaagttcagttatttcagaacgtgtctagaggcatctacatgacttagatccataggtaatccgattcatatttttctgatagctgactcatatttctaagacatcttgtatctcctcacctctctctggtggtagtacgcattcagtgataggagctaaaggacgcagtgcagaactaaaccagaatttatgcaaagtcaatgagctgaattgaaataactgagttgactaaattaatctgagcaggatctgtcgctttccctaaaggaaccctgactaacaatagcttctccaactgmcagttgactctaacttaagttcactgcttctctgctgttgctaatgtgcaggttctgggtcctgaactaattgctgccaggtgggtgacaggaaacagagctccaatcttgttctctgttctgagagaaaattctgatattctttggaaagatatagatgaaacctaatgtttatcaagaaactctgtctgttatccttcttggctgatacacaagaatatatggtagtctttggccaaattaaaacattaaaatggactccttttttgaagaggggttgggagtaggggataactagtggga

SEQ ID NO: 667077 - DNA, 643 bp, Homo sapiens
acatgcttaagtttagtataaagcttcttcaaggttgggaataaagactcaaacacatttgatcaaagaacacatcattaacattgatactacacttttaaaaaaaaaaaaatggagttttgctcttgttgcccaggatggagtgcaatggcactatctcggctcactgcaacctctgcctcccgggttcaagcgattctcctgcctcagcctcccaagtagctgggattacaggcgcacaccactaccctcagctaattttttgtatttttagtagagacggggtttcgctatgttggccaggctggcyttgaattcctgacctcaggtgatccacctgcctcagcctcccaaaatactgggattacaggagtgggccaccacacccagccaatttttttttttttcctgaaggtagcccgtgtttacttcactgtcatactttgcagaaagcaggcgttgtaggaatagggcaaaataaaagtaattaattttgaagtagggacaaagggagtttagagagatattgtggaaagactcaaacagtgaggcttttccttaggaaggctggcttctagaataaatgagaatactatatgaatggtaggtgcgggacaaactagcagaaggggaggggacatga

SEQ ID NO: 667078 - DNA, 1700 bp, Homo sapiens
caaactaaaaacagccaataaagagaaatgtttttctgaagcatctatgtatatctcaagctttggcacgtaaagacaagctgacttggcaaaagaagtgagatttagagtctgaaagcctgtgtttgaggctggcctctgtcatttagttcctgacttaatgtcattaggaaattggtaatgaccatattatctgctggaagcttgggaaggaaaagggaagttgatttgctgatttcttacaatgagtcagtgatgttattatatttacatatgactaatttaattctcaaaaatgctgagaaaattagacattatcttcatttaacagatggggaatatgatatgcagttactaatggcagaggtaaatttgaaccaaattctattcaataatagaagctgtgttcatttcattatacgaaactgcctacaaataagaagtttgtgaaactcatatacatgtaagttagtattataaatagaatgtcaaaatgtgtcccatttttaactgagactacaatggccaagaacaatatgttaggtgtctaatatccctacagaatgtcctaaagcaaggtgttagcccacattggaagtcccaaagtattgtaaatatgttttcccaatactgttgtatcaygcactttgaagcacttaaaggattgaagtaaagaggcctgaagcgaaaggatttctttggagagttgtaaatattcaacaatccccaacttccccttttctccaccaatggcataaggaaggcgatgtcttcctcttcatcataaaccagagtagaagtgctgaaaagaggctctttgagaggagagaagctgatatgctgaaagaagcgtgagaaaacagagatcagatgtctaccacagagcccgtaattgtgagacaggttgaagctgccctgccttaatggcaggtagagagggtttctgggcttgcattcagtggggcaaagatgaatgctctccagggatcaaatgtgaacttagtgaagggaagccagcctggaatgaagaggtgaccttaccagaggacctaccagaaactgtaggtcctatacatccagaatgaataaagacagatcacagatataactaccatgtaagactacttttttctctcctaatactgccatccctacgcctaactctggaggagtcagaaacatcagctagagtgtggggaagaaaaactgaccagccctatctcccctatctccactgtagttttctctgctggagtctaaagggggaaaaggttttaggttgaaagaatttcggagttacgtgctaattacactctcttaaacattttaattccagaaatgagattgttcttgtgaatgcaaaggtgccttccccagacattatcaggcagtgtggaagaaccagtttacaaaatgagtttaaaggaaatgatgagaatgaatgaaagtgcttgtgatttctccctcaagaggtgagatcattcacacaccagctttacaattatccaaagtgtggacttgccaatggtcctcattcacactcactaggttgtggttgatgttaaaggtcaggtggttgaggtttcttggtgtggaattagagatctggaagaaatctttatgatctttcaatatctagcacccagcacactgccccacatcttacaatatcaaatgttccatcaacacttgttgaattg

SEQ ID NO: 667079 - DNA, 1700 bp, Homo sapiens
caaactaaaaacagccaataaagagaaatgtttttctgaagcatctatgtatatctcaagctttggcacgtaaagacaagctgacttggcaaaagaagtgagatttagagtctgaaagcctgtgtttgaggctggcctctgtcatttagttcctgacttaatgtcattaggaaattggtaatgaccatattatctgctggaagcttgggaaggaaaagggaagttgatttgctgatttcttacaatgagtcagtgatgttattatatttacatatgactaatttaattctcaaaaatgctgagaaaattagacattatcttcatttaacagatggggaatatgatatgcagttactaatggcagaggtaaatttgaaccaaattctattcaataatagaagctgtgttcatttcattatacgaaactgcctacaaataagaagtttgtgaaactcatatacatgtaagttagtattataaatagaatgtcaaaatgtgtcccatttttaactgagactacaatggccaagaacaatatgttaggtgtctaatatccctacagaatgtcctaaagcaaggtgttagcccacattggaagtcccaaagtattgtaaatatgttttcccaatactgttgtatcatgcactttgaagcacttaaaggattgaagtaaagaggcctgaagcgaaaggatttctttggagagttgtaaatattcaacaatccccaacttccccttttctccaccaatggcataaggaaggcgatgtcttcctcttcatcataaaccagagtagaagtgctgaaaagaggctctttgagaggagagaagctgatatgctgaaagaagcgtgagaaaacagagatcagatgtctaccacagagcccgtaattgtgagacaggttgaagctgccctgccttaatggcaggtagagagggtttctgggcttgcattcagtggggcaaagatgaatgctctccagggatcaaatgtgaacttagtgaagggaagccagcctggaatgaagaggtgaccttaccagaggacctaccagaaactgtaggtcctatacatccagaatgaataaagacagatcacagatataactaccatgtaagactacttttttctctcctaatactgccatccctacgcctaactctggaggagtcagaaacatcagctagagtgtggggaagaaaaactgaccagccctatctcccctatctccactgtagttttctctgctggagtctaaagggggaaaaggttttaggttgaaagaatttcggagttacgtgctwattacactctcttaaacattttaattccagaaatgagattgttcttgtgaatgcaaaggtgccttccccagacattatcaggcagtgtggaagaaccagtttacaaaatgagtttaaaggaaatgatgagaatgaatgaaagtgcttgtgatttctccctcaagaggtgagatcattcacacaccagctttacaattatccaaagtgtggacttgccaatggtcctcattcacactcactaggttgtggttgatgttaaaggtcaggtggttgaggtttcttggtgtggaattagagatctggaagaaatctttatgatctttcaatatctagcacccagcacactgccccacatcttacaatatcaaatgttccatcaacacttgttgaattg

SEQ ID NO: 667080 - DNA, 1700 bp, Homo sapiens
caaactaaaaacagccaataaagagaaatgtttttctgaagcatctatgtatatctcaagctttggcacgtaaagacaagctgacttggcaaaagaagtgagatttagagtctgaaagcctgtgtttgaggctggcctctgtcatttagttcctgacttaatgtcattaggaaattggtaatgaccatattatctgctggaagcttgggaaggaaaagggaagttgatttgctgatttcttacaatgagtcagtgatgttattatatttacatatgactaatttaattctcaaaaatgctgagaaaattagacattatcttcatttaacagatggggaatatgatatgcagttactaatggcagaggtaaatttgaaccaaattctattcaataatagaagctgtgttcatttcattatacgaaactgcctacaaataagaagtttgtgaaactcatatacatgtaagttagtattataaatagaatgtcaaaatgtgtcccatttttaactgagactacaatggccaagaacaatatgttaggtgtctaatatccctacagaatgtcctaaagcaaggtgttagcccacattggaagtcccaaagtattgtaaatatgttttcccaatactgttgtatcatgcactttgaagcacttaaaggattgaagtaaagaggcctgaagcgaaaggatttctttggagagttgtaaatattcaacaatccccaacttccccttttctccaccaatggcataaggaaggcgatgtcttcctcttcatcataaaccagagtagaagtgctgaaaagaggctctttgagaggagagaagctgatatgctgaaagaagcgtgagaaaacagagatcagatgtctaccacagagcccgtaattgtgagacaggttgaagctgccctgccttaatggcaggtagagagggtttctgggcttgcattcagtggggcaaagatgaatgctctccagggatcaaatgtgaacttagtgaagggaagccagcctggaatgaagaggtgaccttaccagaggacctaccagaaactgtaggtcctatacatccagaatgaataaagacagatcacagatataactaccatgtaagactacttttttctctcctaatactgccatccctacgcctaactctggaggagtcagaaacatcagctagagtgtggggaagaaaaactgaccagccctatctcccctatctccactgtagttttctctgctggagtctaaagggggaaaaggttttaggttgaaagaatttcggagttacgtgctaattacactctcttaaacattttaattccagaaatgagattgttcttgtgaatgcaaaggtgccttccccagwcattatcaggcagtgtggaagaaccagtttacaaaatgagtttaaaggaaatgatgagaatgaatgaaagtgcttgtgatttctccctcaagaggtgagatcattcacacaccagctttacaattatccaaagtgtggacttgccaatggtcctcattcacactcactaggttgtggttgatgttaaaggtcaggtggttgaggtttcttggtgtggaattagagatctggaagaaatctttatgatctttcaatatctagcacccagcacactgccccacatcttacaatatcaaatgttccatcaacacttgttgaattg

SEQ ID NO: 667081 - DNA, 1700 bp, Homo sapiens
caaactaaaaacagccaataaagagaaatgtttttctgaagcatctatgtatatctcaagctttggcacgtaaagacaagctgacttggcaaaagaagtgagatttagagtctgaaagcctgtgtttgaggctggcctctgtcatttagttcctgacttaatgtcattaggaaattggtaatgaccatattatctgctggaagcttgggaaggaaaagggaagttgatttgctgatttcttacaatgagtcagtgatgttattatatttacatatgactaatttaattctcaaaaatgctgagaaaattagacattatcttcatttaacagatggggaatatgatatgcagttactaatggcagaggtaaatttgaaccaaattctattcaataatagaagctgtgttcatttcattatacgaaactgcctacaaataagaagtttgtgaaactcatatacatgtaagttagtattataaatagaatgtcaaaatgtgtcccatttttaactgagactacaatggccaagaacaatatgttaggtgtctaatatccctacagaatgtcctaaagcaaggtgttagcccacattggaagtcccaaagtattgtaaatatgttttcccaatactgttgtatcatgcactttgaagcacttaaaggattgaagtaaagaggcctgaagcgaaaggatttctttggagagttgtaaatattcaacaatccccaacttccccttttctccaccaatggcataaggaaggcgatgtcttcctcttcatcataaaccagagtagaagtgctgaaaagaggctctttgagaggagagaagctgatatgctgaaagaagcgtgagaaaacagagatcagatgtctaccacagagcccgtaattgtgagacaggttgaagctgccctgccttaatggcaggtagagagggtttctgggcttgcattcagtggggcaaagatgaatgctctccagggatcaaatgtgaacttagtgaagggaagccagcctggaatgaagaggtgaccttaccagaggacctaccagaaactgtaggtcctatacatccagaatgaataaagacagatcacagatataactaccatgtaagactacttttttctctcctaatactgccatccctacgcctaactctggaggagtcagaaacatcagctagagtgtggggaagaaaaactgaccagccctatctcccctatctccactgtagttttctctgctggagtctaaagggggaaaaggttttaggttgaaagaatttcggagttacgtgctaattacactctcttaaacattttaattccagaaatgagattgttcttgtgaatgcaaaggtgccttccccagacattatcaggcagtgtggaagaaccagtttacaaaatgagtttaaaggaaatgatgagaatgaatgaaagtgcttgtgatttctccctcaagaggtgagatcattmacacaccagctttacaattatccaaagtgtggacttgccaatggtcctcattcacactcactaggttgtggttgatgttaaaggtcaggtggttgaggtttcttggtgtggaattagagatctggaagaaatctttatgatctttcaatatctagcacccagcacactgccccacatcttacaatatcaaatgttccatcaacacttgttgaattg

SEQ ID NO: 667082 - DNA, 1700 bp, Homo sapiens
caaactaaaaacagccaataaagagaaatgtttttctgaagcatctatgtatatctcaagctttggcacgtaaagacaagctgacttggcaaaagaagtgagatttagagtctgaaagcctgtgtttgaggctggcctctgtcatttagttcctgacttaatgtcattaggaaattggtaatgaccatattatctgctggaagcttgggaaggaaaagggaagttgatttgctgatttcttacaatgagtcagtgatgttattatatttacatatgactaatttaattctcaaaaatgctgagaaaattagacattatcttcatttaacagatggggaatatgatatgcagttactaatggcagaggtaaatttgaaccaaattctattcaataatagaagctgtgttcatttcattatacgaaactgcctacaaataagaagtttgtgaaactcatatacatgtaagttagtattataaatagaatgtcaaaatgtgtcccatttttaactgagactacaatggccaagaacaatatgttaggtgtctaatatccctacagaatgtcctaaagcaaggtgttagcccacattggaagtcccaaagtattgtaaatatgttttcccaatactgttgtatcatgcactttgaagcacttaaaggattgaagtaaagaggcctgaagcgaaaggatttctttggagagttgtaaatattcaacaatccccaacttccccttttctccaccaatggcataaggaaggcgatgtcttcctcttcatcataaaccagagtagaagtgctgaaaagaggctctttgagaggagagaagctgatatgctgaaagaagcgtgagaaaacagagatcagatgtctaccacagagcccgtaattgtgagacaggttgaagctgccctgccttaatggcaggtagagagggtttctgggcttgcattcagtggggcaaagatgaatgctctccagggatcaaatgtgaacttagtgaagggaagccagcctggaatgaagaggtgaccttaccagaggacctaccagaaactgtaggtcctatacatccagaatgaataaagacagatcacagatataactaccatgtaagactacttttttctctcctaatactgccatccctacgcctaactctggaggagtcagaaacatcagctagagtgtggggaagaaaaactgaccagccctatctcccctatctccactgtagttttctctgctggagtctaaagggggaaaaggttttaggttgaaagaatttcggagttacgtgctaattacactctcttaaacattttaattccagaaatgagattgttcttgtgaatgcaaaggtgccttccccagacattatcaggcagtgtggaagaaccagtttacaaaatgagtttaaaggaaatgatgagaatgaatgaaagtgcttgtgatttctccctcaagaggtgagatcattcacacaccagctttacaattatccaaagtgtggacttgccratggtcctcattcacactcactaggttgtggttgatgttaaaggtcaggtggttgaggtttcttggtgtggaattagagatctggaagaaatctttatgatctttcaatatctagcacccagcacactgccccacatcttacaatatcaaatgttccatcaacacttgttgaattg

SEQ ID NO: 667083 - DNA, 2062 bp, Homo sapiens
gtataatgtttgttggtttgtctgtcttttccattccccatgaaatcaggatctgtaatctgtcacaatatcccctgactaggacataataggcacttagtacatatttattcagttttaaaatatgagcaaagctataggatggaaatttgttagatgtgttatgggagaatgattaatacattttaaggatgaaggaaggtaagatttgaaatgttgaattctgaaccaccggacaaataaagggcagggagtgagactagggttgcagcgagacatgaaaaccaaagaaaagcagctctacaatggaaccattgatgtaaagggacacacacacacacacacacacacacacacacacttcaattttgaggcagaagaatatagactgaggttgacatgcaagggcacagggttaaaagtgaagaatggactccaaatcaggagtcaatttttctggtgtaactacagcttcagaactaaaattaaggagctgttgaggttttctacctgacttggataggaaagctaaactaggattataccatgaaacatcttaaataccaggctgaagaggggttctaagtcttgcagtcyttggaccattactgaataattatgaacagagggggagaaattaaagattagaaaacaagtctaaccatgttctataacactgaagttagcacatagaaacttaatgtgactgaatattaggagaataaatattttattaatgataataaaaacttaaactagaggtgtggcagcgatacttagaggaagaaaaatgtagcatccatgggaaaaactggaggtagtctgagacttgataagagagaggaaagacataaattttactgaaatagttaaacataaattttagtgaaatggaatagttaaatatttcactgaaccaggtactttacttctttgagaaataactccttgagtttagattatctgtgttattctggtacaaagaataccaatttatatgctatttttaaaaaataaacagggactttaatttttaacaaagacagaatcttatacctcaggtatccactggtaccctggaggtaccaggcagctgtgcagagctgcaggcatagactaggaagtgctgccagcttcaatgaggtatatgttgccttgccaacttgtattagggacatttttctgtatcctgtgatccactctttcttccctgaaacattttttttcttaaaaacaaaaccaaaactacattctaatcagacaaaactgtttttgaaaagccaattcaagaaaattactgttagaagtattgaggaacagatactgataacattttttctactgattattctccaatgttctatcttcatgattcacttttaatataaaattttaaagatctcaaacctctctatattgctggttttctaaatgtataagggaagccagaaacatatgttaatatgattttctgtgttttgatactagaattgaaaacaagttagtatcattatgaaaacacaaaatcttatcacttggttttataacactcattatatgaagctctggaagatcacattcacatggaaaagcacacagttgtcaagaaatgatgcttttaattaagtaaaagatctatacctgattgggatgattacttatgttcttgtcattctctactagacacgacatccttgaggatagggatatgacttatttgtctatgtatcttcaggcttagtgcaatgcttggcatataacaataaaaatttttttgaatgaatgacatttaaaaaaatataacacatagaacttaccatgtaccagacacctacccaaatgctttacaaatattaactcatttaattcttattctacaaagaaaattaaggcaccgagaagttacattatgtgcccaaatcacacagatagaaagttatggaatcagaagtcaaactcaagcagagctgtgccagaatttgtactcttaacttatattatctctaaataaatgctgctgttaagttgtaaaaaatacaaatatgtaaataaatatataatg

SEQ ID NO: 667084 - DNA, 683 bp, Homo sapiens
aaaacaaatgttatgtcacaacacttgactctttaaaaatcaactgtttagaatattccacaaaataatacttttcttctctttcatagcagataaacctaaaagtttgatgcaagtaaactttagtggtatggaaacttcccatccctttgactgaaattgcagtattagggctgcccaagtctgtgaggctttcttggaacgcagcaccaccaccaccacatatgcctgtgcatgcacacacacacatacacatgcacacacacacacgactttagtcaccaaactagcctaaaggttatatttttcatcaaaaggggcagaagctggtatagtagaaataytcattgaaagagagaaaatgattcagagactgcaaaatgttttatttatggttgacaaaggatgttagaaataggaattttttgtacttggaaagctccttagaattacttaatccaacccatttatttaacagactagaaaacttaagtgaattttgtttttctaattagaaatgttaaatgtgagagtggtcaactcaagaagctgaaattttccttctctgcctaatttaatgaggtgaaccaaatgacccttagggggccaactctaatatcagcgctgctggaattttttatagctacttcaagtattagtctgtacagacttattattattat

SEQ ID NO: 667085 - DNA, 1159 bp, Homo sapiens
ccatgcccattggtccacagaaccaaaaattgtcttccatgaaactggtccctagtgccaaaaaggttggggaccactgttctacacagtttcctagagttcaccagcagtttcctagagctcaccagcaaaattaaggtctaacttcccagataagtaacttgttttgtgatttactttttgttgatccctttcccatctctatcccactctaatctactggtgcattctgggatcatctctcaaataagcatcttaagtttgtcttagggccttcttctggggtaagccaagcaaagacagtgtactatttttgcccaataattactccctgagaggaaaaaaaatcccatcatcgaayaaatttgagaaattcagtatttgctttttgccctcttacaaatctagagatgtaaaaaaatggagtgggggggaaaacttgactttttttctaacccagaattatacaaattatgtgattactattttcgctcaacacaatatctctttaaacgaatgttctacagtatcattttgtgaaattgaaaagagaagtgacaagaagctagcaaattgttcatttgtcatttattgaatacctactctaagacaggtagtagtgataattaagatagtctttacccttgcaatctggtggaatttaatatatttttttcataacggatcttgaaacaaaatctttacatttcaggcagtgtttgtaacaaaatcaaacagcttatatgcatggatggttaacaatattctgtcttatttctcatatgtatattgatttgtaatcaataatttagctaatggaaagcaaacagtaccttatatttgaattctctaccatttactagaacaattcccagccctgagagaatacattgctttattacaagatgggctaatatttattctgcatttctaaaaggcaattcttcaaaaacactgtctccttaagcaagtgcatgaaattaggagagttataatagcaagtaagcagatcagaaattacatttttcaagatccttcaaattttataacaagattttactcaaatagtgtttatattactttgtattaacagaaaatttttctttgtagataaataatctgattgctattgtttatatggaaaaattaaaaataacta

SEQ ID NO: 667086 - DNA, 2497 bp, Homo sapiens
caatgtgagcagtcactatttagttctatgagaacctggataaaacaaaaaggcagaggaaaggtgaatttgccctcagttttctgaagctggggcactcattttctcctgcccctggacatcagaactctagcttctccagcctttggatgcaagacttggaccagcagcccctcaggttctcaggcattgagacatgagctgagccacgctactactgggttccctggttctctagttttcagatggcatatcatgggacttttcagctttcataatcataagatccawttcctctaataaatctcctcccctctctctctctcaaaaggatatatcctttggttctgtttctctggagaaccctaaaacacatgtgtaacattttattatgttctattttgttagtttctcttggctaattagggattagcttaaattgaaggactgctttattccttttcctgtcattagtatctggatcaggggtgacaaatcatagactttcagcatatttcatttattcatttaacaaataattttcaggaccaccaagtttgtccacacaggttgataacagcataattctaatgggtgccattcacataaactgtagtgtacctcagtcttatacatagtgagtgtactcacatagtgagtgtactttggtgttatccatagtgagaactgtttattgagcccctacagtgtactatgtactgttcaggaatgcagcagtgaacaaaaacactagaggtaacttgaatgaatgagttggccattgcttcatccctggggcattgaaagaaagagccttttctaactttgtagtattctgaacaggtggtacctacttggtgataatctgaataaactatagtttttgttctggttttaaattttattaagccagtgtgaggctattatctcatgcaaatcagatatttttatcaaggaaaggacaatgccacactttctagaattaaaaataggattaatgatttagtttttctagctactacatgtaggtttcttcttattttttatttcttaaaagtcacttaattgtagagccctaaagagtgatctgttaagcccgggtgcagcagctcatgcctgtaatcccagcactttgggaggctgagacacgtggatcatgaggtcaggagtttgagaccagcctgaccaacatggtgaaaccctgtctctactaaaaatacaaaaattagccaggcatggtggtgtgcacctgtgatcccacctactcaggaagctgaggcaggagaatctcttaaacccaggaggccgaggttgcagtgagccaggattgcaccactgcactccagcctgggcaacagagtgagactccgtctaaaaaaaaaaaaaaagtgatctgataaaacataagtaaataaagatagctgatcagaaccaacagaatgcattgcctatttttgcagtatgttctgtaggaacaggtcaattgcatttcaaatacattgccattcattattttgaatatgaaattaaaactaattggtttcaaaacagaactgcaaataatcacaaatatgcatttacctactacatctgtgcatgatttgtgttcttaaaaattatcctttgtaccaaataatacacatactcacatatcctcttgtgtggttcttttttcaagatcagtaattagtttccaattcaaacaggggccatagactctccttttgatttaatttattaatttcattttcttcaacagctacacatttgagagaaataggcatcaattagctatttccaccaggcataaaataggaaacaggctccaatcgtaataggagaaatgaaggtaactcttcactcgggtttttgtctcttagtcagggacagactttgtagacctagactttgtagggtctgaattttatacaatttaaagcattttctttaagaaaagcagcacaaaattagacacaaacatgaatatttagaatgagaaaaagaaatcacaacaaaatacaatttttaaagctgacaaacactaaagcgacaacagagcaaaaagcccaaaataatactaatctcaacatttagctacaatgtttcaacattttttggtcaccttgtcttatgacagtgaatgatattataaaatgtatgtttggtcttcgacctcatttccttgcataaaattcctaaaatccttagaatctccaaagtgttgtcttatatgcaaatgttgacagcttcagggtggggctggttacaaaggcaggattagagggttgggactttcagccacacccctaacctccagggaggggagaggggctgcagatcaagttgatcaccaatggtaagtggtttaatcaatcatgcctacgtaatgaagcttctatagaaaaccaagaggaaaaggtttggagagcttctggatagctgcacacgtggagattcatggagggtggcacatctgggagtgggcatggaagctcca

SEQ ID NO: 667087 - DNA, 2497 bp, Homo sapiens
caatgtgagcagtcactatttagttctatgagaacctggataaaacaaaaaggcagaggaaaggtgaatttgccctcagttttctgaagctggggcactcattttctcctgcccctggacatcagaactctagcttctccagcctttggatgcaagacttggaccagcagcccctcaggttctcaggcattgagacatgagctgagccacgctactactgggttccctggttctctagttttcagatggcatatcatgggacttttcagctttcataatcataagatccatttcctctaataaatctcctcccctctctctctctcaaaaggatatatcctttggttctgtttctctggagaaccctaaaacacatgtgtaacattttattatgttctattttgttagtttctcttggctaattagggattagcttaaattgaaggactgctttattccttttcctgtcattagtatctggatcaggggtgacaaatcatagactttcagcatatttcatttattcatttaacaaataattttcaggaccaccaagtttgtccacacaggttgataacagcataattctaatgggtgccattcacataaactgtagtgtacctcagtcttatacatagtgagtgtactcacatagtgagtgtacttyggtgttatccatagtgagaactgtttattgagcccctacagtgtactatgtactgttcaggaatgcagcagtgaacaaaaacactagaggtaacttgaatgaatgagttggccattgcttcatccctggggcattgaaagaaagagccttttctaactttgtagtattctgaacaggtggtacctacttggtgataatctgaataaactatagtttttgttctggttttaaattttattaagccagtgtgaggctattatctcatgcaaatcagatatttttatcaaggaaaggacaatgccacactttctagaattaaaaataggattaatgatttagtttttctagctactacatgtaggtttcttcttattttttatttcttaaaagtcacttaattgtagagccctaaagagtgatctgttaagcccgggtgcagcagctcatgcctgtaatcccagcactttgggaggctgagacacgtggatcatgaggtcaggagtttgagaccagcctgaccaacatggtgaaaccctgtctctactaaaaatacaaaaattagccaggcatggtggtgtgcacctgtgatcccacctactcaggaagctgaggcaggagaatctcttaaacccaggaggccgaggttgcagtgagccaggattgcaccactgcactccagcctgggcaacagagtgagactccgtctaaaaaaaaaaaaaaagtgatctgataaaacataagtaaataaagatagctgatcagaaccaacagaatgcattgcctatttttgcagtatgttctgtaggaacaggtcaattgcatttcaaatacattgccattcattattttgaatatgaaattaaaactaattggtttcaaaacagaactgcaaataatcacaaatatgcatttacctactacatctgtgcatgatttgtgttcttaaaaattatcctttgtaccaaataatacacatactcacatatcctcttgtgtggttcttttttcaagatcagtaattagtttccaattcaaacaggggccatagactctccttttgatttaatttattaatttcattttcttcaacagctacacatttgagagaaataggcatcaattagctatttccaccaggcataaaataggaaacaggctccaatcgtaataggagaaatgaaggtaactcttcactcgggtttttgtctcttagtcagggacagactttgtagacctagactttgtagggtctgaattttatacaatttaaagcattttctttaagaaaagcagcacaaaattagacacaaacatgaatatttagaatgagaaaaagaaatcacaacaaaatacaatttttaaagctgacaaacactaaagcgacaacagagcaaaaagcccaaaataatactaatctcaacatttagctacaatgtttcaacattttttggtcaccttgtcttatgacagtgaatgatattataaaatgtatgtttggtcttcgacctcatttccttgcataaaattcctaaaatccttagaatctccaaagtgttgtcttatatgcaaatgttgacagcttcagggtggggctggttacaaaggcaggattagagggttgggactttcagccacacccctaacctccagggaggggagaggggctgcagatcaagttgatcaccaatggtaagtggtttaatcaatcatgcctacgtaatgaagcttctatagaaaaccaagaggaaaaggtttggagagcttctggatagctgcacacgtggagattcatggagggtggcacatctgggagtgggcatggaagctcca

SEQ ID NO: 667088 - DNA, 1152 bp, Homo sapiens
cttctcctggggatatgtgttattacaatcattctagaagattaagtgccagttcatttgtataactgtccagtcatgtaaacatcctcagaagagaaacagatatgaattcctggggatggtgaaggaaaaacattagtgaattggaactgaactgatctgcatgcttttgtgcctgtgttgtgagaatccatatgagcatgtgattttttttctagtatccttaagatttattttcaggaaaaaagttttacttttcttgtttctcattgaatgtcaatgggatggccacaaaatataggatttgagatagtctttgcctataagcaagatagcattttacaaagcattatagtgtctttgtaattcttttttccacattgaaattttaacattttttttcttcgttttttcrcttttgttttttgagacagaatcttgctctgtcacccaggctggagtgcagtgacatgatcatatctcattgcaacttcaaattcctgagctcaagggatcctcctaactcagtctcctgagtagctgggactacagatgtattccatcatgactactttttaaaattttttgtagagacagggtctcattttcttgcccaggctggtctcaaactcctgggctcaagcaatcctcctgcctcagcctaccaaagtgctaggattacagatgtgagccactgccccggcccacttgtaaagtttaaaaacttattttaaagctttgacataagttctcaaacatattgccattaatctctaaatatgtcttacatatatagtgcacattttataatgttttacatattttgtgtggtgttcacttaatcatcttcagaaatttaattacaatatgctattagataatcattctgagactgtgtacatagtacattgaagcggtgtggcaggtactcagtttggaccacagacaattgcaacctccaaatgggatttttttctacattagtaactatcaaatctccacttctctttagatcagagagacccaactacattggcatatttacaaagccaaacactttttaaatgctgaggttgagaggtccaagtcttctccaattacttgggaatgattgtgcagactagttgtaaaggtagaaatgtatattctttg

SEQ ID NO: 667089 - DNA, 637 bp, Homo sapiens
atggaatagttttaattaatgttttgacaattacgctatcactgtctttcaaagagtaaaaggataaaattgcaaaactgaaaatattctagttatctttagmaagtttcactgtacatattatacaacatcttctgaattatctgagactctatatcttataaacagattataactgatcattattctgagatattttttccagatttattaaggtgtaatagacaaatattattctaatatcttatacaaggttttaccactatttaaatactaagacaaggacagattatggaatgtgttaagctacagaattgcagtgtagtccacacaaactgtgattattagccacaatatcttccttcagttcaaagtaagattgtcttttaatttttatgaggaaatctagtatgtgacttatagtttataagaacaccccatgaggtcagaaattgtcaagattcttttcatatatttgtttggaaaaaaaaaatccctactttaaacccaataaaattctcatgcattgtcctgtggtgacaggggaaagtaaacatggccatggtaagggcactaatcttagctgtctgacagacccaggatcaaggtctgcctctacaaaagttgcttaacctct

SEQ ID NO: 667090 - DNA, 787 bp, Homo sapiens
cagaaaacactttctttgaccatgttgtttctcttttaaagtgggacytcaaagactgcaagataaaaaacagactctctagcctggtattcgaggctgtgcatgatctgattccaactcatgatcttccttcacaaacctcctactttaatcaaattagtttttaacttatccaaaacacacctggtgcccaccccttcacatcataatacggttcgtcatcccaccctctatgaacacttgccactcctctctaactactctacccctttctatcttttgagatccatccaaattaccatctactctgtaaagccattcttgatgatccagcctaaagcaaactcttaatcctctgaaggcaatttagcctcaacataattgtattagtcagggtcccagcaggaaacagatgatatactataattaggataattagaggagagtttaataaaggacattttataaaggtgtgagcaagaaaaccaatcaaccatcaagagtcaaggccttctgtgtgagggatataggcagtcaccagcaaccatgcagagaggaaaactggtagttaagtaacccaactttgcttaccttcctccctcttatttcttaccagtattctctattaaatccaaccaggcaccagaggttagagaaacccattgatgtaatcaactaccacagcacagaacaaagagtggaggagtagaacatggatctaaaggaataaagatacttagcatagtagactacagtacaagttctctagtccctcctatgaaattat

SEQ ID NO: 667091 - DNA, 787 bp, Homo sapiens
cagaaaacactttctttgaccatgttgtttctcttttaaagtgggacctcaaagactgcargataaaaaacagactctctagcctggtattcgaggctgtgcatgatctgattccaactcatgatcttccttcacaaacctcctactttaatcaaattagtttttaacttatccaaaacacacctggtgcccaccccttcacatcataatacggttcgtcatcccaccctctatgaacacttgccactcctctctaactactctacccctttctatcttttgagatccatccaaattaccatctactctgtaaagccattcttgatgatccagcctaaagcaaactcttaatcctctgaaggcaatttagcctcaacataattgtattagtcagggtcccagcaggaaacagatgatatactataattaggataattagaggagagtttaataaaggacattttataaaggtgtgagcaagaaaaccaatcaaccatcaagagtcaaggccttctgtgtgagggatataggcagtcaccagcaaccatgcagagaggaaaactggtagttaagtaacccaactttgcttaccttcctccctcttatttcttaccagtattctctattaaatccaaccaggcaccagaggttagagaaacccattgatgtaatcaactaccacagcacagaacaaagagtggaggagtagaacatggatctaaaggaataaagatacttagcatagtagactacagtacaagttctctagtccctcctatgaaattat

SEQ ID NO: 667092 - DNA, 655 bp, Homo sapiens
tatattgcaaaagtcgtaagggagaacaggaatataagaaatgatgacaaatcaaaggatgagagagaagaagccrttagttcaacagagattttgaaaatttataatatataggttgcattatggttaggaagaagaattttgggacagataccaagaggagttaatactatatgtctctactagtgggatttctcgatttgctttgggtctggagtgcccaagtctactctggtttctgtctcatgaaattctatcccacccagtactccacatgcatcctttaataacctacacatccagcctttactttagctacgttattggaaccgaaggtcttaaacaaaacaatacatgtctactttcctccattttatcttttttatattgataaaaaatttagttttcatcaattcaagttcagtttattcagttcaagttcaatttctaataaaaccaacaaaaaaactgaatgatttccataaactcataaaaggaaatctcctttaattcagttagttgagtgaaatttaaccttcatttgaattaattctattatttagttgtccacttaattgatcatgtttgcatttgaattaaaagttgttgtatatttcagaggagtacttgtaatacaagaagaaaaaataaaaag

SEQ ID NO: 667093 - DNA, 655 bp, Homo sapiens
tatattgcaaaagtcgtaagggagaacaggaatataagaaatgatgacaaatcaaaggatgagagagaagaagccgttagttcaacagagattttgaaaatwtataatatataggttgcattatggttaggaagaagaattttgggacagataccaagaggagttaatactatatgtctctactagtgggatttctcgatttgctttgggtctggagtgcccaagtctactctggtttctgtctcatgaaattctatcccacccagtactccacatgcatcctttaataacctacacatccagcctttactttagctacgttattggaaccgaaggtcttaaacaaaacaatacatgtctactttcctccattttatcttttttatattgataaaaaatttagttttcatcaattcaagttcagtttattcagttcaagttcaatttctaataaaaccaacaaaaaaactgaatgatttccataaactcataaaaggaaatctcctttaattcagttagttgagtgaaatttaaccttcatttgaattaattctattatttagttgtccacttaattgatcatgtttgcatttgaattaaaagttgttgtatatttcagaggagtacttgtaatacaagaagaaaaaataaaaag

SEQ ID NO: 667094 - DNA, 655 bp, Homo sapiens
tatattgcaaaagtcgtaagggagaacaggaatataagaaatgatgacaaatcaaaggatgagagagaagaagccgttagttcaacagagattttgaaaatttataatrtataggttgcattatggttaggaagaagaattttgggacagataccaagaggagttaatactatatgtctctactagtgggatttctcgatttgctttgggtctggagtgcccaagtctactctggtttctgtctcatgaaattctatcccacccagtactccacatgcatcctttaataacctacacatccagcctttactttagctacgttattggaaccgaaggtcttaaacaaaacaatacatgtctactttcctccattttatcttttttatattgataaaaaatttagttttcatcaattcaagttcagtttattcagttcaagttcaatttctaataaaaccaacaaaaaaactgaatgatttccataaactcataaaaggaaatctcctttaattcagttagttgagtgaaatttaaccttcatttgaattaattctattatttagttgtccacttaattgatcatgtttgcatttgaattaaaagttgttgtatatttcagaggagtacttgtaatacaagaagaaaaaataaaaag

SEQ ID NO: 667095 - DNA, 644 bp, Homo sapiens
attcttaggttaattatatgaaatttatttttaagtaatctgtacattgaagacttctcagataatttcgtggaatttcttatcagttcttaagttctaaacacaatatgattccaatgaaatagttgaaagggagttcatttagtgtgctttaaacttattcctgaacctgaaaaatgttctatatatcaagaatctcaagtggtaaatttgttaaataactacattgaataaattatcaaagggcaatttttatttctaaatctgggcaatggtaactgctacagaactgcctgcttatgctgaagcaggagtgagaactaaagcagtgttcactgccctaaagaaaattattgtgcttaatgttggtasaaggcataagaggaaggcatggttggtagcaaattgtacttacaaagatttttaaagcagaaattattttctttctaaattcaaaatatatacctttaaaaccgagaaatcttagggtttcaaaagataccatttccatggtcctgggcaatagtatactaaattattactagaactaacatttagtaaacacttaacatgggccaggtacagtgctaaatgctttacaattattattccatgtgaaactcacggcaaccccatgaggaaga

SEQ ID NO: 667096 - DNA, 644 bp, Homo sapiens
attcttaggttaattatatgaaatttatttttaagtaatctgtacattgaagacttctcagataatttcgtggaatttcttatcagttcttaagttctaaacacaatatgattccaatgaaatagttgaaagggagttcatttagtgtgctttaaacttattcctgaacctgaaaaatgttctatatatcaagaatctcaagtggtaaatttgttaaataactacattgaataaattatcaaagggcaatttttatttctaaatctgggcaatggtaactgctacagaactgcctgcttatgctgaagcaggagtgagaactaaagcagtgttcactgccctaaagaaaattattgtgcttaatgttggtagaaggcataagaggaaggcatggttggtagcaaattgtacttacaaagatttttaaagcagaaattaytttctttctaaattcaaaatatatacctttaaaaccgagaaatcttagggtttcaaaagataccatttccatggtcctgggcaatagtatactaaattattactagaactaacatttagtaaacacttaacatgggccaggtacagtgctaaatgctttacaattattattccatgtgaaactcacggcaaccccatgaggaaga

SEQ ID NO: 667097 - DNA, 599 bp, Homo sapiens
catttgttctgagtcttagccctttatttttttatttcaataaggtatattgggaagatataaagcataccaaatataaataattgaaacatgactattcctatattcagataacataatcctttaggccttctctgagcatgagcaattaaatatattttcttttcagtaatatrtgccatctgaactgtaaaacaatttcccagagatttcctggagtagctcagaccgtatctcatcactgcctttcagtattggtgctaaaggatttggcttcactcattcttgcaaatgaaatttctcctttccgggtgttatggtctgaattgtgtttccccaaaatgtatatgttaaaggcctgatctttcagtatgtgactatacttggaggtagaggctttgtaaatgtgattaagttataatgatgctgttaatgtgggccctaattcaatctgactagtgtccttagaagaagagaaaatttaacacacagacaccttggagtgcacacacacagaagaaagaccatgtgaggacacagtgaagatggccatctgccagcaaatgaaagaggtctcagaagaaacaacactgccaaca

SEQ ID NO: 667098 - DNA, 599 bp, Homo sapiens
catttgttctgagtcttagccctttatttttttatttcaataaggtatattgggaagatataaagcataccaaatataaataattgaaacatgactattcctatattcagataacataatcctttaggccttctctgagcatgagcaattaaatatattttcttttcagtaatatgtgccatctgaactgtaaaacaatttcccagagatttcctggagtagctcagaccgtatctcatcactgcctttcagtattggtgctaaaggatttggcttcactcattcttgcaaatgaaatttctcctttccgggtgttatggtctgaattgtgtttccccaaaatgtatatgttaaaggcctgatctttcagtatgtgactatacttggaggtagaggctttgtaaatgtgattaagttataatgatgctgttaatgtgggccctaattcaatctgactagtgtccttagaagaagagaaaatttaacacacagacaccttggagtgcacacacacagaagaaagaccatgtgaggacacagtgaagatggccatctgccagyaaatgaaagaggtctcagaagaaacaacactgccaaca

SEQ ID NO: 667099 - DNA, 2260 bp, Homo sapiens
tctaagaaaatatcagccaccatggcaagctggaggagaaagagtttggggctgatggccacctagtccattgaagtttagtactggctcacagatcagcttggtaagactgtcaataacttaatctagaagaatctatgtagagatagctagatcttacctgccctaactcaacccacaaaggatttgcagcagctaattccaagtaatcactgtgagagccccagctctgagaggctctagggattcttttgcatttggcctgatcagtgcctgtgtgttcatttttcttggggaaacatctgccgcccacaggaagagcacctgacgccagcccacctggcccattcgagtgcctgcaaccctgccctgcttcaggaatgaacatatcccgggacggtctggtgagacccagtcctaggcccccctcacccctggagttgcagcaaatcaggagcaagcctggagctgccagcaccatagggagagcccatctgagagggcatcaacccagggaaagcagctccctatatatcctcaaggcctggatccagcagtgactggagccagtttccccaagtgtttcagctacatgagccaatacactcttgctcatttaagacaacgtgagttgggtttctgttaacttgctacggaaagagtcctgactaatgaagacaccacccaaagaggcccccaaccaaggtctccaggactgctcagccatgaacgcagggcagcccgactgcacgcacctgcaccgtcttggtctggatgcccacgatgccaccacacttctcctcgacctgcatgtgctcagagatcacacacttctgcatcgtcgtgatcttctgtgtcaaaacgcacaggacctcattccttccttccagcacctgctggagcacagggtttctcagatttattgttctgaaaaagaaaaacggatgtgagtggcttagtgcctcaggggacattggtgtagtgtgaatttcctcttgcacagcaggcagctgaggagtgagcaggtgacagccaggctttgttgatttcctcatgatgaaaggggtggcaggtcacctggaaagacataaaccaaactctcttgaggccacctcagagctgccgggcctctgggggccaggctagatgccaragggaagggggctttcagtcaaacagcagcgccggttgtcaaggagaagaaaagaaaatcaaccagggccaggcgtggtggctcacacctgtaatcccagcactttgggaggctgaggcaggcagatcacttgaggtcaagagttcgagaccagcctggccaacatggtgaaaccctgtctccaccaaaaatacaaaaattagccaggcgtggtggcacacacctgtaatcctagctactaaggaggctgaggcacgagaatcgcttgaacctgggaggcggaatttgcaatgagctgagatcatgccattgcgctccagccagggcaacagagcaagactccatctcaaaaaaaaaaaggaaaagaaaagaaaactaaccaggaaggaaactgcaatccatgtaccttagaccctggaaactccacttttttatttaatcagagctgaaggatgtcagacgtcacagccatggcccagggaatacaggattatgatgggaggaatggtgaccaattgcttctcattgagaaaggaataggcctaaagtatgagtagcaagaaggaaattagatttgaactaagaggaaacttcttaacctgtctaggaaagatgtttcatctcttagaaggggtttgatgtctttttacacatggggaaactgaggctggttatgcatggcctatccagagtcactcagcagagatttggggctcccacccagccacttgaaattctgcaaactttcaagaacagactaaatttttatttacaggagatgatttcatgcttagaagcaaatgatgaaataacttctctggagatctcattcaatactatgattctatgaaatggacaggaaaagaaccaaactagagttggtgacagcacaagaaaaattatggtatccatgctggtctttttttaagaggttagttaccttgaaaagctcagcacccatccctgaccacacacatgctgggtcacccatcctagacagactcaggttctctgggcttcagaaagtagccctggaactggagtgagtagctaggaaagtcccatctcaatgtaatcacctgcccagaatagaaacaactcacgtgt

SEQ ID NO: 667100 - DNA, 1010 bp, Homo sapiens
gacagtcatttccccaaccagtctgtgtgtgtgagaagacaacaccaaattcctttccttagcaaaagccacagccagcgtttttagtgctgacattttattttcttgtcttccagctggttacatttttcaaaaacagttttgagtcctgtatggaaagcttcattggtgcacaccacaggatgtgttccatgaagccatcccaggaccaactggtcacaaagaagctaagagaaaatgctgccttggccctgcatataatgagccacacagggccggggcggggggcgggggcgcaggtagaggcgtgggggagaaggattcacacctgaggtgcaagaagagaaaggaaggccagaggaatctttcattgaagacagattgtttgaggacaagcagctcctgtgaagaggctgcccagatcctctggtattttaactgggcaatgaatcagcatgccccacctgcagagcctctgcaagtcctttgccacctgcctcaacttgcaagtcgctgtgtccatctgcagccgactgtcctttccatcatccatcatccgacacatgaatgcagctgctctgacagttttacaagccagacagaagccccctcaggaagggccctctctgatacctgcttcctaagtcagtttccttcagggcagatgaaaacagctgtggccattgtygggggtgatctatctctcccagcagagccggtagtgttgtgagaagctggccctccgcaccacctccccttgtctatgaccctccagcctccttttcccttgctctggaatgtggactgttaaccctctcatgaccagacgactgccttcttgcaatggacttgggagagagcagttctgatgcctgggttccttgagcaggtaggatggatgcttatagccccacctgctgttgggagcggctggaccgtctgcattaaacagaggcagtgggattcatccctggaacgcgtctgccacctgctggagacaaaaggagggg

SEQ ID NO: 667101 - DNA, 645 bp, Homo sapiens
ccagttcatwttttaaattcagccagttaaaaattgctggaagaagaggtgcaacgactggctgtcccagctcatgaggttcacgggtgtccgcagcttcctgaccagcgtccaggcatgctctgcctatgaaagcctcatttatcccgagcctgctctgtgtcagctgccaggctgtcttgatatgccatcccctctcagtcctaacacatgatgaggcaatgatgttgctcagggaggttgagtcatccaccactggtcacacagctgggaaatggaggaggtgggattccagctcagcaatgtctgcctccagaggctgggagccacgctaccctgcctctgggcgtgtggcagtattaacagtcacctacacacttttatgctattcccgaggctatttttatttcactcaaaaataactccaggacatctgttccttccctgggagcttcctgggagcctctctgtctccccacaggccagtcagtctggctgaagagctgtggaaacatttgcaaaaggaacggacagatgggcggatgcctgcagaggccagtccacttcagagaccacccaggcttctgtcactttcgctcctattcagaccccaaacaaagcccttgtgggtggccggagggattc

SEQ ID NO: 667102 - DNA, 555 bp, Homo sapiens
caaaaagaagaggtgaggcctgaggtggttccggccaggtgtggctgcagggactggtgggggcggtccctccctgtgctgccctgagcgccccaccttctgactgccaggcctgcccctccatggcatgtgtgaccgacaccccctctatatgtgcggtgtccccgttcatctctctgaaagctactggcccacacgccctcagtggacatgccagtgactcagggtctcggggcccagggtcccccgtgccacagcctgggttggggtgaaatggtgcaggccccaagagcttgcccrttgcgctgtcctcagggtgcatgagctggaggagatggtgaaggatcaggagaccacggccgagcaggctctggaggaggaggcgcggcgccaccgcgaggcctacggcaagctggagagggagaaggctaccgaggtggagctgctcaatgccaggtgggcccctccaccgagccccctccctcagagggaccccctgtcctggggcagccctgtgggataggcgctatccccattttatagatgggaatgtga

SEQ ID NO: 667103 - DNA, 1164 bp, Homo sapiens
gtatttttaatagagatggggtttcaccatgttggccaggctggtctcgaactcctgacctcaaatgatctgcctgcctcagcctcccaaagtgctaggattacaggtgtgagccactgtgctcggcttgtttatttttcttttttttttcttttttctttctttctttttttttttcttttttctttctttctttttttttttttttttgagacagattctcactctgtcatccaggtggagtgcagtggtatggtctctgctcactgaaacctctgcctcttgggttcaagtgattctcctgcctcagtgggattacaggcgtgtaccaccatgcccagctaattttttgtatttttagtagagatggggttttamcatgttgccaggctggtcttgaactcttggcctcaagtgatcccccaaccttggcctcccaaagtattgtgattataggtgtgaaataccacgccctgccttaaattattattttaaattaaaaaaatgatgtttagatgccacgatgtaggtggcagtaccttaactatatgcgtgtcgtcaggcccaagggcctcttccatccttgtcaaggggagtgctaaccttctctcctttcatacaatccagctctcttattttgaatctgcgtgtatatacatgttggttgagaccggtgcagagtgattgagactcgggcttgtgggtctggtaggttcgaggactaactccatcgcttgggagcatgtggccttgggcaagttacttaatccactgggaacaggggtatcgtaaccatcagatggggatactgtctgggattcccatcccctatatgggtctcaatcctctcagtttctgtggtctaacaactatgtgccagggactgggccaggcagaggctggggtatccgttagtaagatgggcacggtccctcgctgcctgctctgatttttgccccagctctgagagcagattaatggtattgtaagtcctcattgtatggttgaagtcgagactcaggggaagagaccctcccagaatctcccagcttgcctcggtaccataggagcaggacccccaggcttccaggtgcagcctcccaggtcggaagccagcaagctggggctgtagaacaggaggtggctgggcctggattcgctggc

SEQ ID NO: 667104 - DNA, 664 bp, Homo sapiens
ccgcaggtaagacggcgacgcgggctagtccacgccgaggacctcgagggcagcgcgggagaacgaggcagcctcttccacctgtccggtcctctcgcctcaaaattgggggaccccaagggacagtgaggatatccctatctcggctctgagcgccgacgttgggcatctgctgggcgggactgaactctggggcagttagagggtcctggctggttatccctgatgccaggcgggctccaaaggatggaaaagaaagagccgggcattagacacgcagctttctggagtggggcaggttggggatggtgaggacgggggtccggagtaaggaacctcgttgactgagagtgcgccatgcctcatccaagggcagcctcttccccaccctagggggtgatggcttgacccaaactgggcttctgttccgtgggctaatgaggtaaaagccgccgcatagctgagctggggcctgggattttytaatgagccccagggcacctgcatcatttatttacatctgggtacaagggggtgagcaggggattaccccgatggcctagggaacccggaaagtctgggaactcagtagatcttttctgtgtctgtgtcacagagccggctggggaaggtgatcgcagatgtggccttattgcagacaggg

SEQ ID NO: 667105 - DNA, 665 bp, Homo sapiens
ggttggactacaggcatctgccaccatgcctagctatttttttttttttcagatatgaggtcttgatatgttcagcmcagactagtctgggactcctggccccaagcaaacctcccatctcagcctcctaaaatggtgggattataggtgtgagccactgcattcacccaaataatatttatttaaccagagtgataaacggctttaaaagtggctgggtatggtggctcacgcctgccatcctggcactttgggaggccgaggcaggttgttcacctgaggtcaggagttcaagaacagcctggtcaacatggcaaaatgccatctctactaaaaatataaaaattagcctggtgtattggtggacgcctgtaatcccagctacttgggaggctgaggcaggagaatcgcttgaacctgggaggcagaggttgcagtgatctgagatcgcaccattgcactccagcctgggcgacagagtgagactctgtctcaaaaaaaaaaaaaaaaaaaaaaaaaaaaaagacttgaaaagcaatacagaaagttacatggatgtaaaaactttaattcttttaaagtttagttttttttaagtaatcaaaaacttaataaagacaacacaggattttcttggtaaaatgtaaaatctttgttttttgggc

SEQ ID NO: 667106 - DNA, 1478 bp, Homo sapiens
aagaacagtggaaggagcacaggtcatgttcaggatctattttgagggaattagtttttcaattcaggaccctatgtcattcgtctgggaatggtttaaatgaaggtctgcctgcctgaacaccagggaatgggcaggatgacctggttggctcctttcagatgagacagattaggtccacaggggtcaaggggaggggaagggtggagaaagaagttaccccttgcagatagagactgtgaagattctggaggccttctaagttcctgatagtagtaatcccctcccggtccaggcggacagtctgcagttcatcaagagtgtgaaacctgggaaaagagtcagtaagggtggtgttagagcaccactcatgtggtctcttagcagggaggatgggagacggaggagggaaggggtttcaaggaggggtagttggctgagtcattttaatcagatgtgagaaacatcttgacatcttgaggtggtgtctagatcatgaaaccggcttgacttgcagactcgtatctctattgttagcactgggaagggtgagagagaggagtaagggccctctgggaaattgggggatggcagcttatggtttctggagagattcagaggcaagagaaaccttcctctggccagcttggatggtggaggcaggggtgggacagagatgagacactgcagaaagatccttcctcaccttccttttgagtcgttcatggagaaaaaagcacttgttccatccacccattcattcattccacaacattgctgagtgcctactagagacaaatgacagagtctctgcccaccactaataaagaagcagggcaggctgrccatggtggcttaccctgtactcccagcactttgggaggccgaggcaggaggatcgctcgagcccaggaggtcgaggctgcagtgtgccatgattatgccactgcacttcagcctgggtgacagagcaagaccctatgtcataaaaaaaaaaaaaaaagaggctgggcgaggtggctcactgtaatcccagcactttgggaggtcgaggtgggtggattgcctgaggtcaggagttcaagaccagcctggctaacatggtgaaaccccatctctactaaaaatacaaaaaaaattagccgggtgtggtggcgcacacctgtagtcccagctactcgggaggctgaggctggagaatcgcttcaactcaggaggcagacgttgcagtgagccgagatcacaccattgcactccagcctgcgcaacagagtgagactccgtctcaaaaaaaaaaaaaaaaaataggaagaaggccaaacatctatgacaagtggataacagaggcaagtacaggggaaaggaagaaggaggaggaagaagggaaagaaggaggaagaggaagaagaaagaaagaaagaaagaataaggccaaacatccctgacaagtggataacagaagcaagtacaggggacaa

SEQ ID NO: 667107 - DNA, 678 bp, Homo sapiens
aagaactctagactctagtgattttctttcataacaggtcttagccatgatgtgcaggcaaagttaagacttgagaaaattagggagacaagaggatagggaggscttgcacgaactggatctttctatgagctggaaaataacaacgtattgcaccatcctctgggtgcgatttgtgaacaatgcgtcccccaggtgacaatggcagtaaacattctggtgtccactctaagcagatagtaaagtaagcagccactgctctggaacattaaccaagccaagtgaaattctggttaaattcactactagcagactaaaggtcaacataacaaacacacacacacacacacacacacacattatttgatattttgcaacggtaataattactcctatttcaacacatttaaaatattaaattgtgtatattttcaatgtcaatatgtagctataattaatagtaaaaattaaattcccacatctgtgcataatccaaacaatgaaacacacctgatttttaatgtataagggacttgtgttcattgaagaagaaaatctttcagcaattatattttggaagaaaagcaaatattccctagaggtatatgtcccaatattttcttcaattttaaatagcatttgtccaaggtcacaaaagtggataagcctgggtttgca

SEQ ID NO: 667108 - DNA, 678 bp, Homo sapiens
aagaactctagactctagtgattttctttcataacaggtcttagccatgatgtgcaggcaaagttaagacttgagaaaattagggagacaagaggatagggaggccttgcacgaactggatctttctatgagctggaaaataacaacgtattgcaccatcctctgggtgcgatttgtgaacaatgcgtcccccaggtgacaatggcagtaaacattctggtgtccactctaagcagatagtaaagtaagcagccactgctctggaacattaaccaagccaagtgaaattctggttaaattcactactagcagactaaaggtcaacataacaaacacacacacacacacacacacacacattatttgatattttgcaacggtaataattactcctatttcaacacatttaaaatattaaattgtgtatattttcaatgtcartatgtagctataattaatagtaaaaattaaattcccacatctgtgcataatccaaacaatgaaacacacctgatttttaatgtataagggacttgtgttcattgaagaagaaaatctttcagcaattatattttggaagaaaagcaaatattccctagaggtatatgtcccaatattttcttcaattttaaatagcatttgtccaaggtcacaaaagtggataagcctgggtttgca

SEQ ID NO: 667109 - DNA, 977 bp, Homo sapiens
aggactgttgtaaggatttgaagaagtaacaaaaaaatgaaatgcttacaagagtgcctaacacatcctaatcattcaacaaatgttagttattttattatttatttattatttattatgttatgatttattttatattttgttatgtataggggaaaagtcrttgtccttagattgctttccattttatcagacagataagatatgcattataaatgtttcattaatgaaacataagagtatataataatgtataaattatgagtgggccaagcagtttctgttacaagaaagaggaaattcatgcaggtgaccatacttggccaagccctcatgcagaagttgcaacttaagacagacctgaaagtaggtaggagtcagatgagtagagaatactttgcaaaataatttacctcatttgattttcttaacaacactatgaggtagaaaatcactctctctccttttttgtacatacagaaagcggctgagagaaataaacagtggagctggcaatcagccaccagcatttgatcctggccctgtggcagacagactctaagaatgctcccatgatctctgcctttggtggtcacacccttgtgtgatcccctccccataagtatgagcagacccgtgatttactttcaaccaatagcatacaacacaggtgacaggatgtcatgtttacgttacataagattttaactttaatcttgatagaagactctctcctttgctgacttgttgcagcaagatgccacgttgtgagctaccctatggaaaaggccacatggcaaataattaaagacggcctctgagtaattgcattggcttggaagtatatccatccccagtcaagcctcagaagagaccatagctctagccagcaccttgaatgcaaccatatgagacttagaagcagaagatccagctgaactgtgcctggactcctagcccacagatactgtgggata

SEQ ID NO: 667110 - DNA, 605 bp, Homo sapiens
ccatggttagtcgctaatctcataaccggtttgataatgttaaaaagtcaagaaatggctggaagcaggagcaggagcaatccacaaagtgtgaggcaggtcctaagtggagaaaggatgtatcacaaaactcaacgtgcttgacagcactgctgaacagctgggaaagaaagtgaagctaggtgcgcaccagcataaattccaggggcattaaaagcttgcatctttaatagattataatcatagatgtattaaaaaaacgcagaagtaaatatttccataatcccgggagaggaacttctgaaatagaaaccagaagagggaaagggctgatttgattaygtaaacgttttctacattcacacataaaaattactataaacaaaattaagaaccaaagtttaactcaggaaaaaatttcgatcaaatagaactgggttactcttctacaaacttaaagaggtctgagtgagcattaaaaagataaagacttcaatacagaaatatgcataaagaatatgcacgggtaattcctatcacaagaaatacagataactaataagcacttcaaatgctttgtaataaaaacacaaatgtaaatgaga

SEQ ID NO: 667111 - DNA, 1714 bp, Homo sapiens
agaggacccagggtgatgggtaatcatcactttcttgccaccagttcccatgcttggggaggggggtcatatttcccaacagaactctacacctgaagaataagagaagcagataatctgtaccccatgtctgaatggcatccctgcaccccgcctttctgcagtgcacccttggctctaagatgtaggggccactgggtgtatttttctagagttgaggaggtgtcccaacctccaaccctgacccagaatctgtcttgtgcttttatccagaaatgtacttgatagagtgaatttagcctcccttttcctttattgtccagggctcaaatgttctcattcttgatggtgtgttataaaaacaagcatttattcctaatgggtgttatccatttcatagcaagtactaacatcaaaaataagccattgctttcactgaaagcaaactgagtatttaacgactgtatctgagcacggctgaagaaatgagatgaaattttggagaaacacattgtcctgacaaaatgttattgcccagggtggagaggagctaattatagctgtctagcagggctgcagctggtgtcttgaggagggctccacagatggtggtgggatgcgcgtccaccccgggtgagggcatatgtgtgtcattgctcatctctygcttggatccacaagcaaaacggcatttttgaagtaaaagtgtccctgttagaaccaggggctatgtatgttctgcagtgaaagcaaaggtgaagagaattatgctagaaatgtctcagcttctgttgttttaacttgtgtggactgatttcagtcttcatgtcaccatattataccagacatcaggagcctcgtgggctcatttcctttccaagctgacggtgtcccttaaccctgactctgggtttccctgatgctgcctagaattctgacctctccagcacactcgataacctcctctggattcaaggttctcacagttccaataaagaaagtccatgctgcctgacacgaggaaggtcagccatatttacacttttaactgaatacagttgaaactgaaaaaaattgcagaaaaggtatttttaaaaatatttaggtttatgtgagagttggaggttccaaatattgctttattcaaacagctgggaggtagatgcacctgaccttggttaagctatttgcacttgtaaatgttagagtttgactgtattagtaaaattatattcattaatgtaaattgcatgcagtgaaaactctgtctttcccatgtgtatgtaaacagtgtttgcctgaattcgcagggcatgcagtcattacgaacgcactcagattttgaagctgtatgcactctattctggaagtcatttagctgtgattcctccaagatccttattgtcaaagtgcaaaatcagacaaacagcaatttagcaccatccaggctgagcacctttcaccctttgcagtagcttccagccccaggctgccaccatgggtttcatgctgatgcagcttctggccaggtttctatcttcctgagttttctggaaatacatggggctggtggctggtggatgcggaagcagatccaggggaggcactgctgcttggtgggaggtcttcacaatcctcccacaaagtcgcttttattttatccctaaagtcaccctaatttgccttttcttcactcatcaccacacatgaggcc

SEQ ID NO: 667112 - DNA, 2088 bp, Homo sapiens
cttctgtttcacatccctccccccagataggtgcttcctggcatcacttcccaataagcaacttgcacwcaaatccttctctcagagtctgctggtgggagaacccaagaaggcagcccctatccagaagtgtcctttcccacctccaggccccagagcatctcctgtaagcctctcttcccaggatgcatgacagaggctgaatgctcaggctggggagaagacaggtctggatttagatatcagataggttctttgaaggccatgttatcctaggcacatcaactggcctctcatggcctgtttcttaaaagataaaacatgacaagtgcattgacatcacagaacaggtgtggtgtgtgtgtgcatgatagaaacttagcactgtgcctagcatatcctgagtgctcactgaaggatagctgtcattattattattactgacattctcttttattagaataacccaaacacttgtcctgcctccctcactgagctatgacatctttgaagtcacacaccatggatattttatctttgcctttcccagaaagcccctcccagagctgatgctcattatatacctattgtgttaaattgctttgtttaatctttgcattatctatttctggatgaaagcaaggaagacatgctaattatcctatgttgctggcttagggaacagagcccctaaagaactttctccctcttttaattcttcatcccctgtttgctgctttgtgcaagtccataggtcaaaggtggcagctgtgattgatgttctgggttatgatgttgcttttcatacatttgtttgtctcacactaaacagtgagtccttcaaggaaaacatcagtgcttatacatgtctatgttccactatgtcaggctcatgtaggtgttcgataaatgtcctctaattgacttaaattatttgatatgagtatatcaaatagcaccaggtagctgctaataacctcaagtcactgacaacaggatgtagccagagcctgactagactgatgcttgcaagaagatgtttcagaaattagaaggtggcaggttgtcactactatttcaacttcactcttctaggtatattttatggatataaggttacatttaactttgctgcgtatataaatagctcatattcatttttgatccataagtcttaaacttctcagcttataggatcctgagttttgatcatttggtcattatgatgaaatctctggccgcttgttagtgccaatatttattagttgagattttaaacaccagattaggaattaacccaaccaccattcatgattgcttattaggtattatgacatcttagagtgtgaatgaagccctttcttggccctggaaagctcttccactggactcttgcactggctgctacaactttcagagaggccaggactatgtcttcacaccccagaaatttctaaatagattttatactcaggaaagagcagtcacaaagcccatgcacttagctccacaggtgagactaaggcgttgtgcctgggtcaaagcaggaagtgatgcaatgtttatagagtgagtgaacaatctttttccctcctgaatgcctgtgaaaacattactatttgaaagaaacaatgaaggtgtttcaccaagtggacagaacttttaaatgacaggattttttatggctttacgtcattcattcaaaggtatttatttggcaccaactgtgtgtgctaaatgctgtcaaccaagaagaggcaaaagaccagagagcaaagcagtaagacaaggtattcactggagtcttaggaatcacaatttgggagatacagattcagctcgaagccaaattatattccaaagagagggaagggagtagggggtttttaagagaaaataacaagaaagctaagggtggttacacaagctgttttgaaaggattattattggtggacgcagctggcttagcacatgagcccatagctcattggttgttactgttcgggagttgcagcactggtgaaattcatttgttttccaggatgttgtggtcattgtactttggcatacttcaaaggttcaaagca

SEQ ID NO: 667113 - DNA, 603 bp, Homo sapiens
ctcatttccttctcatgggwacagagagcagaggtacaggagttagaaactaaatggctgtctcagatgtctttgttctggagatgatggcagcaatgaagatttggagcagaagagggaggtgatcttccccaggcctcatgaggctcctgtggctgagcacagacaacagactgtgggtttaagggagttggtagcaataccaaagaggaaagaggagactactgcaatagtccaggtgagtgtagatgatgtgggccagagtagtggccacagtgtggcagaaatggttgaattttggattgtaggtcggctctgattttctggtattgggactgagagataagaaggggtgactcaaggctttttgagtttagtagctggaagcatagaagctccatctactgggagagccaagtagatagtagaattgtttttcactcaggacatcaggaatgtgttttgtccatgttaaaaatatgagatgttttagagaataagtaagtagctatatcaagtggctaggtggacacacaggtcttggactctgaggaagggtgcaggatagagacttctacaaagagtggaggatattattgaact

SEQ ID NO: 667114 - DNA, 603 bp, Homo sapiens
ctcatttccttctcatgggaacagagagcagaggtacaggagttagaaactaaatggctgtctcagatgtctttgttctggagatgatggcagcaatgaagatttggagcagaagagggaggtgatcttccccaggcctcatgaggctcctgtggctgagcacagacaacagactgtgggtttaagggagttggtagcaataccaaagaggaaagaggagactactgcaatagtccaggtgagtgtagatgatgtgggccagagtagtggccacagtgtggcagaaatggttgaattttggattktaggtcggctctgattttctggtattgggactgagagataagaaggggtgactcaaggctttttgagtttagtagctggaagcatagaagctccatctactgggagagccaagtagatagtagaattgtttttcactcaggacatcaggaatgtgttttgtccatgttaaaaatatgagatgttttagagaataagtaagtagctatatcaagtggctaggtggacacacaggtcttggactctgaggaagggtgcaggatagagacttctacaaagagtggaggatattattgaact

SEQ ID NO: 667115 - DNA, 1077 bp, Homo sapiens
tcttgctttttcctcacatggcctttcctgggagggagtatgtaaagaaagcaaggaatctctttctttctattcttacaaaagcattaattccatcatgagggccccactcttttgaccttatctaaatctaattaccacccaaagattccatctccaaatactatcacattatattaggcttcattgtgttagtgcttcaaygtaagcattttgtgggtgggcgtggggcagaaacattaagcccataacatcatagatcccatttagtagtgggattcctggtcatgatgataatattaatagcaggccaggaaggggaagggtgggagccacaagagggtaccatacttgggtatctggatggatgttgtggaaatcacaaatacaggttatagagggaagcagccctaggaataatacagagagaggataccaggcaggtggccaagggttatgaaggatgagtgaatataagatggatgtggaggctgcattagtccattttcgtgctgctgataaagacatacctgagactgggaagaaaaagagggttaatggacttgcagttccacatggctggggaggcctcacaatcatggtggaaggcaaggaagagcaagtcacatcttacatggatggcagcaggcaaaaagagagtttgtgcaggggaactcctctttttaaaaccatcagttcttctttttttgagatggagtcttgctctgttccccaggctggagggcagtggtgagatctcagctccctacagcctccacctcccagactcaagggattctcctgtctcagcctcccaagtagctgggattacaggcatccaccaccacacccagctaattttcgtatttttagtagagacggggtttcaccacattggccaggctggtctcaagctcctgatcaagtgatccacccgccttggcctcccaaagtgctgggattagaggcgtgagccactgcaaccagccttaaaaccatcagttctcgtgagacttattcactattgcgagaacagcacaagaaagacccacccccatgattcaggtacctcctact

SEQ ID NO: 667116 - DNA, 1077 bp, Homo sapiens
tcttgctttttcctcacatggcctttcctgggagggagtatgtaaagaaagcaaggaatctctttctttctattcttacaaaagcattaattccatcatgagggccccactcttttgaccttatctaaatctaattaccacccaaagattccatctccaaatactatcacattatattaggcttcattgtgttagtgcttcaatgtaagcattttgtgggtgggcgtggggcagaaacattaagcccataacatcatagatcccatttagtagtgggattcctggtcatgatgataatattaatagcaggccaggaaggggaagggtgggagccacaagagggtaccatacttgggtatctggatggatgttgtggaaatcacaaatacaggttatagagggaagcagccctaggaataatacagagagaggataccaggcaggtggccaagggttwtgaaggatgagtgaatataagatggatgtggaggctgcattagtccattttcgtgctgctgataaagacatacctgagactgggaagaaaaagagggttaatggacttgcagttccacatggctggggaggcctcacaatcatggtggaaggcaaggaagagcaagtcacatcttacatggatggcagcaggcaaaaagagagtttgtgcaggggaactcctctttttaaaaccatcagttcttctttttttgagatggagtcttgctctgttccccaggctggagggcagtggtgagatctcagctccctacagcctccacctcccagactcaagggattctcctgtctcagcctcccaagtagctgggattacaggcatccaccaccacacccagctaattttcgtatttttagtagagacggggtttcaccacattggccaggctggtctcaagctcctgatcaagtgatccacccgccttggcctcccaaagtgctgggattagaggcgtgagccactgcaaccagccttaaaaccatcagttctcgtgagacttattcactattgcgagaacagcacaagaaagacccacccccatgattcaggtacctcctact

SEQ ID NO: 667117 - DNA, 1506 bp, Homo sapiens
cttgagcccaagagtttgaggctgcagcaagctatgatcgtgccactacactccagcctgtgcaacacagtgagatcctgtctccaaaattaaataaataaataaaattacattttggagactaaacgctgcttgtagtcatagttctaacacagctgtgtgctcagcttcatttgctcacttctcagaattcaatgtctcctgctcaaattttgctgtcatcttaaccgttttcacttatcacagatatgtttctccaggtccatttcgtcatgtatctgtgaataactacagaattattaactttgagtaatttggccgggcgcgggggctctcctgtaatcccagcactttgggaggctgaggcgggcagatcacgaggtcaggagatcgagaccatcctggctaacacggtgaaaccccatctctactaaaaatacaaaaagttagccgggcatggtggcaggcgcctgtaatcccagctactccggaggctgaggcaggagaatagtgtgaacctgggaggcggagcctgcagtgagctatggtcgcaccactgcactccagcctgggcgactgagcaagactccgtctcaaaaaaaaaaaacacaaaacaacttttgagtaatttaaacaattcacaaatgtttttgtctttctttccccatacactcgcccttttcttttttaaaaccataaataaatctcaattctcaattcagacactgtcggtgtaattgcaggtgaaatgagaatcacctcccagccaagaaatctgatcccaattttccaaatctttatttctgggttcagacaccacattttcagcccctgtcttggcatataaaagcatttataatggttcttcttttcagataagaaacatcaccaaaaggaaatagatatatctcaacttttgggctaggaactctcatttggataaaagaatatttctcctttggttggacattagtgaccatacaggcaggaaaggtgccttycttgaccaccttctctcgcctgtcttcctcctcatggttctctcaggtattttttttctgaggaaaccagaggaagagctctatattagtccacttgcctcagggagctccagcatccctccatagccactgtctggagaccattcttccactccatggccctgcctggggacaattctctgttaactctgacccaactgaggctcacaaaactgactcaaagcttccctctacagtacacatattttttaaatgaaggaaatttgactgaactatgagtggactcagagtgacattggatgttgtgtgtccatttggtggtgtggcttcagggaacatctgtaagaatatatcccaatatttcggggatccctgcagacctcactacacaagacctggttgagggtcctttaaaaggagcgaagccacgccctgacctcagagtctcagggcataatttctcagcgcccctcgcagtaccatttggcctttgcccagcgtgcag

SEQ ID NO: 667118 - DNA, 1820 bp, Homo sapiens
atggcggcggccgcggtgatgggcccggcgcaggtgggtgctgcctttcccagactttcgcccgccccaaatcctgaagttccaaatgaggagcgcctgtctgagtccctgcagcgcaggccccagtgtccaaggcagcggggcgctggtgggtgggggcgagtgtgactggcagaggggcagcctgagcataggtttggagctggactgagcccgtagcagtcgggagcgtgtgtgaaccgtagtcaggcctgcaatgtcgaggggagaagttgctccttcattgcgaggacgataggagccatggcgggttttgaatggtggagggaagggatccgaaaaaggatttttaaagtattccaatgtttgctgaggaggaaaccgactacagtgaggtagaaacgatgaggatggaggcaaggagacgtttgaggaggtccctgcaacaaactccagaagtgttgcggtggtggctgggccagagcagtggcaggaggggttgggtggggaagtcatgagattctgggtagatttttaaagatggaaccaatggggtttcctgccgcatcagatgtggtcgtgagtgaatgtagggaggaaagggctatccagggtttttttggcctgttttccttcctgaacgtgtgaaagaatggaaattggtaagtcacagcagggagcacgtttcaggggcatcaggaattgggttttggacttggtgaatctaaggtgttctgcactggaggttcatcacgggtagctgaacatgcaggtctggggttctagagagggagttgtgctagagacttcaatgggtgaggcataaggtcaaagcctgtagtagatcagatttagagggtggaatttcaaggaagttattttgtgtggtctctgaagtgagaggtgggtttagggtggaaggccagggatgaaggggtggacacttaagattccttccagaaaggaggggtcctggcatgtgaaagcattctagatggtgttgttggaagtcaatgcttggtgctgcaaagtgaaaccagcactcaggcaaaagttttctcagcaaggcaatttacttctgtgcaagtgtgctgcctgtgttaatcacgatcccaagagcacactgaacaaaggagggaaggggtttttatctctaacccatagtccctaccttcctctgtgtcactcccccatgggctggggtcggaccgcttaatctaagctgagccaattgggtatttgtgagtattttccaaataaggaagagggaaggggaaggtgagttacagtggtgggacatgtgagttgtgtaggacgtgtggttttggcgggggcaatgggtgcaaagtgagtaagggaacagatgtgaawtattggttagtgcttacaggaaggttgtttatagtaactaggggcaaggaggcatggagaacaagaaaggtttgagaacaaagaacaaggaagttaacaggctaaacctttgaagaggaattttattatatcttatagtgtcagcaagaggagagggctgtagagcataagtagcctggcctgcactggagaccaaggtgagggatgcagtaggtttgccaccctacaggctcagcatgccttcatgggcgctgcctgtggagcagtcccatccccaaccagtgcattggtgcctcagttacccaaaccctcaggtaagcagaattgatgaacatctctaatgaaggatcactgcagctccccttcagaggaatatgtatcaggtaggctggtttagtgcaagggctagtgtacaccttgcaagtacgcagaaggaactaaaaaatgta

SEQ ID NO: 667119 - DNA, 1971 bp, Homo sapiens
tggaagggtttctatttctggcaagcaatgggatgaaatgtggaacattatctcaggcataggaaccagcatgtgcaaatacttaacttaaggctaaactaggagtgttcagggaacctcaggcctccattatgtctggtgggatcagacagcagggacaggattcagcccasaaatggcagcctgaggatctgggtttgtatgctgagagaattgggagccactgcaggtttggagctaggagggagtgatctgactttggtcttaaccaacttcctctgtacagtgaaaaaagactgtgggagtgaggatgaaggaaggaataccactgaggagcttaatgcaacagttcaggttggaccagagtggtcgctgtagaggtgggagatgtggatggattctgaatcatttttcttaaagtgggaccaaccagattttctgatgtggaagatgagaaagaaaaggcaaggggtgaaggaagaccctggattttttagtctgagaagatataaagatgccatcaactgaagtgacaaagttggtggtaggagtacctttcagaggtaatatcaggagtgcagtttggctatgtggaatctaccatgttccaaagacacttgagtggaggtgtcaagtagacagctggacacagagatctgaagttcagagaagggattcaggttggagctatccacagggtggcagccagcatgtggatcaggatggagctttgcttccaatttagagagagaatctttaggtcatggtgacagtgccatcagcacactgtaagggcagacacagcagggtagaggtaggggccatcttagagtctagaagagggagggaaatgtccctgggaggaaggggaataatagggtcaggcaggtggcaaagcgttccaggcagagagtggatgtgaggtgaagtactgtagtaatagaagtgaggtggcagtgaggccagagccagtgcttattcagctctttatgtgctcctcaggcttccatggtgacctttggtgggacctgtggagtttcagtcaagctagtgaattagcccagggacagattgggtcagtaggcagaatccctgtgcttggggtaggtgcccagtgagtgtaggttttgaatgagttaaatgttgagaagcctgtgactgacctcagtagtacaacaacaaagcagaaaagggctgagtttatctgggatctgcacatggttctggattgctgaattgacccatgaaatagagccaggaggggaagatttaataggtggattcagggcaacccatggcagtgtggccgttgatcaggaccagatgtaatcctggatgcattatccaagcattctctggatgctgtgtgcagatttgcatgtggggaagccatggaggtaccagtgttgtgggtgtccatagatgtaaaggaggtatagccaaaagggtgatgtgcacatggagatggagtgtgaattcatgagcccagagctttggtatggagggtttctgaaagaatgcttagctcaggtttgtgtatgaggaataatctgttgatccccagggagctggctgataggagaagggttgggtcctacataccaggcccatggtgttttatctgtccacttgcctgttctgagctggacaaaatgattaatggaatatgagtcgagaacaggcaccaatcacaccagggcctgttatctcatttgagttagatgtgacaaggagtcctggagagagaggctgtccttaagctcagttgtccacctcacacagggctatgtgaccttcaaggatttatttgtttacttctcttaggaggaatgggagctgctggatgaggctcagagactcttctattatgaaataatggcttctgtgcttcgcatttatagtctccctgggtaaggccccagtatcccatttttctgggctgggtcctactcttcctttttgccctagggg

SEQ ID NO: 667120 - DNA, 798 bp, Homo sapiens
acagctccatcaatgcaatgggaacatgttgacattacatgtctttgtcacaaaatccactattaaaacatacatagcctaggtgtcacaaggtgctagaaaagtggaaggtgggaagtggtgattaaaaatattaaatgatttccagaattacattacaggaaactataatatatggatccagaaatcctggaagagaaacaggatgaaaggatgggtcctgggtgtgtctaacacagagctaaaataagaaactgttgagagagaagartacacttctctgtcccagcagctcctgggaagagatgtgtaggccttctactctggtgtggtccactcaccttgggctctgctttccatgatgtgccaccaatcttgctggattttctctacactcctgacctcctttgcccttcttctgtggccaggaacagagccctttcagttctcaggataagatttttttcagaaagatttccccataatagtgcccaaatagtgctgttttccaaagcactctcctcaacagaggtcacatctcttgctttgttggatgagtttagatagactagtgggatagtcgaatgaagaaatacagtagttttttttaggaagagggaaactgagggtcatggattttcataaatgaagggggcaatctagatatttagaaaatccctctttcagagactatgctaagctttctaaatattataatagatatattctttacagaaaaaagtgtggttttcatgacctgctacttcaaatgagataagaactatggcattctctaca

SEQ ID NO: 667121 - DNA, 1512 bp, Homo sapiens
tacagatccgctgatttcatctgatattttctgacctatgggtccttttctctgcctgaaacaaaatatctacttaatctttcttcttcggtcttcatcaagtacttcatcaagtactttaattcctaaattcaacgatgtgactcctttactctcctctgtagctaacagaattacacagaaaatcctgcaattaataatagccattaacacctttttacacctgtgtagagttctgtcatttattttatataaatatatatttcccactggttttaacccacagtgaacctgycttgaaatacagcctcccgaagacccctccaggttggccacactacctgggctcacttctacgggcccaccttgctgtgctcaggccaacacaccttcctgagcctactggcaactcagcttcccacatcacactgattacataattatgcctctggcaacttttattgtcatttgtaagtggctactattgaaggaagccacacatttttcctgaattttaggtcatttttgctctcccagacacagcttccatttggactaccaagaagtaattgtttacctccacaagtttccatcatgccatacactaatggccgactagttatgtaatcattaaacaaaatcctcaaagcttcaaggtatttcaaaaaaatatttttattataaagcgatggataacccttagctaagttatgagccaattcctattttgtaaagttgtgaattctattacacaatggttacctttcatgggagaaaagacagagcactattcgcgtccaaatgcagaaactggaagcaatgcaaactaccaaattgtcttcagctaaaacaaaaaccaaacatttcataattgagccaagaccctaatccaactcataacagtaaatcagtggcacagatggtagccatggcgaccttattttggctctatataatctacatgtcagatgtcgcacacgtgagatgggatgttagagtattaccaaaatagtgaacaatgggctcacttcagattcccagattccttgaccttaaatttaaactacccttttaaatccatctgaaaatattcaagacagcactcaggcttcctgatttatgctaacaatttgatcgtccttcccttcttttagcaaagctcaccacatttgaatacactgaacgtttaaccacctcaacacatttctgatcaaagcaagtgtgaaataatttctcccgctttgtacagcaaaattctttctgcaagtaagtaagaggagataatgcaattcaaaaggcctgaagactgggcttatattatagaagatgtatttgctaatataatcacatgaaattgtttcttttgttttcttaagcctcagctgggagacagtggcaactgaaacagtgttctcacattgtatcctgatcttcaagatgctttacaaatgaaattactttctgataatgaaatccactagactgtgggagagcctattaggagaagcccca

SEQ ID NO: 667122 - DNA, 607 bp, Homo sapiens
tagcatgggcccaggaattcgctcattccacaacctgtatcacactcctagtgtcaccaggagggaaccatgagctacagaggcagtaaccggcatgtgtaatcaatatgccagatggagttaaatttcatcaatgctatggctgcttttccattaattttgtcactaagattgtatttccttaaagtgacagccatttctatttatctgaagttaatggttttccctcgtcagcaaaggaactacatcagcatttctttttctttgcacttggtacaaaatagaatcccgtatccccagcatgaggcatttctaaagtccctctcactacagccatccatgtgtcttttgacaaatgaaggaatctcaaactcaaatacctagaagggaacagactttatatgcaatcacacaaccactttttttttttttttttttttttttttgagacagagtcttgttctgtcacccctggctggagtgcaacrgtgcgatctcggctcactgcaacctccacctcccgggttcacaccattctcctgcctcagcctcccgagtagctgggattacaagcgtgtaccaccatgccccagttaatttttttttt

SEQ ID NO: 667123 - DNA, 624 bp, Homo sapiens
ctgctgatggtgtggtcaggaaagaagcaggaaaagggtggggcacggtggtggctcacgcctgtaatcccagcactttgggaggccgaggcaggcgggtcacctgaggtcaggagttcaagaccacctggccaacatggtgaaaccctgtctctacaaaaataaaaaattagctaggcatgatggcgggcgcctgtagtcccagctactcgggaggctgagtcaagagaattgcttgaatccgggaggcgaaggttgcagtgagccgagatcacgccactgcactctagcctgggcaactgatcgagactctgtctcaaaaaaaaaaaaaaaaagcaggaaagtaatttgacaactaggagatctatgacaacacttcactcagctgtggaaaggtcttgggtgttagggtcacatttgacaattctgcctgtttgctgtgtggcactgatgcctggctgagcttctctgtgtctgtctcctcatcttttaaatgagagcgctttgtacactgggaagtgacctgtggatgtgagaggccctgttgctatgtgtcctcttcatcattgcttgcctattttactatatwtttttttttgagacggagtctcgttctattgccca

SEQ ID NO: 667124 - DNA, 809 bp, Homo sapiens
tggctcagtataagaaaagctttctgctgggcgcggtggctcacacctgtaatcccagcactttgggaggccgaggcgggtggatcacctgaggtcaggagttcgagaccagcctggccaacatggtgaaaccctgtctctactaaaaatacaaaacttagccaggtgtggtggcagacgcctgtaatcccagctactcgggaggctgaagcaggagaatcacttgaacccgggaagcggaggttgcagtgagccgagatcaatgccgttgcactccagcctgagtgacaagtgtaagactctgtctcaaaaaaaaaaaggaaaggaaagcttttctattaaaggaatgggacatttcaagttgcccctcagcaacaatttattgaactctgccaggcacaatctaggagtgacgaattcagcgatggctaaagcacagtccttagcttcaaaaaaatctgtctaggccaggtgtagtggcttatgcctgtaatcccagcactttgggaagccaagacaggaggatcacttgagctcaggagtttggaatcagcttaggcaacatagtgaggccccatctccacaaaaaaaatcaagatattagctgggtgtggtggtgtcacctatattcccagctatttgagaggctgaggtgggagggaggatggctcaaggccaggaggtcatggctgcagtgagccatgattgcaccactgcactccagcctgggtgacagagtgagactctgtctccaaaaaaaaaaaaamaaaaaaaaaaaaacacaaaaacaaacaaaaaacacctcattc

SEQ ID NO: 667125 - DNA, 1425 bp, Homo sapiens
cctggatcatgaaaaaattattataaaggacagtattgagacagttggtgaaatttgaatacggactatgtgttagattaatagtattgtaacaatgttaaatttcccaaatttgataattatatgatggttatgattaaaaaaatatttgttcataagagatgctcacatatttagggtaagggatcacaatgtttgcagcttaattctgaaacgcttcagtcaaacaaagaattggacagaaagagtgaaagcaaggtatactagaatttgtgaaaggaaaatattttgggtccccaaaatcactaaggaaaactcaagatgaaaaactgcttagggcaaacctgtctcctgttgccctgtttmtattcagtcactcctctgctcacggagatagatgcatatctgacttgcctcctttggaaaggtagaaactcaaaatgggaaactcaaaagaacgtaaccctttgtgtatcacctgtgacctggaagctcccaccgcacttagagccttcctgcctttgcttcaggttgtcctgcctttccaggccaaaccaatgtacttcttacatatattgattgatgtctcatgtctctctaaatgtataaaaccaagctgtgccccgaccaccttgggcacatgtcgtcaggactttctgaggctgtgtcatggctgtgtcctcaaccttggcaaaataaactttctaaattaactgagacctgtctcaaattttcggggttcacaaattcattatactatcgttgcaatgatttaattttttttcaaaataacaaacacataacaaaactaaatgcaatgtgtgatcccagattggatcttagcgcagaaaaattttatagtaggataactggcaaaatttgcagattagtttatagaattgtatcaatgttaatttcctgattgtaatacttttactgtagttatataacatgttgatatttgaggaagctagatgaagggcatatgggaattctttatactatttttgcaaattttttgtaaggctaaaattatttaaagttgggcagctagaagtcctaacacccagtccaggactttccactataccaacatcatggactctgtcagtgtgctatcttattaaatggttcttgaatttaaatggaaatatttatttatcatacaacactgaagggtagggagtgtggctataaatgctctcaatgacatctattagatgttattagactcttcataacatcagccaggtttcctttccattatggattctctaatgatgaaaaagagtgaggtgcttttccacatgatttaccactggttcccaaacttgtctgcatattagaatcacctggagatgggacccaggtaccagtattttttgtatctcttaggtgattccaatatgcagacaagcctggaaa

SEQ ID NO: 667126 - DNA, 627 bp, Homo sapiens
tggtttcaagtctgctccttctgcacttgacgtccttgccagtgtgatccagagctgctcacacgagcaagcgtcctcgagtcctagggatgctgttaacagggcagcgggtccagggagctggtcctgacgcaggggtcctgatgcagcgggtccagggagctcatgccttccagcgatgggaatgccaccggtccctgtagccaaggtgcagatgcacacgtcctggtcctgagcccctgctcggccctaggcagggcccccagttccctgcattccacccgccttgtctgggaggtggacgagccctccgtagccctgacattccaaactggcttttggcccctgcgatatcttgctgtgattcaagactctgtccacgggcaagaacaacaaggctgggacaatctcatctcaggcatctgtgggaggagacagctcccaagggcggtgatgccaggagaacattccaggcccaggaagagctgagagacagcagatgcccaagrcgagttgctggtgtgtggccagtgctgggagagcatggtgtcggcccggggagatgccgcagagaagcttccagaagcccaacatctgctgctggaggggagaatgaggcaatgaata

SEQ ID NO: 667127 - DNA, 589 bp, Homo sapiens
aactatttaaaatgcaaaggaaaatataaatttaaatcacctcttcgagtctctggtagatcaagaaaacaaaaataatctgaattattgatatagttaaattaatagatatatcaaactttgtaacttaaaagcaaaagatgtaccttttacagtgttcctggaacactcacaaacattgatcatatactagactgcaaaaacttcaagacattctaaaattaagaacctatgctggatatctctgatttcaaygtatgtttaaaatatatgttattaattacaagtttaattaatgaaagtctaaagaagaaaagtctacttagaagtaaaaacatcagcaatattactgtgtaatagatctgaacattaaaggggcatatatgcatatctgtacaccgaggcaaatttatagctacaggcattttccttttttgaaaaaagtaaatatgtaagttaaaaagttcacagtaagaaaagtgaatgtaaataagagataagaatagaaaataataggaaacaggaaaacagacttgagggttctttttgggaggtgattcttggttctttgaggaaaacaatatatatc

SEQ ID NO: 667128 - DNA, 1178 bp, Homo sapiens
cctttaatttttttaagaaatcatctgtcttgcaaatgttttctttatgtcacaacaggaaagcttttcagtgagttgagttgtatcttaaagggtaagctgaaagctttctaggcaatgatagtggtgaggagtgggtaagtggagaaaggtgagggaatagcacatttcaagcagagtgaaaacttgtgtgggtacatgagacttggactatttgaagaatagccaggtaggtgaacattctcaaagtagtaccttcatatatrttgggaatattgttttcaaattgtatcattgtactataaaactatacttgtattgattaaattaaattttatagatgaatgggtggcatttttctggctatgattttaataatataaatcgacttaaattacttaaaagcctattttttgttttacagttttaaaaattgtattatataaaattttaaatgtatagtacatgcttataacgaagttgttccctctctgcaaaaggaaaaaaaaaattccctacactccctagaagtaagaactgctaacagttctatgtgcccttccagacttttttcctgagttttaagaatacatatatgtgctagaaaaaacatggaaccagatatttcttaaattttaaaaaatagtgtatcatgctggatgcagtggcttacgcccgtaatcccagcactttgggaggccgaggtgggtggatcatgaggtcaggagatcgagaccatcctggctaacacggtgaaaccctgtctctattaaaaatacaaaaaattagccaggcgtggtggcacgtgcctgtagtcccagctacttgggaagctgaagcaggagaatcacttgaacctgggaggcagaggttgcagtgagccaagattgcaccactgcactccagcctgggtgacagagcaagactccatctcaaaaaatggccatactggcatttttaaaaatagattcaatgccatccccatcaagctaccaatgactttcttcacagaattggaaaaaactactttaaagttcatatggaaccaaaaaagagcccgcattgccaagtcaatcctaagccaaaagaacaaagctggaggcatcacgctacctgacttcaaactatactacaaggctacagtaaccaaaacagcatggtactggtaccaaaaacag

SEQ ID NO: 667129 - DNA, 3117 bp, Homo sapiens
atcattaatttgcaaaccacattgctatacttacttttaaagcaataaactatttttagagatttaataacagacaagctatacttcagaaaagaggcacagtactttgatattaaaagaaaaatgagagttaagaattctggaatattttatctagtctagggcatatgcgactagctttgcagcctttgagaaactttttattaagtcaaacacaggaaatgtaggttaagactgtggtcaccaatataaaataaaagggtactttttggtgtatattggttggagtttcaagcagtacctccctttatatctgtttggttgactttttccagtgattggtgaattgtgactgtcattgaccatttgcttctcattgtaagaatgtaaaggttaagttactatggctttttttggcttcaaacctatgttaataaatgaaatgaaagtcttgttgagctttattggcagagggaaataagttactttttagctgtcttagtttttcatttgtaaccgtatgacccagtatgccacaaatagcgtggccaactgctgcagagtaactaggatatctgaatgtgggacatgcattgttgacactaagctagctccaaaatgttatattttatagccttttgataagaagaagtgtttgtatttgtgcttgcatttgtttgctccgatgacatttagtttgtatgctgtcagtatggatgtatggtctagagtacactggaagcattaaccaggccaacctcctatttagtacccatctcctcctaggagtgaaaagcagtttatggacacaacaccatgtcagaaaatgttctagttctactcataggactcctcttgttatctgtttgtgaacaatatgcttaagtacttccctactttctcttacataaattggaggaaacattccagaaaaatgttggcagatgaaagcaaaaggtgcttataggaggcaggctggcagctgcagcccttgcaatggcctgacaggtagaggaaaagccagaaggcagtgtcagagaggcaaggtgagcagaggtggcagtggagggggctgctttggaaaggagcccacctgtaaggcctatgtgatttacttcagcatgaataactaagagtttggcagcagcaaaacaaaaccttaaagaaaagcactacgttgatattttttttaattctcagttgaacaattcatgatttcagccttgaaaatgaggaactccctcagtgtgtatagcatactttcactcttttgagatgtcttcttcctcatccctttagaacatggagctagatattccagggaaatcattaggcatagagactagagatagactactgattaagaaaagttttagagtcgatatttagtaaattatagataagtgacagatgttcattgagtattcagctatcaaggaacaaccagcatgccaggtattgtggctcactcctgtaatcccagcactttgggaggccgaggcaggaggatcacttgaagtcaggagttcgagaccaacctggccaacatggtgaaaccccgtctctactaaaaatagaaaaattacctgggcgtggtggtgcgcacctgtagtcccagctacttgggaagctgaggcaggagaatcacttgaacccgggaagtagaggttgcagtgagctgagattgtaccactgcactccagcctggtgacagagcatgactccatctcaaaaaaaaaaaaaaaaagarcaaccagttaaaattgtaataaaatgttatattcctcaaatacttgttctctttgggagaagataagattctctttggaagagcagggtggagacctgctcataataatcagattgccttatagtgcgtcccaaagtactctgtttttttgttgttgccataatactttgctataccaattagtgggcagggagtgggggagggaatgaaaaagtgtttattgagcatttacaatgtcctgttctaggtacttaatatgctttcacacatataattaatataataaccctgtgaagtagatgatgttataattttacagattaggaaactgatgtgcagtaaggttattatggaaattatctgaggatacgcagctattaagtgccttctccaggtatcaatacaggtctgaccctaaagccttttctctttctactttgctacggttaagtgggacttgattaggactttaacttttcttctatatcagaggttaattgtaattatcacatcccagttctaaacaacagcgaaccatgttattgacagtatcttttacataattaaatcttgtatagatggtcaaaattatttcattttctaatcaacaaatatttggtgaacactcatgcaaagtactattttgagcaggatccagaaaagccacaaactgttattcaaggagactgcaattaagtcgaagagaagaccaatgcataaaatagataatagcaataaaacacaatgtagggtatcagtgttgtagtcctggagaatcccagaagaaagggaagtcagtaaatactggagtaagtaagtaatgaaagattcataggaaatggaacttgaactggaactttatgtataaatggagtttattcatttaacaaatatgaatgcttattttctgtgtctattacatataaaacctagaagaacggctgtgctatggaaaggggtggatggctatattgatgaaaggggagcatagagccaatagacatcagtcattcaggatcacttctttttttttttttttttttttattgagacagagtcttgctctgtcacccaggctggggtgcagtgatgcaatttcagctcactgcaacctctgcctcccgggttcaagcatttctcctgcctcagcctcccaagtagctgggattacaggctcctgccaccatgcccggctaattttttgtatttttagtagacatagggtttcaccatgttggccaggctggtcttgaactcctgacttcaggtgatcctcccgcctcggcctcccaaagtgctgggattacaggcatgagccatcacttctctttccttaccttggagaatggtaggcagccagagaaacc

SEQ ID NO: 667130 - DNA, 528 bp, Homo sapiens
tgtaatctatagcgtgatgtagtacataattctggtaacatcggatgatgtcatggtagtatagagttaattcttagcacttctctttaaaayggtgctttgtgatgtgattccttgattattttgaaccattaatcaattctatcagcttaaaaaatagacacattgtgtacctgttaccactggtttctaaaatcaaagtttctcttaccatcttaaccttaccagtttaagctgggaaactattacttttataatgtgtttatattattatcattacatactctttgataaaggaaaacaatgggactatactaaattgtggcaactgtgattaaagataagtctgttttctaaacttttcctaagtgattatagtagagaatttcaagctataagtataccatcctttgcttctcctaaagctatgatctatagcaataaatactctgtattgatactacttaattttaatggatgtatactgaggctggaaacatattgtagcttagcatttagtgccttaat

SEQ ID NO: 667131 - DNA, 860 bp, Homo sapiens
gaggtggacctttctcacgtgtatcttgcctatactgaggagagtctgcgtcagtctttgatgaaactagaaagaccacgaacttcaaaggggaaagcaaggccaaagacagggagaaggtaaggactgtccttgaatctggtaaaacgaaggcattgaggtattctaattagatacatgtacaggaagttaaaatttatttagttaaaacatgatacatattttggctgatttattaaaaatcaaattcctggctgggcacagtggctcacgcctgtaatcccagcattttgggaggccgaggcaggtggatcatttgaggtcaggagtttgagaccagcctggctaacatagtgaaacgctgtctctactaaaaatacaaaagttaaccaggcatggtggcgcatgcctgtaatcccagctactggggaggctgaggcatgagaatcgcttgaacccaggagccggaggttgcagttagccgagatcatgagatcatgccactgaacttcagcctgggtgacagagcaagacttggtctcaaaaaaaaaaaaaaaaaatcaaattccttatgtattagaatttgagtaaataaaatctggccaaagaattaaggtcttccaacttcttaggctyctgagtaatagaatttatttttaattcactctgttatttccaaatgtataatgggtttaattccttaattcttagactaattcttcttatgaaatgctaattaatttgcctgtttggtctcccaaggtattgtattcagctggttagtttttctgtcaggtgccccaagaaccttgatttcctcagtcaccagctaaggagaacttccttggacatttccccct

SEQ ID NO: 667132 - DNA, 604 bp, Homo sapiens
atgggctaggcaaaattgcaataaatataatacattaaygtagcatttccataagtccctacatatgcatcaggtattgcctgagatgatttgtttctgatttcctctgaatccacttgcaccttttgagtacctcagaagagataatcaggaagttcaaatctggcaagcatgcagctcacttggcctggccacatgacctagtctagtcttggaaattatcacctgtcctatccttcactatctggcataatggggtgggctgccatcctcttgcatttactttaagttagcttcccgtagcctgaaaaggcgagcattaattgaacacttaccatggtcaaacgtgtcaaattttggcttgtttccagactatacaggccaccccatagtttctatataatgttaaatgtttgcatttcagtcttttaggaaagcattcatgattgctttttttcttctccaaacagaaagcgttctgcaaagcctgaaactgtaattgactctttactgcagtaaatgttacagacttaaagtcacaataaaaattagtgatattctcatgcctggacaaaatctttaattaaaacagtgaagacttctc

SEQ ID NO: 667133 - DNA, 644 bp, Homo sapiens
gaattccttgttacatacaaaactttagcagatactaccaaactgttttccaaggaggttaaataaatgtacaccacatcagtatattttaagtttcaactgtgtcacatttcactgaaacttgtattgtctgcctttttcactgtagctgttctggtgggtgtgtagttgcttgtattttcatttgtatttctatgttgatttataatgttgagcaacttttcacatgcctacttaccatttgaatatcattttgtgtgaaatgtctggtaaagatttttatcaattgrgggtaaggaggttacatcttttctttaccaacttttatgcatttggggaaaaaatgtcagatgtatatatcctattctttggaaatttttcaccccatttttactgtcacttctataaataaaatttattactatatctagttttcattttacttttactaaaagagattttggtgtaatgtttaagaatgttttacctacctcaagataattattaccctcttgtttcttctagaagcattaattaatttacctgtcacatatgtataatccattagaagtttattattttccatataaataaccaatttacctggcaccatttattgaatagatgctaggtttgtacagtcc

SEQ ID NO: 667134 - DNA, 644 bp, Homo sapiens
gaattccttgttacatacaaaactttagcagatactaccaaactgttttccaaggaggttaaataaatgtacaccacatcagtatattttaagtttcaactgtgtcacatttcactgaaacttgtattgtctgcctttttcactgtagctgttctggtgggtgtgtagttgcttgtattttcatttgtatttctatgttgatttataatgttgagcaacttttcacatgcctacttaccatttgaatatcattttgtgtgaaatgtctggtaaagatttttatcaattgagggtaaggaggttacatcttttctttaccaacttttatgcatttggggaaaaaatgtcagatgtatatatcctatwctttggaaatttttcaccccatttttactgtcacttctataaataaaatttattactatatctagttttcattttacttttactaaaagagattttggtgtaatgtttaagaatgttttacctacctcaagataattattaccctcttgtttcttctagaagcattaattaatttacctgtcacatatgtataatccattagaagtttattattttccatataaataaccaatttacctggcaccatttattgaatagatgctaggtttgtacagtcc

SEQ ID NO: 667135 - DNA, 1529 bp, Homo sapiens
atctcagatcaccataacagatataataataatgaaaaatttgaaacattccaagaattaccaaaaagtggcacagagacaccgacggttagacttgctcttagtgactaattcctcagtatctcacttaagtgaatgccctttcaagtaacacaaattttgtatttgagcactctgcttgtgttcttcatcaacaaatacattagtattttaaatgaaacaagcctgtaataaccccaagctttgccttggcagttctagctctgtaatgtatgtgtgtaatgtgtgtgtgtgtgtgtttaaacacaaagtatatggagatacgaagtatacctgccaagttagtatgaaaaacacaaaatttagattacacagttagctcagctttcattttctgctcctgctaagtcacagaatagaaaatgagagagggaaaaaggctttcttgctatttcaaattcaaaaccaacttcttaaagttagttaagaaaccattggctagtagagcacatttaatcccaacaccaacacaataattcactgctttaatattttcaatggttacttcattgcatgcataagctcagagacagaataactagagccatccatatatctgttactttcttccctttcagactctcttgcttttggtaataaaattctacatgccctccaggagtgtctaaacctgacagcagctccactatctattctggcaatgtctaacttcctgtctttcatttacaatataatactttaacaaaagaaagatagacaaaaagatttgttaattgaataatgtttttctatgaatttgtcaggcatttttttttgcgctgttagtaagttatttcattcttgaaattaccttgacggcagtagctcattaatcacactaatatttgcataagaaatctctcaattgtatatacgttaaatgacaatataagtagatccatatgacagatccatccgtttgatggatttgggaaattgggttttctaggatatcagttctctattttacttgrtaatgttcctggcagtgaagagctttaaatttggcatttgtcattgcctatcttggtccaaattatatcatgctaaatattatgaagaatactgcacaggggaaatcagcagtgggttattaccgtgtactagtgtctaatattagaactgctagccagatgcttcctgtggacttctagagagcagagagtgtggtgccactgagctccagaggcactgatgtgaagtacgcagaagataaatcatgcagtatattcatttcatttggcccatgtaactccactgacgtcactgtggatagataactggggtctgtaccaggcccctctcgcttctgcactctgaggccttcggaggtgctgcccatctagccaggccctgcagtaatttcacacactcctctaataaagtcctcgggggctgtcatgtattttcctctgtttgccctattatccctccctgcttgagtctcacagataattgatgatgcttca

SEQ ID NO: 667136 - DNA, 1161 bp, Homo sapiens
ccagcagaatgtggccacctaagtccctaatcctgtgggtctgctttcaagggggagcactatcagtcacacagtagatgctcagtagtcctggactgctcaatggagatagggggtgataatttcagtgtgatacctgtaagccatcctcggtaatcagtgtgaatcattcattggcatagcccatgtgatatcccctcaatgccaaacagtccttccccaccagaaaacttccttccatttgcccagttcataaatggttctaaatggctcataaaaagggatcacagaccaagttagattttctctctccttttttcttttgttctttctgtcatatctcttttgctgtatttaacatgtttcacatagatactagatgaaccatgtcttttttatagatgatataaaaatattttcaaagggccagctagaagatgaaccttgtcttttaatcatactggtctttcacccatcatgatgtgacttataaaaatgatgagacatgatgcttgtcttcagggagatagcagtccagtgagagacagaaatagttacagagcagtgggatgatggctgaaaagagcctgctcccttgggtttggaagtgctcagagcaggcgctcaattccactgtgaggtcacggtggattgaggagaagtggcaatgtttgcattgagtgctgaagccagtgggcctgaatttggtcacaaggcactgggggaagtcaatccaaagagccggaacgggatttgccaaaccactgaagatttttattcagggcaatggactggtccatcttgtttttagaaaaacgaggcttgacaatgtgcaagagggactggacggagcaagattcagacaataattcaggcaagaattactgccaaggaagaggagraaatggattttaggagccacaggatttgacaaccaattaggtttggggaagaagagagaacacaaagtctagactgactcctgggtttcagattcggggaacttagtaaatggtggtgccagtcattaaagtagagatttataagggaaaacagatttagaaaaaagtgatgagttcagttttggatgttgagcatgagaggcttgcaagacaagtacctagagatttatagctggcagtcatatatacaggtccttta

SEQ ID NO: 667137 - DNA, 610 bp, Homo sapiens
tttctctcatttttaaatatataacaagatcactctttttatttggaatttgtttttatttgtccctgtttttcttttcatagaattttctcattataatgaaggaagcggggcccctaaaaccactgtttggactcaacagtgacttcagccccagctttaaagacccaacttttttgtttgtttgttttttgagatagagtcttgctgtgtcacccaagctggaatgcaatggtgcaatctcggctcactgcaacccccgcctcccagattcaagtgattctcctgcctcagcctcccaagtagctgagattacaggcatgccccaccacacctggctaattttttgtatttttagtagagacggggtttcactacgttggccaggctggtcttgaactcctggcctcatgatycacccgcctcggcctcctaatgtgctgggattacaggcatgagccacaacactctgccaagacccaatttcttattcccagattaggcattgctccacagaaccttgctgaggccacaggggaaaagcagaagatgaactgatgctcaagagagttgtgttcctaagtattggcaaagatgtggagaaaatgga

SEQ ID NO: 667138 - DNA, 1373 bp, Homo sapiens
tcccaaaatggtctctggggttttctgattttaaaattcctttattttccactactttcatatagaatcttcatgcttatcttaatcccttttcatcacaactaagggattttgtgactcaaaggctattcctcattgtaatttataaagtgttacytttttattatttctcactaactttttaatactgtagttgtcatagaagagatgaaaattagagaaaagtgtataaaaaagtgaagatttcaggtgagctggcgtaggacctgtgtcacatcagctttattcatgaattgtaacgtccttttgaaaataagattcattttcatctttttttttcccaggtgctcttttgttaaaatattcaaaaaaatctgaactgtggacggcccaggaaactattgtctatttgggggactacttgactgtgaagaaaaaaggcagacaaagaaatgctttttgggttcatcatcttcatcaagaagaaattctggggaggtattacttaaaaacatttgtataactaatgtaagatgagctaaccttgctcttctgttaagtaatcactcatgagacttcgtaggggctgaaaaacttggccaaaatatatttccagatttctactcctttttcttttcattattaattaattaacaacagttactatatattgaggacccacgttacatcagctgttttgctggatgttttagctacaggacctcaaaaccatcagggaaacattggccatactgtactgataagaaaaataaagttcctggccacatgacaggccagagagccttcaatattcactaaaaatgctggcaaaaaaaggtaaattatgaaaagcacacttttaagtaaataggtgagcctgaaaaaaggcaggaaaatcctgagtccagggatgaagcctgttcagggatataagtgattgctgaaccctttagggatcccgcataggcgtttgaggcaggggtggagtgagggtgcagcccgtagcaaaagctacacccagaagggaatgagttcagataccactcatacaagcaaagactcaggaatggctacatccccacgataaagggtatctttgaaaaccccaccccagtgaagtaaatgcctggaaagtttttgctttggccttagttcttaataaaaattttaaacaaaaactcacctgaaaaattagtaaccacaggtggtcttcattggatttaagacataattttttatcatttgtatattttaaaagacctataagccatgacttttcatttaaagttggccttgttatttgctcaaatccaaatagtgtaagaaataaatagaaatagagaaatcaagtgtctctgtaagcagtggaagta

SEQ ID NO: 667139 - DNA, 1373 bp, Homo sapiens
tcccaaaatggtctctggggttttctgattttaaaattcctttattttccactactttcatatagaatcttcatgcttatcttaatcccttttcatcacaactaagggattttgtgactcaaaggctattcctcattgtaatttataaagtgttacttttttattatttctcactaactttttaatactgtagttgtcatagaagagatgaaaattagagaaaagtgtataaaaaagtgaagatttcaggtgagctggcgtaggacctgtgtcacatcagctttattcatgaattgtaacgtccttttgaaaataagattcattttcatctttttttttcccaggtgctcttttgttaaaatattcaaaaaaatctgaactgtggacggcccaggaaactattgtctatttgggggactacttgactgtgaagaaaaaaggcagacaaagaaatgctttttgggttcatcatcttcatcaagaagaaattctggggaggtattacttaaaaacatttgtataactaatgtaagatgagctaaccttgctcttctgttaagtaatcactcatgagacttcgtaggggctgaaaaacttggccaaaatatatttccagatttctactcctttttcttttcattattaattaattaacaacagttactatatattgaggacccacgttacatcagctgttttgctggatgttttagctacaggacctcaaaaccatcagggaaacattggccatactgtactgataagaaaaataaagttcctggccacatgacaggccagagagccttcaatattcactaaaaatgctggcaaaaaaaggtaaattatgaaaagcacacttttaagtaaataggtgagcctgaaaaaaggcaggaaaatcctgagtccagggatgaagcctgttcagggatataagtgattgctgaaccctttagggatcccgcataggcgtttgaggcaggggtggagtgagggtgcagcccrtagcaaaagctacacccagaagggaatgagttcagataccactcatacaagcaaagactcaggaatggctacatccccacgataaagggtatctttgaaaaccccaccccagtgaagtaaatgcctggaaagtttttgctttggccttagttcttaataaaaattttaaacaaaaactcacctgaaaaattagtaaccacaggtggtcttcattggatttaagacataattttttatcatttgtatattttaaaagacctataagccatgacttttcatttaaagttggccttgttatttgctcaaatccaaatagtgtaagaaataaatagaaatagagaaatcaagtgtctctgtaagcagtggaagta

SEQ ID NO: 667140 - DNA, 655 bp, Homo sapiens
aggaagtagtcaaaggagagaagaactgtgcttccaagcatgttcttagatttttccctctacagatatggcccctaaggctctccatctatcttagaacattctccatgcgtatcatttagcagcagaaataccatcagcaatatacaatagggaaataatctcartaagaaagaggacatcggcagtccagagactaagaccatgagatataagatacatttagataaaacatgcttgcaaaaagaaataaagacctttgtatgcaacaccaattatccttttcttcagacccttttgacatccctgttccaggtttccatgtgttcagaccaaattcacacagatgtaactggatgctgcctcgtcttcagccccttcccttcccctctggcttcccacccaagggcggccttgctggtgataccacagggctccattcagctcctatgcccagcatgcacaacctggtggtatgggggagttattacatcatggggtaaagcttactaattgctaagaaggcctagtagatcaattatttttgttttttgccttcggtattagtctgttctcatgctgccaataaagacatacacaagactgggtaatttataaagaataaaaggtttaatggactcacaattccacatgg

SEQ ID NO: 667141 - DNA, 863 bp, Homo sapiens
tatctaatgataattcgacaaatattacttcgctcctagaatatctcaaataatctgctatagtctggatttctgtccacaaaatgaggattaaaaaatttatataatacaaaatgttagctaactaatcttaagaatttccctctcaacttctgaaacaatgatatatctaggtggaatgaactttactaatctgaggtaatagaactaagaggaataaaatgtaattgaatatcaactctaaaccccaaaaatcttgttaaagaggtaattcccttggagagtcttcagagaccccataagacaataaaactagaatgactgcaaaccaagattctactgaaaacaaatgctttaaaaataggtgctataatttgaatgtttatgtctgttccaaaatttacatgttgaaacttattgtgaaaatggcttyattgcccaaagtaatttatagattcaattatatccatcaagctactactgacttttctcacagaattagaaaaatctactttaaatttcatatggaaccaaaaaagagcctgtatagccaagacaatcctaagcaaaaagaacaaaactggagataccatgctacctgacttcaaactatactacaaggatacagtaaccaaaacagcaaggtactggtatcaaagcagatatataaaccaatggaacagaacagaggcctcagaaataacaccacacatctacaaacatctagtcattgacaaacctgacaaaaagcaagaaatggggaaaggattccctatttaataaatggtgctgggaaaactggctggccatatgtagaaaggtgaaactggaccctccttacaccttatacaaaaattaactca

SEQ ID NO: 667142 - DNA, 600 bp, Homo sapiens
taatgcctagaaaatgctgagtttgaaagaatcaaaactatatacagtgctcacatttactattttactcatccagtagtttttcttttcgatttctaggcttcactatttttctgaaattccacaggtaaaactagagtgctgggaaatggagacggaaaattaatgaaaaagtactccccttgtgagctatttcatttctaaatgatctaaaaattctctgtcctcaagggtatcagaagctgagtgaagtcttaagggtatcagtaggcattcaaatgagaatatgtatatagggatatccatatatatttgctacataaatattatttgatgattaaatttgttttgctttctttacatctgtagttttagaagacactattatcttggtctttaggaatataaataaataaaaaactaagaggcctcagtgtcctcagaattcctaggactaatgttaagggaaagagaatgtcagaattcaaaatgaggttctttagcacataatcgtttaggytaaaacttcacctaataactttatctctacacactttataattttactaagtatttacataatattgggtatatatcaca

SEQ ID NO: 667143 - DNA, 600 bp, Homo sapiens
tctgtcacagggttattatgaggaatgaataaattaatatttttaaagtatttagaacagtacctggcacacagtaagtacagtaaataaaatgtgtttaataaataatctgaaaaatatgaatttgattacataaaataaaattactttatttaaagattgtgtctcctgctaggcacggtgcctcacgcctataatcccagcacttcgggaggccaaggctggtggatcacttgagcccaggagttcgagaccagcctaggcaacatggcaaaaaccctctctacagaaaaatagctgggcatggtggtgtgcacctgtggtcccagctacttgggaggctgaggtgggagggtcgcttgagcccaggatgtggaggctgcagtgagctgagatcatgccactgcactccagcctgggcaacagagcaagaccctgccaagagaaaaaaaagactgtgtcttttcacattccaccaatatactgatagcatctgtctctctgcattctcaatagcatcaaatattattacagtgggggaaaaacctttsataatcttgttggcaaaaatgcgtatttttttgattactagtgagttta

SEQ ID NO: 667144 - DNA, 630 bp, Homo sapiens
tgatggtaatttcttcatcagtgtgacttctagaaactttatctcaattatgatatatattacaattatcttatataaaataatattagtaagcatgcactgactgtgtggaaaattactcctgaaagccagattttgtctctgggtaaccacttgctgtgtctttattctgaataagaatcaacagtatgatccataaagccaacctaatactctttatttagataaatgttaaaatacctttacaccctctataaggttaaattgatcatttgctatccagaccccaaattatgcaatcttttaacaattgtcaacatttcttctctaggttgtactaaaattttctctttattttgagttccgaagagccaaattggatagagtgctcaccattgcttctatgctgccattaggttaatatatcccaaaggaactcacatcaaaagtgctatttcattgacctrttttccaccatgggtctctaaaatgctgtaaacatgcaacatacaattatgtataattaatttatcttatatactttgtttatctttgtcagacattttgctttgtaactgttctatagaatgtccttctcttcattttttatgtacatgatggtgaagtttt

SEQ ID NO: 667145 - DNA, 1281 bp, Homo sapiens
caaaattttatgtaagaatatccttccgatataatgtactttatacatttcccaagctagaagctaacagatgaacaaggagaataaatatattaagtaggaaataaatttgggaagctgcttgctacccagatttattatgacttacttcccaggtcatttattattacttgaaaaagcataataagtgttagctcattataggctctgagatgtcctcaaaaagacatctgttaaatttgcttaaacctattttaaacaatacaacactttttttagtggaatagatactaatatctcccagaatgttctttaaatatcagtttagaaaacaatgtgttaatgacaaaaatatatttttgaaaaacatatgtttatgtaaaatggaagtaaatacaccagattatttactttttatttttatttttttatttttttgagacggagtctcgctctgtcgcccaggctggagtgcagtggcgcaatcttggctcactgcaagctctgcctgcagggttcacgccattctcctgcctcagtctcccgagtagctgggactacaggtgcccaccaccacgcctggctaatttttttttttgtatttttagtagagacagggtttcaccatgttagccaggatggtctcgatctcctgacctcgtgatctgccctcttcggcctcccaaaatgctgggattacaggcgtgagccaccgtgcctggccaatacaccaaataatttaaaatgatcactgaatagaattgttttatgcttgtatgtaactcctgaattttcctcaacaagaatttcaatagaaatgcaatgcttttgttataaaaatatatagcaagtaaaaaatatagaaaataaatttggctataaaacttagtcattagaagacataaaatggaaccatccttctgatggaattcatgccataatttttttctattatagaattttggattaggcatttattttaagatgtggcaagagatattttgaccaaatttttagtgatatacatgagttagtttctcctgaactgtaaattagttcaaatagaccaaaaaatggaaagagttatcttgagtcwaagaagagtgaaaatagttgttttctgttcattttgttttaatcaaagtttgaatacaactcttgttatttgtattaactccaatcaaatgaaaaatggggcaggtaggctagttgctgttgatggttgaagggtatgggtgtgtgcatgtgtatgtgtgtttaaactttgtaacttctacttca

SEQ ID NO: 667146 - DNA, 1281 bp, Homo sapiens
caaaattttatgtaagaatatccttccgatataatgtactttatacatttcccaagctagaagctaacagatgaacaaggagaataaatatattaagtaggaaataaatttgggaagctgcttgctacccagatttattatgacttacttcccaggtcatttattattacttgaaaaagcataataagtgttagctcattataggctctgagatgtcctcaaaaagacatctgttaaatttgcttaaacctattttaaacaatacaacactttttttagtggaatagatactaatatctcccagaatgttctttaaatatcagtttagaaaacaatgtgttaatgacaaaaatatatttttgaaaaacatatgtttatgtaaaatggaagtaaatacaccagattatttactttttatttttatttttttatttttttgagacggagtctcgctctgtcgcccaggctggagtgcagtggcgcaatcttggctcactgcaagctctgcctgcagggttcacgccattctcctgcctcagtctcccgagtagctgggactacaggtgcccaccaccacgcctggctaatttttttttttgtatttttagtagagacagggtttcaccatgttagccaggatggtctcgatctcctgacctcgtgatctgccctcttcggcctcccaaaatgctgggattacaggcgtgagccaccgtgcctggccaatacaccaaataatttaaaatgatcactgaatagaattgttttatgcttgtatgtaactcctgaattttcctcaacaagaatttcaatagaaatgcaatgcttttgttataaaaatatatagcaagtaaaaaatatagaaaataaatttggctataaaacttagtcattagaagacataaaatggaaccatccttctgatggaattcatgccataatttttttctattatagaattttggattaggcatttattttaagatgtggcaagagatattttgaccaaatttttagtgatatacatgagttagtttctcctgaactgtaaattagttcaaatagaccaaaaaatggaaagagttatcttgagtctaagaagagtgaaaatagttgttttctgttcattttgttttaatcaaagtttgaatacaactcttgttayttgtattaactccaatcaaatgaaaaatggggcaggtaggctagttgctgttgatggttgaagggtatgggtgtgtgcatgtgtatgtgtgtttaaactttgtaacttctacttca

SEQ ID NO: 667147 - DNA, 1281 bp, Homo sapiens
caaaattttatgtaagaatatccttccgatataatgtactttatacatttcccaagctagaagctaacagatgaacaaggagaataaatatattaagtaggaaataaatttgggaagctgcttgctacccagatttattatgacttacttcccaggtcatttattattacttgaaaaagcataataagtgttagctcattataggctctgagatgtcctcaaaaagacatctgttaaatttgcttaaacctattttaaacaatacaacactttttttagtggaatagatactaatatctcccagaatgttctttaaatatcagtttagaaaacaatgtgttaatgacaaaaatatatttttgaaaaacatatgtttatgtaaaatggaagtaaatacaccagattatttactttttatttttatttttttatttttttgagacggagtctcgctctgtcgcccaggctggagtgcagtggcgcaatcttggctcactgcaagctctgcctgcagggttcacgccattctcctgcctcagtctcccgagtagctgggactacaggtgcccaccaccacgcctggctaatttttttttttgtatttttagtagagacagggtttcaccatgttagccaggatggtctcgatctcctgacctcgtgatctgccctcttcggcctcccaaaatgctgggattacaggcgtgagccaccgtgcctggccaatacaccaaataatttaaaatgatcactgaatagaattgttttatgcttgtatgtaactcctgaattttcctcaacaagaatttcaatagaaatgcaatgcttttgttataaaaatatatagcaagtaaaaaatatagaaaataaatttggctataaaacttagtcattagaagacataaaatggaaccatccttctgatggaattcatgccataatttttttctattatagaattttggattaggcatttattttaagatgtggcaagagatattttgaccaaatttttagtgatatacatgagttagtttctcctgaactgtaaattagttcaaatagaccaaaaaatggaaagagttatcttgagtctaagaagagtgaaaatagttgttttctgttcattttgttttaatcaaagtttgaatacaactcttgttatttgtattaactycaatcaaatgaaaaatggggcaggtaggctagttgctgttgatggttgaagggtatgggtgtgtgcatgtgtatgtgtgtttaaactttgtaacttctacttca

SEQ ID NO: 667148 - DNA, 652 bp, Homo sapiens
atttttwaaaatacagtgggacttcaagttaatattcgcacttaaaagacctaggtaaggccaggtgcagctttactatttatgcctgtagtaaagcttcaaagccgaaaatgttattaagtgtaagctaacttctcttttttacatattcaattaacatgtattgaatagttattgacaatgtaagtttgcagttactcaattttaattagagtattaaaatgggtactctctgagggacaaatagtggtgtttattatctctaaatttgagatttcaacttattatgccttaaattttgtcttccctaatatttgtgtatattttcaataatatctattcttccttataggagaattaatcctataaaaagattcctttataatgtagatgcataaagagcaatacttattatatattgtcattttcctaaaagtaataatttttgaaaagtatattatatatagtttaatgacaatatatagaacataagatagtggatgaatttctaccacaaaatatgttgcaggtacaaaccaatgaataaaaattactgtcactgaacaacaacaaccaaaagctttctaaaatatttaagaccttggatatttttttctaatcccttggtgccttttaacaagtgaaactattt

SEQ ID NO: 667149 - DNA, 652 bp, Homo sapiens
atttttaaaaatacagtgggacttcaagttaatattcgcacttaaaagacctaggtaaggccaggtgcagctttactatttatgcctgtagtaaagcttcaaagccgaaaatgttattaagtgtaagctaacttctcttttttacatattcaattaacatgtattgaatagttattgacaatgtaagtttgcagttactcaattttaattagagtattaaaatgggtactctctgagggacaaatagtggtgtttattatctctaaatttgagatttcaacttattatgccttaaattttgtcttccctaatatttgtgtatattttcaataatatctattcttccttataggagaattaatcctataaaaagattcctttataatgtagatgcataaaragcaatacttattatatattgtcattttcctaaaagtaataatttttgaaaagtatattatatatagtttaatgacaatatatagaacataagatagtggatgaatttctaccacaaaatatgttgcaggtacaaaccaatgaataaaaattactgtcactgaacaacaacaaccaaaagctttctaaaatatttaagaccttggatatttttttctaatcccttggtgccttttaacaagtgaaactattt

SEQ ID NO: 667150 - DNA, 1207 bp, Homo sapiens
tactattaattatctagtttgatacaagtacttttagatacataataaaacattatctttactatgaaagttcatggtcattacccacaagttttgttttattttcactttttgaaagctgagactcagagataccaatgaactctccaagtttacgtagctggtttraaggagatctcactgaaatccatagttggactctaaaaattatgctctttctgcagtgacatgcatagtcttcctggattacagaaaacataaaatgtgcatgatcaagtaagttacatgttagcagggaggagagataagtaagtagctataaagcagtgaaggaaatgttatgttggtgggtatattttaatgctccattgattatattgacacagtaggtgactcggttgttcacaactttacacacagttttctttcttggtcataccccaagccactttctataatttgtagaaagcatgtgttcagaaaagctgcttaacaaaatagttgtgtaccataggtgaaggaagcataatgagatcatctttgatacttgcagctaatataaatttaaaagagatgtaagcatttataactctctttaaatgtgcggcaatagttagcatagaagttatttgtgaacaaagaacccacaattaactgaacactaaactcgactttgtaatacttgaaaataaaaataattgtattttagtaaagcattttatactatcttaacattcagtttctgttccctttttaaatgttcagtctttccactgggagacattacaaaatgaatttagtaacagtaactaacacttaccgtagttcttactgtgtaggatcttatttaatacaacaaccctaggaggaggctaatattattatccccattgtacggagcattttagtcagggttctctagaggaacagaactattaaaaataggatatatgtatatatgaaaggaagttttttaaggagaattgactcacaggatcatgaggtgaagtcccatgataggccatctgcaagttgaggggcaaggaaaccagtaatggatcaatctgagtcccaaaacctcaaaagtagggaagctgatagtgcagccttcattctgtggccaaaggcctgagagcccctatcaaactactggtgtaagtccaagagtccaaaagctgaagaacttggagtctgatgttggagggca

SEQ ID NO: 667151 - DNA, 1734 bp, Homo sapiens
tgtacagaatttatataataagtaattcttagtggaagcctgtttcattcccaactcgacctttcagagcacacaacaaccatatttcaaaaattcctcttctattagtgacaagagccatcttaacttccactagctcaattcctcatttccattctactgggagccatagaaattacctaaatacaagaaatttagtggttgagttgtaaaaactcagaaagggtttcataaatacttatatacatgatctctacatttgaaatatgcctaatttaaatagttatacagaactgtgtctgtgcatatgcagatatatatgtgtatatatatgtgtgtatatatatatatctccagtatgtagatatagatatacatgtatgtacttgtatgtgttcgtgtgtgtacttgagacacttttttgcaatgattagactttttattgaaagttactataaaatttgaagaacaaaaagaacaaaagtttactaacattcaggagtcttttctgaaaaccatatatgaattatatcactgacattataggtttcctctcagtatgggtactatggactgaatgtttgtattcctctaaaattcctatgtgaaacctaatccccaatgtgacagtattaggaggtggggtctttgggaggtaattaggtattgagggtgaagctttggtgaatgggattagtgacccttaaaaaaaaaaaaaaaaggcaagagagagcttgcttctctctgctctcagccatgtcaggatacaagaaggtggccatgtgcaaaccagggagtgggctctcagcaggwataagatcttccgcattaggaataagatcaacttgattctggattttctagcctgcagaactgtgaaaaataaatttttggtaaacttaagccacctaatctctaatatatttgttatagcagcccaaaccaaccaagacgggtcgattacctttatcctctatggccacactaaacttctggttaattttctggccagtgcatatttttgtttatccaacaccaggtgaaaaggtgagaatacatgggtaaaatgctattacccattaccactgccggtaacacaaggcaaaaattacgtctccatttcttagtgtgtctgtggtaccttctatttttgcaaaggctattgtatcattctaattaagaaaggttatctttatgagacccaaagttgtcttaatatggtgcgaaagatgaaccaccctactgtatgaactttatacaaaataacagattgtgccatgtggggacaagtggctcaaataataaattagacttggtaagactatgagggcatttaatttaaaatgttttttaagaatatagacagtctgtcagggagcagaaattaacactggaagacttggtgagttttgttcaaggccaaatgaagaatggagtaaaacaaattgtccagcttcctgtgcatgtttctatcccagtgctacaaaccctttttgttcgtgtctgttctttgattagtgagtagctccttcccctttatctgccttcatacactctacagtgaaatgggaagtatttgaatcagtaatgtgacaccagtacaaacaggtgtgtgtcatagtttgaagggcaaatctttctaaaaggcaagacgctttaaaaactcagtaacttttgtcttactgcatatatagaaaccagtgtaaaacacggtattttactttcctatttttt

SEQ ID NO: 667152 - DNA, 611 bp, Homo sapiens
tttctacataagactaaaggttacaaatggcaaagctgcaagcccataatgagataaacaacaaagctgagaataaattctcaatarctgctccttagaagtatgtctcatacctatcttagcaaccttacatacagtcctgctgttatgtttcattttctatgctctttcatgaggtacccctgcacctgtttaaatatgtctgaagtagctgttaaaaagaaaaaccaaagtaaatggcagatgtccacataatttattcatccctgaaagcctggctatacgggaacaaatgcttgcagatgaatactcagaggtgaccaagaagaccaagctggtgacaatcgttttacacaataacacctaccaaaaccactcacagatacttgaattaggccaaatgaacaataaatgaggtttgaattttaagcctgcaaaccacattctccctcttcatttgctcgtaatcactaagagcttatttccaacctgcctttcttctctccagctaagatgcatttgtcctgtaattaattttttaaagccaatgttagcctggttttcctaagattaatgttaattataaaccaacaatggtctgccaaatttta

SEQ ID NO: 667153 - DNA, 610 bp, Homo sapiens
caatttccaatgaggataaatcagcagagaaaagacaacactggcagccttaaagagaaaagcagtaaaaataagattatttcattgccatttttttaaagagatgggttctcactgtgttgaccaggctacaatgcagcagctattcacaggcacaatcatagtgcactacaaccccaaacttttgagactcaggcaatcttcctgcctcagccttcagagtagctgggactatagtcattgccattttagaaaccattttcattcactgcaactttcaccaaatatttattgagtgctcaccatgtgctagccactgtttggtatgctgacaatacatgtcagtgacccaaacaatgttcctcatctcatagaactcacatctactggagaaagcagacaataaaaattgtttaagaaaagcagaaacactttgccaagggttgataaactatgcaattcccatcaaaataccaccatcattcttyacagaattaggaaaaacaattttaaaattcatatgaaaacaaaaaagaacccacagagccaaagcaaaactaagcacaaagaacaaattgggcagaatcacattacctgactttatactaga

SEQ ID NO: 667154 - DNA, 602 bp, Homo sapiens
ttgggtctgagtttcagaatttctactcacttttaagcaagaataatcttccttccctgtcttctgctaagggagataagatatttattaatgtttcccaatatgatttctttccctgccaggcagccaacaaactgacttgctgtggcaaaagaaagtttggaggacgattgagacgggtgtgctctgggaagcaagcacagaccctcctagcatttttcctcttttcccaacggcaaggtcaagatttgcttgcctgccaaggtagtgggtcctgatcttctgagctgtctgtccctctgattttttgttctccaggctcaggaattcctataggattgcagaggcaccttcaacctgataattttatattctcaggctcctcmtgggttagactggggaagccagggcacccactaggatcggccggcagcggtggcaccttaggcatgacagccaagcagagggctgcatgagtagaggtgggagaggtgggagaggctgcagtcacttcccaggtactgtctggtgcactgatttccccggaggagccctgagagggcagtgcaggcaggaccggagggtagtttctgcagcacggc

SEQ ID NO: 667155 - DNA, 602 bp, Homo sapiens
ttgggtctgagtttcagaatttctactcacttttaagcaagaataatcttccttccctgtcttctgctaagggagataagatatttattaatgtttcccaatatgatttctttccctgccaggcagccaacaaactgacttgctgtggcaaaagaaagtttggaggacgattgagacgggtgtgctctgggaagcaagcacagaccctcctagcatttttcctcttttcccaacggcaaggtcaagatttgcttgcctgccaaggtagtgggtcctgatcttctgagctgtctgtccctctgattttttgttctccaggctcaggaattcctataggattgcagaggcaccttcaacctgataattttatattctcaggctcctcctgggttagactggggaagccagggcacccactaggatcggccggcagcggtggcaccttaggcatgacagccaagcagagggctgcatgagtagaggtgggagaggtgggagaggctgcagtcacttcccaggtactgtctggtgcactgatttcccyggaggagccctgagagggcagtgcaggcaggaccggagggtagtttctgcagcacggc

SEQ ID NO: 667156 - DNA, 602 bp, Homo sapiens
ttgggtctgagtttcagaatttctactcacttttaagcaagaataatcttccttccctgtcttctgctaagggagataagatatttattaatgtttcccaatatgatttctttccctgccaggcagccaacaaactgacttgctgtggcaaaagaaagtttggaggacgattgagacgggtgtgctctgggaagcaagcacagaccctcctagcatttttcctcttttcccaacggcaaggtcaagatttgcttgcctgccaaggtagtgggtcctgatcttctgagctgtctgtccctctgattttttgttctccaggctcaggaattcctataggattgcagaggcaccttcaacctgataattttatattctcaggctcctcctgggttagactggggaagccagggcacccactaggatcggccggcagcggtggcaccttaggcatgacagccaagcagagggctgcatgagtagaggtgggagaggtgggagaggctgcagtcacttcccaggtactgtctggtgcactgatttccccggaggagccctgagagrgcagtgcaggcaggaccggagggtagtttctgcagcacggc

SEQ ID NO: 667157 - DNA, 1878 bp, Homo sapiens
gggagagaaggaaggagggaaggagtgaggaaggaaggaagaagggagagaggggagggagggaagacaaaaagaaggaaggaaggaaggaaggaaagtaaggagaacaattaatgaagaagcagaagtcattttacagctgactttggtggagtagatacattccattaaagtgtggcataattgaatgtctctggattcatagacccttttatcccattggaaaagagatggctagcacattcacactgcagttttagtgactgatactatgtgttcgccccatcagagctatttataattacctagggattcttggagtcatgtgttaggaagaaatcagacttgtgtgagaattccaggcactagtgagtgctggggccagtggggaaaatttcccccaggctgtgtgttcaatctygtcttctaagccacaggaaactgaggaacaatagaaagaggaaaatggacaagctccaattcaagagtttctatttttgtgcttaattggtatatttctgaaagatggcttaggagggagataagctgtgtgggccagataggagagaataagacctagttctagtctcacagccctcacatagttggcattattttcagccagagtcatggttgtaggctgaggcaatggcagaggttagatgggaaagtgtccttagtccctcattatttccattggcttttccctccccactctttaacatgcacaaatgaagttttaatgttaagcataaacaaaagcagctttagaaaacatcatgctgagtaaaaacctttgcttgctttgccaacacagcctcaaagcaaaatccctacttcctcccccttcaaccaaagggttccccacaaaccccagggttccccacaaaccccatttatatagacattatgaagctgtcacaggcaggaaagagccaacttcattgactccaagggaagaaagttgtccctagagtggcttgtgagggtgggaggggggagaggggagagggagggtagtggtaattgccctactccctagtggacttggtgtggttcattctttactcagcagaaactatagtctgaatttccctcattattaaattttacacagcagggacctctcctgtgccccaagatgtccaggatcttctcagagcaacctgtgaaaagtgctggcaagatctcagttcttccccgaaagcaaagtgtgactgaaaccaaggctcactgtgtgctgagttacttgcaagggttgcagacccagatttgttccaacgccggtggtgtggaatctggaatcaatttttttttatttttaaattttatttatttatttattatttatttttgagacggagtctcgttctgttacccaggctggagtgcagtgacacgatcttagctcactgcaacctccacctcccagatacaagtgattcttgtgcctcagcctccctagtagctgggattacaggtgtgcatcattatgctcggctaatttttatatttttagtagagacaggatttcaccatgttggcctggctggtctcaaactcttgacctcaggtgatccacccgccttgatctcccaaagtgctgggattacaagcgtgagccactgtgcccagccaatattttttttaaagtgtggttaaaggagtagcatcctcaacaacacttggaatgcttgttaaaaacccaaattcctgaattctaccccagacctagtgagtctgagtgggagtggtggtgagggaccaggaatctgcatataaaacaagctccccacgtgattctgatgtccagtcaagtttgaggaacactctgggagtggaggataaactgtgtgcttttaagggccctgaggacag

SEQ ID NO: 667158 - DNA, 1878 bp, Homo sapiens
gggagagaaggaaggagggaaggagtgaggaaggaaggaagaagggagagaggggagggagggaagacaaaaagaaggaaggaaggaaggaaggaaagtaaggagaacaattaatgaagaagcagaagtcattttacagctgactttggtggagtagatacattccattaaagtgtggcataattgaatgtctctggattcatagacccttttatcccattggaaaagagatggctagcacattcacactgcagttttagtgactgatactatgtgttcgccccatcagagctatttataattacctagggattcttggagtcatgtgttaggaagaaatcagacttgtgtgagaattccaggcactagtgagtgctggggccagtggggaaaatttcccccaggctgtgtgttcaatctcgtcttctaagccacaggaaactgaggaacaatagaaagaggaaaatggacaagctccaattcaagagtttctatttttgtgcttaattggtatatttctgaaagatggcttaggagggagataagctgtgtgggccagataggagagaataagacctagttctagtctcacagccctcacatagttggcattattttcagccagagtcatggttgtaggctgaggcaatggcagaggttagatgggaaagtgtccttagtccctcattatttccattggcttttccctccccactctttaacatgcacaaatgaagttttaatgttaagcataaacaaaagcagctttagaaaacatcatgctgagtaaaaacctttgcttgctttgccaacacagcctcaaagcaaaatccctacttcctcccccttcaaccaaagggttccccacaaaccccagggttccccacaaaccccatttatatagacattatgaagctgtcacaggcaggaaagagccaacttcattgactccaagggaagaaagttgtccctagagtggcttgtgagggtgggaggggggagaggggagagggagggtagtggtaattgccctactccctagtggacttggtgtggttcattctttactcagcagaaactatagtctgaatttccctcattattaaattttacacagcagggacctctcctgtgccccaagatgtccaggatcttctcagagcaacctgtgaaaagtgctggcaagatctcagttcttcccmgaaagcaaagtgtgactgaaaccaaggctcactgtgtgctgagttacttgcaagggttgcagacccagatttgttccaacgccggtggtgtggaatctggaatcaatttttttttatttttaaattttatttatttatttattatttatttttgagacggagtctcgttctgttacccaggctggagtgcagtgacacgatcttagctcactgcaacctccacctcccagatacaagtgattcttgtgcctcagcctccctagtagctgggattacaggtgtgcatcattatgctcggctaatttttatatttttagtagagacaggatttcaccatgttggcctggctggtctcaaactcttgacctcaggtgatccacccgccttgatctcccaaagtgctgggattacaagcgtgagccactgtgcccagccaatattttttttaaagtgtggttaaaggagtagcatcctcaacaacacttggaatgcttgttaaaaacccaaattcctgaattctaccccagacctagtgagtctgagtgggagtggtggtgagggaccaggaatctgcatataaaacaagctccccacgtgattctgatgtccagtcaagtttgaggaacactctgggagtggaggataaactgtgtgcttttaagggccctgaggacag

SEQ ID NO: 667159 - DNA, 931 bp, Homo sapiens
taatataaattatgtataatgtgtgtagacacgcattataaacatcgtgaacaagttaggccttctttagagttgcctagggaaattctgaatagtacatccgaagtgagtgttgtggaacaattacgcctacttattgtaaatactgatgtttggccagatacatttagaaataacctaaactgattggacaaaagttaaaatgttcattttaatagagtatcttaatcatagtaatgagtttgattctccaattctctccagacctaaaacatcctttagaattaatgaaagtaaaaacagcttgctcctaaacaccaatgaaagcctttgcagtattttttgcccttgcatttcctgacatgcagagctggtcacacaaagccattcttcaataacagttgttttataactaccatgctctgatcatatcatacacaatttcaatgaactgtgttgccacctaacacaatttaaaactctacacaaaatagtcatatcaaaatctgtggagttgaaggtaggcaggkaaacagggggattcttaaatgtgagcataaagtcaggctgagaaataagtggagttcatcctccctttcctttcttgtctagtaaacacactatattctcttgtgggaagattacattaatgatttaacattaggacaattaggacaattatatctaataattaaagaagtttattaataagggaaaataaaaaggtcaatacataaagatgggacatggtgcttatcaaaaaatatctaaaacttcaccctcttgaagttttgccttgtttgttggtttgattatttattttttgagatggagtcttgctctgttgctcaggctggagtgcagtgcaatctcggctcactacaagctctgcctcctgggttcacgccattctcctgcctcagcctcctga

SEQ ID NO: 667160 - DNA, 591 bp, Homo sapiens
aaaacagatctagtccccaaagagcrtgcattttgatagtggcatgatgagatgtccacaagttatcataaaattggaaaatgaaattattatggcaaaagagctaacgaagtgctagaaactgattaaaaacccaattttgattaggccagagctacattttaattttcttggccttttgaagttttcaaaatggagcctctattacatccagacataagtttctctcctggtcttcagctgatgagggcatcatgaagtcctgcaactcctctccctcaaccgtcacacacatacaatttttaatgttttacttccaagagggaaaacttttaaatgacatctttcatcaaaattaatgttaaatattttggggggttttggtggatgtcatttctaagcaaattattagaacagcaaaaacagtttatatcataagttttaaagtcctttatacatttttttgcattagagatattatacaattctatctatttacaaaacactttacttttcaaaaatatcctgtcaagaggttttgaaaatatctatttcaccaatatctatttaaagataagtctggaaataaga

SEQ ID NO: 667161 - DNA, 591 bp, Homo sapiens
aaaacagatctagtccccaaagagcgtgcattttgatagtggcatgatgagatgtccacaagttatcataaaattggaaaatgaaattattatggcaaaagagctaacgaagtgctagaaactgattaaaaacccaattttgattaggccagagctacattttaattttcttggccttttgaagttttcaaaatggagcctctattacatccagacataagtttctctcctggtcttcagctgatgagggcatcatgaagtcctgcaactcctctccctcaaccgtcacacacatacaatttttaatgttttacttccaagagggaaaacttttmaatgacatctttcatcaaaattaatgttaaatattttggggggttttggtggatgtcatttctaagcaaattattagaacagcaaaaacagtttatatcataagttttaaagtcctttatacatttttttgcattagagatattatacaattctatctatttacaaaacactttacttttcaaaaatatcctgtcaagaggttttgaaaatatctatttcaccaatatctatttaaagataagtctggaaataaga

SEQ ID NO: 667162 - DNA, 2194 bp, Homo sapiens
tgttttgagttgggtctctcactctctcacccaggctggagtgcagtggcataatcatagctcactgtagccttgacctcctgggctcaagccatcctcctgcctcagcctcctgcagaactgggactacaggcacatgccaccacacccagctattttttattttatttttttgtagagtcagggtctcactatgttgcccagactggtcttgaactcctggcctcaagctatcttcctgcctcagcctcccaaagtgctgggattacaggtgtgagccactgtgcctggcctcttggtgactctttgcaagggcattgctggctggctgatatggcctgcagcctctgcctgtaaccatcagagcgatactctcattatcggcaaggtgggacccaccctggcccaagagacagggcctgttattccactgtatggaggagaagctgaggcttagggaaggcagatgacttggcaaggtcataaagacagcaagctgcaggaccagctcattctaaggcatgaaccccctgtggcccacctcaccatgatgttaacatttcagcctgctcccttccaggcagacagtcttccagaaagttacccggctccctggctgggcgcggtggctcacgcctgtaatctcagcactttgggaggccgagacgggcaaatcacgaggtcaggagatcgagaccatcccggctaacacaatgaaaccccgtctctactaaaaatataaaaaattagctgggcgtggtggcgggcatctgcagtcccagctactcaggaggctgaaacaggagaatggcgtgaacctgggaggcagagctcgcagtgagccaagatcgcaccactgcactgcagcctgcacgacagagcgagactccgtctcaaaaaaaaccaaaagacccagcaacccgagtcatatcctgatgatatccatgctcctcagtcacgcatcccgtggtgcaggggctgaccccaagaggagctgctgcccccagagggtggggagccgaggcagggcctgggtcagacttaccaggctatgctcccagcccagccctcactagggacccccgagtgcatctctctcctctccaggcctctgtttctccatctgtgcaaccacagtgttggacatggtagtcccaagtgtctgctcgtaactttgccctctctgtgcccccaggtcagggctgcgataagacccggtcacgggtgaccctgcaggagtggaatgaccctcttgaccatgaccttgaggcccagctcatctgccggcacctgctgggcgtggaggccatgctgtggtgagtcccacccaggagagcctgtgcagcctggggaacgtgccaggcttggggctgctccatggtagctggtcacctctcttgtaattggccacatctggggagggcaccaggagtacctctctgcagcacgaggccagctcaggttaggacagaggccccaagggtcagggccatgcctgcttcatgccatgtgctgactgagcccaccttgcaacctgcccagctgttcccctgggcccttggagtacaggcacagcctcagccaattccctgagttccctggccatcttgcttcgtccagtggttctcagccttggcagaagcttaggaaaaacargatgcttttaaagatcagctttaaaaaacaggatgccaaggccccatcactcagggtctctggagatgtggctggtgccaggatacttcaaggtgatccagtgcttcccatgcgctcagcttcccctgagccaactggagctggagctcattcatctgtcacacccctacactctgcaaggaggaagggtgtggtcctccccattcctcatcgactcttccagggtttatctctgccctcaaaacccacgaaggtggggtgcggtgactcatgcctgttatcccagctctttgggaggtggaggcaggcagattgttggagatcaggagtttgaaaccagcctggccaacatggcaaaacctcttctctactaaaaatacaaaaattaactgatgtggtggagggtgcctgtaatcccagctactcaggaggctgaggcaggagaattgcttgaacccaggaggtggaagttgcagtgagcttagattgcgccactgcactccagcctggaccgcagaacaagactctgtctcaaaaa

SEQ ID NO: 667163 - DNA, 2194 bp, Homo sapiens
tgttttgagttgggtctctcactctctcacccaggctggagtgcagtggcataatcatagctcactgtagccttgacctcctgggctcaagccatcctcctgcctcagcctcctgcagaactgggactacaggcacatgccaccacacccagctattttttattttatttttttgtagagtcagggtctcactatgttgcccagactggtcttgaactcctggcctcaagctatcttcctgcctcagcctcccaaagtgctgggattacaggtgtgagccactgtgcctggcctcttggtgactctttgcaagggcattgctggctggctgatatggcctgcagcctctgcctgtaaccatcagagcgatactctcattatcggcaaggtgggacccaccctggcccaagagacagggcctgttattccactgtatggaggagaagctgaggcttagggaaggcagatgacttggcaaggtcataaagacagcaagctgcaggaccagctcattctaaggcatgaaccccctgtggcccacctcaccatgatgttaacatttcagcctgctcccttccaggcagacagtcttccagaaagttacccggctccctggctgggcgcggtggctcacgcctgtaatctcagcactttgggaggccgagacgggcaaatcacgaggtcaggagatcgagaccatcccggctaacacaatgaaaccccgtctctactaaaaatataaaaaattagctgggcgtggtggcgggcatctgcagtcccagctactcaggaggctgaaacaggagaatggcgtgaacctgggaggcagagctcgcagtgagccaagatcgcaccactgcactgcagcctgcacgacagagcgagactccgtctcaaaaaaaaccaaaagacccagcaacccgagtcatatcctgatgatatccatgctcctcagtcacgcatcccgtggtgcaggggctgaccccaagaggagctgctgcccccagagggtggggagccgaggcagggcctgggtcagacttaccaggctatgctcccagcccagccctcactagggacccccgagtgcatctctctcctctccaggcctctgtttctccatctgtgcaaccacagtgttggacatggtagtcccaagtgtctgctcgtaactttgccctctctgtgcccccaggtcagggctgcgataagacccggtcacgggtgaccctgcaggagtggaatgaccctcttgaccatgaccttgaggcccagctcatctgccggcacctgctgggcgtggaggccatgctgtggtgagtcccacccaggagagcctgtgcagcctggggaacgtgccaggcttggggctgctccatggtagctggtcacctctcttgtaattggccacatctggggagggcaccaggagtacctctctgcagcacgaggccagctcaggttaggacagaggccccaagggtcagggccatgcctgcttcatgccatgtgctgactgagcccaccttgcaacctgcccagctgttcccctgggcccttggagtacaggcacagcctcagccaattccctgagttccctggccatcttgcttcgtccagtggttctcagccttggcagaagcttaggaaaaacaggatgcttttaaagatcagctttaaaaaacaggatgccaaggccccatcactcagggtctctggagatgtggctggtgccaggatacttcaaggtgatccagtgcttcccatgcgctcagcttcccctgagccaactggagctggagctcattcatctgtcacacccctacactctgcaaggaggaagggtgtggtcctccccattcctcatcgactcttccagggtttatctctgccctcaaaacccacgaaggtggggtgcggtgactcatgcctgttatcccagctctttgggaggtggaggcaggcagattgttggagatcaggagtttgaaaccagcctggccaacatggcraaacctcttctctactaaaaatacaaaaattaactgatgtggtggagggtgcctgtaatcccagctactcaggaggctgaggcaggagaattgcttgaacccaggaggtggaagttgcagtgagcttagattgcgccactgcactccagcctggaccgcagaacaagactctgtctcaaaaa

SEQ ID NO: 667164 - DNA, 235 bp, Homo sapiens
cacccccctccccccacccctgctcctaggaggacaacgtgatcactgtattcagctccatcaagaatggtccaggttcttctagatgatctgcacaaatggttcctctcctcctgcctggtgtctgccattagcattggaataaagttccygctgaaaatccacatctcccctgggtccggtgttctggaagcgagagagacaatgtcacacttcaaggaggcagctctctaga

SEQ ID NO: 667165 - DNA, 646 bp, Homo sapiens
agaaggcaggcatgcagatagtttaaattggtagcactgggaggggactgccatgggtgggcagtgaagaaaaagggcttcaaaataatgagagttgagatsgatcttcaaggaagataagcagttttcagtaaggccatgaagagaggaggaagttccaggcgggaagagtttgtgctaaagtacagggattgctatacacatggtgtatgtagaaaaaatttggttcacagtgtgatagaagaattggagggggtcctcactgaaagtaaggaaacacatttggaagaatatgtttcagttagaaaatgaaatgagcttaaagtaaacactaataaggtttttaaaatgtaaaatttcaacgtatttagaaagagaacagctggatgaatcttatgtacctgtcactcagctttagcagttatcagtaaatggccaacgttgtttcagctatactcccctctcctccactgatagtcttttgaaggggaatacaattgttttgtggcctccagaaagggataagtttatgagcaacgggtagatcgttgggagagacttgagtttcctgtcaggaagcattcttggtgcataagtcagaggtgatatgaatgccgtggaagggggtggcttactgtctggagaa

SEQ ID NO: 667166 - DNA, 1708 bp, Homo sapiens
gcttgtttaaatctagaaacagagcatctaatctctttctggaattcctttttttttttttttgtttctcaggctggtctcaagctcctgggcgcaagcaatccgcccaccttggcctcccaaagtgctgagattacaggcatgggccaatgtgcctggcctgaggcctagaattccatttttaagtaaggagagaaggatcagagtctaaagttcatagattgttttctagcatgtgtgtctctgtggctgcctgcaaggctcttgggagcaatcactacacaccaagtttaggcacaacttccagtttttatttgtcagatcagagtaaaactctcttccttggacagtgcttgatgtatatcagaaagcaaaaacttagatggggttcagtttgcagttcacagaaatgcagctttttgggaaacatatttttaagtataaaaccagaatcttgagtcatttgagtagcattttattctagttttggaactttggattccatgtctccatccagcaattactgtctcttgtgcagataaatcatctttttgtggcaaaacaggaagcagcgtggtacaaaaacaacaggagggaaaggtactcagtgattcactgtatttgcttgactgtttcagaccaaacccaaaagccgaaactactttgtaataagagagtctttaaaggaagtacacacctgaagccagttccttccgtttcctctttcctttgtgtgcccctaggatctaagtccattctctcctctgtgcttagcccttccctctatatttgttgagtcctggcaacagtcagggtgagaaggaacccatttcattcaccattgtctctggtctctcttctgtgacaatatatcggggttttttcctgctaagtaacatgctgacttctagcctgggatggttttgttttctgttaacttctacatgtagcattacagaaaatttagaaaagagagagagagaaaaaaaaagcacccacaaacccaccagcctaacataattactgtgctcattttcaaatatttcctatgagcctatacctgtatatgattctttctgtggctgtaataatagtgagtgtatctatctatctatatagatatatatacacacacacccacactcttttattttgaaaacttgcaaacctacagaaaagatgaaagagtgatacagtgacggtctggagatctcctttgcaaaggaacatttttctccattttggttttatttatttatttatttatttatttatttatttatttatttatttatttttgagacaagtctcactctgttgcccaggctggagtgcagtgtcatgatctcggctcactgcaatctctgcctcccgggttcaagcaattctctgcctcagcctcccgagtggctgggattacaggtgcccgccaccatgcccggctaatttttttgtatttttagtagagatggggtttcaccatcttggccaggctggtcttgaactcctgacctcgtgatccacccgcctcggcctcccgaagtgctgggattacaggtgtgagccaccgcgccaggccattttggtttttaaataccaaaaatttgaaatgaactagggctcctggaagtaatggttgattccaggactggggcrggaaaagtacaagatgagcctggaacatattgctgtatttaaagcaaggaac

SEQ ID NO: 667167 - DNA, 618 bp, Homo sapiens
cccagtctgtgccttcagcctgctctgccctttcttactttacctgctgatgctttaagcctccaacaactcacagaccatttcctttagaaagcttttccagtggtgggatgaatttcccccttactgcacccactcacctgagctcccaccgcactttgaacctccctcagtgcttacacacccacatgccttctaatccaattcatgcccatccagctcccttccctaccactgggggcccctttctgccagatagggactggcccttgctcgtgtttggatctgcagagtgaagacacagggcttggcaggctgtaagtgtctaggaaagatctgcttaataagagtgagcataggagggcgtaggagatggggagacacagagacgggacatgcacaaacccaggcagggcttgaaactaggtctaggtttcaaagcatgtccacagacygctcttcgatcctcaggaaagatatcattacaaagtgagcaagtcccagtgcctcaccctaaccaagcccaggactatcctgcctagaactcaggcttctcagaatcttaaagcctaagagatgcctctcccatggattcctgcgctggactccagaagcaag

SEQ ID NO: 667168 - DNA, 618 bp, Homo sapiens
cccagtctgtgccttcagcctgctctgccctttcttactttacctgctgatgctttaagcctccaacaactcacagaccatttcctttagaaagcttttccagtggtgggatgaatttcccccttactgcacccactcacctgagctcccaccgcactttgaacctccctcagtgcttacacacccacatgccttctaatccaattcatgcccatccagctcccttccctaccactgggggcccctttctgccagatagggactggcccttgctcgtgtttggatctgcagagtgaagacacagggcttggcaggctgtaagtgtctaggaaagatctgcttaataagagtgagcataggagggcgtaggagatggggagacacagagacgggacatgcacaaacccaggcagggcttgaaactaggtctaggtttcaaagcatgtccacagaccgctcttcgatcctcaggaaagatmtcattacaaagtgagcaagtcccagtgcctcaccctaaccaagcccaggactatcctgcctagaactcaggcttctcagaatcttaaagcctaagagatgcctctcccatggattcctgcgctggactccagaagcaag

SEQ ID NO: 667169 - DNA, 618 bp, Homo sapiens
cccagtctgtgccttcagcctgctctgccctttcttactttacctgctgatgctttaagcctccaacaactcacagaccatttcctttagaaagcttttccagtggtgggatgaatttcccccttactgcacccactcacctgagctcccaccgcactttgaacctccctcagtgcttacacacccacatgccttctaatccaattcatgcccatccagctcccttccctaccactgggggcccctttctgccagatagggactggcccttgctcgtgtttggatctgcagagtgaagacacagggcttggcaggctgtaagtgtctaggaaagatctgcttaataagagtgagcataggagggcgtaggagatggggagacacagagacgggacatgcacaaacccaggcagggcttgaaactaggtctaggtttcaaagcatgtccacagaccgctcttcgatcctcaggaaagatatcattacaaagtgagcaagtcccartgcctcaccctaaccaagcccaggactatcctgcctagaactcaggcttctcagaatcttaaagcctaagagatgcctctcccatggattcctgcgctggactccagaagcaag

SEQ ID NO: 667170 - DNA, 654 bp, Homo sapiens
tatcttctcagttctgtaaatctagaacagttctaagacataaaagtggctggaaacaacaagaatggcctgtggtctgccatgattacagtgccaggtcttgcttgtgttagatccttataccgcctgaccatcctctgaggaagggactgtcaccagccccacgtcctggcactaattcctgcaagtgattagcctagggcccagcagcgtttgagctcagcaaacattaggaaactgagctcagcaaacattagaaaatgcagctattataattagcagctgctggaaggggagagcaagaggcttgatagctaagagcccggttctggtgaggttgcggagaaaaaggaatgcttatacgctcttggtgggrgtgtaaattggtttgaccactgtgggagtgtggtgattcctcaaagagctgaaaacagaactatcatttgatgcagaaatcgcattactgggtatatatccaaaggaatataaattgttctatcataaagacactgaacctgcgtgcatatgttcagtgcagcatgattcacaatagccaagacatggaatcaaatgcccatcaatggtagactcaataaagaaaatctggtacatgctgagcacggtggctcacgcctgtaatcccagcactttggg

SEQ ID NO: 667171 - DNA, 1352 bp, Homo sapiens
cagtaaygatttagcggaagcttttcctgtttccttgcttggaattggttgagttttgtcatggaattgcttgagaactgctgtgctgtaattcctggctatagcatgaacacatccctttggggggatccaataaaaccagtgttgaagggaagtgccgactcctcagtactgaagggcagtctctctgactcaggtgaaagaggcacccactgggtatgaagtactcataggtagagcagaggggcatggagtgttgccaaagccaaagggctaaaaacagaagaaagtgccagtgtgttcatgcaaggtcggccagagccaggccagctgctattcagaatccaggcaattgtgtggatgctacgtggacctttgaggaaattcttaccaacagcactcaggagcacagcaccaacatgcccccccccaaaaagaaaacaaacaaacaacaacaaccccttcatgtgggcatttcaatcagttcccttttcatcagagatgaaagagcagctgggaggacccacattagtgatgatgttcattctgcctttattcctatgctggagatgggaaaacggctgtctctgcaaacatcctccacgaaccacatcagtgtaagtttaagcaacagatttcctccccgataaagatgtggccaggcaccgggtacggtggctaacgcctgtaatcccaacactttgggaggctgaggtgggcggatcaggaggtcaggagatagagactagcctggccaacatgctgaaaccccgtctctactaaaaatacaaaaactagctgggtgtggtggtgcatgcctatcatcccagctactcaggaggctgaggcacaagaatcgcttgaacccaggaagtggaggttgcagtgagctgagatcgcgccactgcactccagcatggagacagagcgagactgtctcaaaaaaataagtaaataaataaataaataaataaataaataagatgtggccaggcttgtggaaaagggcagcctaaggattaggctaggtccttcctaagccactcaaagtcttaaattttccttttttattaaagcaaattattacttgaagagtacattctacattttagagcagaatccttcaaaaaaaaaagataaatcaaaaacccccaagatattgaaaaagcacacactttacaagaaattaaattgtcctgctcaggttagaatgacaagatggctgcttgcttattttaaaaatatcaaaagcaagactggtcaaaaagaaaaaaaaatacgagggaaagttttggtttccattacctatatttgtgtaaaagctacgtgttgttttaactaaacatctggtc

SEQ ID NO: 667172 - DNA, 1352 bp, Homo sapiens
cagtaatratttagcggaagcttttcctgtttccttgcttggaattggttgagttttgtcatggaattgcttgagaactgctgtgctgtaattcctggctatagcatgaacacatccctttggggggatccaataaaaccagtgttgaagggaagtgccgactcctcagtactgaagggcagtctctctgactcaggtgaaagaggcacccactgggtatgaagtactcataggtagagcagaggggcatggagtgttgccaaagccaaagggctaaaaacagaagaaagtgccagtgtgttcatgcaaggtcggccagagccaggccagctgctattcagaatccaggcaattgtgtggatgctacgtggacctttgaggaaattcttaccaacagcactcaggagcacagcaccaacatgcccccccccaaaaagaaaacaaacaaacaacaacaaccccttcatgtgggcatttcaatcagttcccttttcatcagagatgaaagagcagctgggaggacccacattagtgatgatgttcattctgcctttattcctatgctggagatgggaaaacggctgtctctgcaaacatcctccacgaaccacatcagtgtaagtttaagcaacagatttcctccccgataaagatgtggccaggcaccgggtacggtggctaacgcctgtaatcccaacactttgggaggctgaggtgggcggatcaggaggtcaggagatagagactagcctggccaacatgctgaaaccccgtctctactaaaaatacaaaaactagctgggtgtggtggtgcatgcctatcatcccagctactcaggaggctgaggcacaagaatcgcttgaacccaggaagtggaggttgcagtgagctgagatcgcgccactgcactccagcatggagacagagcgagactgtctcaaaaaaataagtaaataaataaataaataaataaataaataagatgtggccaggcttgtggaaaagggcagcctaaggattaggctaggtccttcctaagccactcaaagtcttaaattttccttttttattaaagcaaattattacttgaagagtacattctacattttagagcagaatccttcaaaaaaaaaagataaatcaaaaacccccaagatattgaaaaagcacacactttacaagaaattaaattgtcctgctcaggttagaatgacaagatggctgcttgcttattttaaaaatatcaaaagcaagactggtcaaaaagaaaaaaaaatacgagggaaagttttggtttccattacctatatttgtgtaaaagctacgtgttgttttaactaaacatctggtc

SEQ ID NO: 667173 - DNA, 1352 bp, Homo sapiens
cagtaatgatttagcggaagcttttcctgtttccttgcttggaattggttgagttttgtcatggaattgcttgagaactgctgtgctgtaattcctggctatagcatgaacacatccctttggggggatccaataaaaccagtgttgaagggaagtgccgactcctcagtactgaagggcagtctctctgactcaggtgaaagaggcacccactgggtatgaagtactcayaggtagagcagaggggcatggagtgttgccaaagccaaagggctaaaaacagaagaaagtgccagtgtgttcatgcaaggtcggccagagccaggccagctgctattcagaatccaggcaattgtgtggatgctacgtggacctttgaggaaattcttaccaacagcactcaggagcacagcaccaacatgcccccccccaaaaagaaaacaaacaaacaacaacaaccccttcatgtgggcatttcaatcagttcccttttcatcagagatgaaagagcagctgggaggacccacattagtgatgatgttcattctgcctttattcctatgctggagatgggaaaacggctgtctctgcaaacatcctccacgaaccacatcagtgtaagtttaagcaacagatttcctccccgataaagatgtggccaggcaccgggtacggtggctaacgcctgtaatcccaacactttgggaggctgaggtgggcggatcaggaggtcaggagatagagactagcctggccaacatgctgaaaccccgtctctactaaaaatacaaaaactagctgggtgtggtggtgcatgcctatcatcccagctactcaggaggctgaggcacaagaatcgcttgaacccaggaagtggaggttgcagtgagctgagatcgcgccactgcactccagcatggagacagagcgagactgtctcaaaaaaataagtaaataaataaataaataaataaataaataagatgtggccaggcttgtggaaaagggcagcctaaggattaggctaggtccttcctaagccactcaaagtcttaaattttccttttttattaaagcaaattattacttgaagagtacattctacattttagagcagaatccttcaaaaaaaaaagataaatcaaaaacccccaagatattgaaaaagcacacactttacaagaaattaaattgtcctgctcaggttagaatgacaagatggctgcttgcttattttaaaaatatcaaaagcaagactggtcaaaaagaaaaaaaaatacgagggaaagttttggtttccattacctatatttgtgtaaaagctacgtgttgttttaactaaacatctggtc

SEQ ID NO: 667174 - DNA, 621 bp, Homo sapiens
tgacagtatattgtctaaacgctggacctctcccacataaaaagtctcatgggagagagttgttcaggtgcaaaggaccccatctcaataatctaggtctcaaatgcagcaggttttctttcctaacttttaatcaaagtgttttcttttatctggatctcatcttataaactctgttataatcattatttatattaagaaatatgtattatctcctatgtacacatcagaatgtaagatttaaaaattaataasctacctacctgttcttttatagtagagagcgtatgcttaaaaaaaattttttttatatgaagtagaacatgatgctttagttaagacctgaagaaagtacagtggcagattgtgtcaccttatctgagagaccttctcaggacactccaggtttgttcttttccatggtacttatcccatctgacatatatttagggttcattgcctttattagaatttcagtcctacaaatcccataatttttgtccactgccatatgcccagagcctaagaactgtgtctaccacatagtaagccctcaatatctgacgggatgaatgaaataagagaggcactaataaggtcctgcagagggtcagaaaaaaa

SEQ ID NO: 667175 - DNA, 621 bp, Homo sapiens
tgacagtatattgtctaaacgctggacctctcccacataaaaagtctcatgggagagagttgttcaggtgcaaaggaccccatctcaataatctaggtctcaaatgcagcaggttttctttcctaacttttaatcaaagtgttttcttttatctggatctcatcttataaactctgttataatcattatttatattaagaaatatgtattatctcctatgtacacatcagaatgtaagatttaaaaattaataacctacctacctgttcttttatagyagagagcgtatgcttaaaaaaaattttttttatatgaagtagaacatgatgctttagttaagacctgaagaaagtacagtggcagattgtgtcaccttatctgagagaccttctcaggacactccaggtttgttcttttccatggtacttatcccatctgacatatatttagggttcattgcctttattagaatttcagtcctacaaatcccataatttttgtccactgccatatgcccagagcctaagaactgtgtctaccacatagtaagccctcaatatctgacgggatgaatgaaataagagaggcactaataaggtcctgcagagggtcagaaaaaaa

SEQ ID NO: 667176 - DNA, 621 bp, Homo sapiens
tgacagtatattgtctaaacgctggacctctcccacataaaaagtctcatgggagagagttgttcaggtgcaaaggaccccatctcaataatctaggtctcaaatgcagcaggttttctttcctaacttttaatcaaagtgttttcttttatctggatctcatcttataaactctgttataatcattatttatattaagaaatatgtattatctcctatgtacacatcagaatgtaagatttaaaaattaataacctacctacctgttcttttatagtagagagcgtatgcttaaaaaaaawtttttttatatgaagtagaacatgatgctttagttaagacctgaagaaagtacagtggcagattgtgtcaccttatctgagagaccttctcaggacactccaggtttgttcttttccatggtacttatcccatctgacatatatttagggttcattgcctttattagaatttcagtcctacaaatcccataatttttgtccactgccatatgcccagagcctaagaactgtgtctaccacatagtaagccctcaatatctgacgggatgaatgaaataagagaggcactaataaggtcctgcagagggtcagaaaaaaa

SEQ ID NO: 667177 - DNA, 929 bp, Homo sapiens
gtttataaaagcaatgagcaaaatacgagttgaaaagaattcccactcaggtgataactacagtatatatagtacatgtttttgtatggactaggataaarcacacggtaaaatcaaacgttctaaggcattctagtgtcctactcaggcacatagttaaaacagttatttcactaatagcacagaaacaagcatcaggaatgagttgactcatcagtgttagaatccacgtgattttcttcattattgataatgactatattagaaaccaagtcctcattgtatttaaagtattattctgcaaccttagtcctgtgttctttcctgaagtctgtatggtataacattaaacatgtccctaatgttcaatgtgtgtcccttgttttgagctgtaaattgtcagagtgataaatttacacttcgaatattgaggaggaagtctatctttacctctgataagctgagtttatatagcttgtatttgttttttttttgttttgttttttttttttttgagacggagtctcgctctgtggcccaggcgagagtgcagtggcgcaatctcggctcactgcaagctccgccttccgggttcacgccattctcctgcctcagcctcccgagtagctgggactacaggcgcccgccatcacgcccggctaatttttttgtatttttagtagagacggggtttcaccgtgttagccaggatggtctcgatctcctgacctcgtgatccgcctgcctcggcctcccaaagtgctgggattacaagcgtgagccaccgcgcccggccgcttgtatttgttaaggaacaaaagatgtgaagctcttattcttgtgttactgtttagtggtgctctgctctgccactggagtatggtaacatcttcatatcttatccagacttgttaactgtacacctctca

SEQ ID NO: 667178 - DNA, 1113 bp, Homo sapiens
gatttcctgtatagattattcttaatgtatgttttattttggcatggacaataattttattgtcccagagaaattaaagggatttcagagaaactgtgtgccacaggatcaggatgctagaacgcagttccacttaatttgggaaatacctatttggaagtttatatccatgtgcatcctgatgagcgggaggtgtcttgtctctctcttgggtttttcttgacactagagttagtctctgcaagggcctttaaaagttaaattccactccccaccccccaatctggtatagatattactgctactcttggatttcactcagtttatttccttttaggagacgcaggtcagaatggaaatgggctgcagaccgggcagctattgtcagccgctggaactggcttcaggctcatgtttctgacttggaatatcgaattcgtcagcaaacagacatttacaaacagatacgtgctaataaggtaagggataagtatctgatgtttttaaatgctgccgaaaactatcaatatcgcttttctcacatcccctcccacctcgtaacccccataaccctcttcttaactattgcaaagtaaatggtttaatgacctgatatagtggtttaatttaagaacctgatgtggctgcgcgtggtggctcactcttgtgatcccagcactttgggaggccaaggcaggaggatcatttgagctcaggagttcgagaccagcctgggcaacatagtgagaccttgtctttacaaaaattacaaaaattagttgagcatgatagcatgtgcctgtagtcccagctacttaggaggctgaagtgggagtatygcttgagcccacgaagtggaggttgcagtgagccaagattgtgccaccacactccagcctggacaactaagaaaggcctgtctcataaaaaggaaaacactattagaatataatgtttaactgaacgtgtatttagaacaaaactgtgtgggtatctgagctaacaggaaacaaggaaaacagactgaataatgcaagcaagccattgatgttaactgtcatatttgttagatttatatttgttagttccctgttataaaactgccacatttca

SEQ ID NO: 667179 - DNA, 1113 bp, Homo sapiens
gatttcctgtatagattattcttaatgtatgttttattttggcatggacaataattttattgtcccagagaaattaaagggatttcagagaaactgtgtgccacaggatcaggatgctagaacgcagttccacttaatttgggaaatacctatttggaagtttatatccatgtgcatcctgatgagcgggaggtgtcttgtctctctcttgggtttttcttgacactagagttagtctctgcaagggcctttaaaagttaaattccactccccaccccccaatctggtatagatattactgctactcttggatttcactcagtttatttccttttaggagacgcaggtcagaatggaaatgggctgcagaccgggcagctattgtcagccgctggaactggcttcaggctcatgtttctgacttggaatatcgaattcgtcagcaaacagacatttacaaacagatacgtgctaataaggtaagggataagtatctgatgtttttaaatgctgccgaaaactatcaatatcgcttttctcacatcccctcccacctcgtaacccccataaccctcttcttaactattgcaaagtaaatggtttaatgacctgatatagtggtttaatttaagaacctgatgtggctgcgcgtggtggctcactcttgtgatcccagcactttgggaggccaaggcaggaggatcatttgagctcaggagttcgagaccagcctgggcaacatagtgagaccttgtctttacaaaaattacaaaaattagttgagcatgatagcatgtgcctgtagtcccagctacttaggaggctgaagtgggagtatcgcttgagcccacgaagtggaggttgcagtgagccaagattgtgccaccacactccagcctggacaactaagaaaggcctgtctcataaaaaggaaaacactattaraatataatgtttaactgaacgtgtatttagaacaaaactgtgtgggtatctgagctaacaggaaacaaggaaaacagactgaataatgcaagcaagccattgatgttaactgtcatatttgttagatttatatttgttagttccctgttataaaactgccacatttca

SEQ ID NO: 667180 - DNA, 566 bp, Homo sapiens
agtccaagcattttctacctctgggtcttgcatttaatgttccttctgccctaaatgttctcttctcaaattcgcatagggcttactttctcatctcctttgtgtctcttcacagatgtcactccatcagcaggattgaggattgaataaattgtagtgttgtgaactaggttggaaaaattggaagagaaactgactttggagaaaagatgatgagtttgactttggtacacagtgaggttaaaatgtcagtagggtttggctggcacttccgggtatagctctatagcagagcgttgaaatgaaatattaacttttaagaaaggatcagagaaagaatatagcatataggaaacagaggaagtagcatgtgccagattcagtatgtccacaaattctggcaagtacctctcatcaaaaggtatagtctattccactattccttgagccttgttagatttgagacttgctttgacccatagaatgtggcagaagtggtcttacaagagttcagaacctaggcaataagtgrccattcagctgtttttctctcctagaacattatc

SEQ ID NO: 667181 - DNA, 595 bp, Homo sapiens
cctttactcttctaaacaaagcacacatttctccaattatttttaaattgagaacagtggaaaagaaatctatttgtgtgttgattccattttttttggtatgattaaatggtacagcagaagtcttatacagtatagtcaggtacttttccctgcaagatctgtaagggcagtttttatgtgcatcctagatatacagtattttcacacaccgagactttaattcctgttatcttaatattatttataagtccctcacatctcttagcagccatacttcaccaactcttgccctatttgagtctccacctcaaaatagcaagcctttcactcaagcctrgggcagtgagaagttcatgagaagtttccacatggcaaaaatggtgatggtagaagacatatctgtttttcattttatttgtttgtttttaattggactgtttttcttagagagtttctcaaaaccagtgagtttccagagagaagagatttctattatttcaagggctgatagttaagatccttcaaaaaagttgaccttcccacatcagaccaatgtctgtagagtttgaaaagttgtcaaacttgccattaa

SEQ ID NO: 667182 - DNA, 629 bp, Homo sapiens
tccatgcttccagatccatctatctgtctgtccatcccacaaatacccatcatgactctcagccctgggcattacaaagcagaaaagtccttgccttccgaggcaagcctcacagtgagaagtgaggctgggtagggggaagaaacagtgagaaaacaaaggaataatatcatttcagatagcggtcagcatggtgaagaacagtgcagagcaggtgtgaatgtggcggagtgtttccatccacatggctgacccctactaagtggctgctaagtgccagccctgggctggaagcaggacatgcctattataatgaagcagcaaaatctctgcctctctgcagtatagcaagggggctcgatgataagcaagtacaygaaaaagataatttcaataggcatgagtgctttggggaacacagcagggactcgggaaggagagtgactggggtgggctgtgctgattgggtgcctggtgagaaggagctgctgtgtggagagctgggtcccagcagttgaggtgacagcacactgggcttgttacgttgcaggaatagtaagggactgtgtggccagagcccagtgtgtccggggaggatggtgggagatgaggccagtgtggggcgcctg

SEQ ID NO: 667183 - DNA, 629 bp, Homo sapiens
tccatgcttccagatccatctatctgtctgtccatcccacaaatacccatcatgactctcagccctgggcattacaaagcagaaaagtccttgccttccgaggcaagcctcacagtgagaagtgaggctgggtagggggaagaaacagtgagaaaacaaaggaataatatcatttcagatagcggtcagcatggtgaagaacagtgcagagcaggtgtgaatgtggcggagtgtttccatccacatggctgacccctactaagtggctgctaagtgccagccctgggctggaagcaggacatgcctattataatgaagcagcaaaatctctgcctctctgcagtatagcaagggggctcgatgataagcaagtacacgaaaaagataatttcaataggcatgagtgctttggggaacacagcagggactcgggaaggagagtgacyggggtgggctgtgctgattgggtgcctggtgagaaggagctgctgtgtggagagctgggtcccagcagttgaggtgacagcacactgggcttgttacgttgcaggaatagtaagggactgtgtggccagagcccagtgtgtccggggaggatggtgggagatgaggccagtgtggggcgcctg

SEQ ID NO: 667184 - DNA, 1315 bp, Homo sapiens
agtcagtaggtgccttattgtcaagatgtctcttggttaggaaaataagtgagtacctaggggctgtgcttccatgcgctttgtctgcacagtgacaggctgctcacctcattgtgtctggtcacatatctttctccctcgctggactgtgaattcctcaggggcaaccatgtctaattcaaccatgatttttcttcagctccaaacccgcccctgacacccagtaaacacttgcttctcttggggacaaaagcaatgcatgacaaaatggagtaaagctctcctgctctccacatgatcagatctggtaacttctatttcctatgtatcctttgaaatttacctccagaactactcccatagtgggcagccgagcaaaggtccaccacatattggtggagtggtctgccatgttaattctggggcctcagattcctgacctgtaaaatggaactgaaaatgcccacctcatgcagtttgggggagggtaaagtgagatacacagtattaatttcttagggctgccataataaagcatagttgggcctctgtatccatgagttccacatcatggattccatatctgtggattcaaccaactatgataaaaaatatctttaaaaaaccacaaaaaaactagtgatataacaattagaagtacaaatttaaaaataactccaatctctgccttgtcttcacatgaccattttttctctctcacaagaacatcagccctattgaaatggagcccatcctactccagtgtgacctcactttagcttgactgcaatgactgatctgcaatgaccttatttccaaataggatcattctgaggtttgtgatttcaacctgtctgttttgggggactctattcaacccacaacatgtagagaatgtgctagtaaataatccatcttcttctctcccaccccctccactcctatttatgccaacccaaactactcttcctgcatcctacttcttgtctgtgcctctctgatgtatattgctaggtgtctttttaagaacgtatgccctccttttctaactagttggaagctttgtgaaggtaaagaggtaaaagcatccttatagcgtctaaaagactgcttggcatatcctgaggcctcaatatgtgctaatggattgggtaataacaaaggagcagaaaatattgatcacattttcttccatgctgtccttctctctaaagtccttcctctgtgtgcttagagagtattattattcttatttaaactagcctcatcttgtatgagcttctaagtaaaaakgagtttagagagtttgcataag

SEQ ID NO: 667185 - DNA, 1023 bp, Homo sapiens
ccagaccagtacttacttttccccggcaactttccgcactaatttcgcttctgtcccattcagttccagctcccaacctccagacatcttagggagggttttatgcttctgaatttttctttcctccttaatttcatcactcaggaaatcaacaaaagctttgtctcctagaaaagaaatccagatacataaaaaggaaagccagttagtctaaaacataaaactattacccaggttattgcagccagaaacctggactgtttctaatctctctgctattacggttactctagaagcctgtttccttatcggtaaaaataccataatagtagtaggaagctgagcctgattctggaaaagtgatttccaacaatgaacgcattaccactttccgctataaaccaggagaatttccaatcctcttccacttgccaaacgatataactaygctattttcaaccacgaccatgggccttcccaaaggtccactttcgatagaataagactaaggaaaaaggtaccctagtatttaattttattcaccccctaccaaaagaaaacgaaactgctggataggggaggtgggggaaatatgatcatacgtgggtttagcccgctggttgccaatcaatggaaaaatgtcccagacctcagaggtcggttgcaggccctattcctggtctacgttttccctctgttgaacgcaaaccacacccccggcccgctaaacctcaccgtcggtgtgcagcgagccgcagccacagccacaggcgcagggtccgcgaggccgcaggaggcccggccgccgctcggaacctgcgcgcacgctgagcagcccgaagggccgggtgcacagccggggtgccggctgcaggagctgccggaaaggcgaggcgggcgcggcagcgcggaggccggcgacggaggagcccagcacacggggcacgcagcgcagcagaggcagcatcgcggaaacgactgcgaacacgtgcagatgcaaaggacaacccaggcctaggcgcc

SEQ ID NO: 667186 - DNA, 1051 bp, Homo sapiens
attaactatttttctaagatatattttaatgtctacatctgaattccattgcttaaatgtgccacaattgttaaaatgtccctgttgtggcatttatacttacaggctttatttttgttattttatattaaaaatttttataatcaccctagaatacagaatatttggatcaagtcttaagcccaaaggaaggcactttaaattcctttgttttctccaaattcttggcctttctcctttctaaggagcaagaattatactttgagaaaactgaactatattagagatacacggtgtagaaccaagttgtagrcaaagggttgagtcagaagcccatcacaggtgtggtaataagacagtgtattttctgcatagatttaaaaagcaacaataactaagtctgtctgttttttattattactgtgtgctggcaattctagaaaaagtcagtgaaaaaaatatccttccctaccaaggtaaaccacttctaccaccactccttgataggccatatcatccttaaagaggaagagtgtaattgaataaatttaaacctcctcttttatagacccatctatcctgaaatgttacccaacacttgcattcaagcaggacattttgaccttcattagcagaggataatttaagggaagtgtactactcaatcagtaacaaacagaaacatcattacatgattagagatcgcaatcaatactgacctctcttctctatttgcattgaagttgtttactgaaaaaataaattgatctgaaaagttactttgtttagaatgtgtttggaaatgttaagactatctatttacaaagcaaaaaaaaaaaaaaaaaaagtaacatgtacacagatagttgaagggaaagctgaaaaaacaacccagtggtttgagatggagtctcgctatgtggccaggctggagggcagtagcaccgtctcggctcactgcaacctctacctcctgggttcaagcagttctcctgcctcagcctcctgagtagctgggactacaggtgcatgccaccatgtgcagctaatt

SEQ ID NO: 667187 - DNA, 1051 bp, Homo sapiens
attaactatttttctaagatatattttaatgtctacatctgaattccattgcttaaatgtgccacaattgttaaaatgtccctgttgtggcatttatacttacaggctttatttttgttattttatattaaaaatttttataatcaccctagaatacagaatatttggatcaagtcttaagcccaaaggaaggcactttaaattcctttgttttctccaaattcttggcctttctcctttctaaggagcaagaattatactttgagaaaactgaactatattagagatacacggtgtagaaccaagttgtagacaaagggttgagtcagaagcccatcacaggtgtggtaataagacagtgtattttctgcatagatttaaaaagcaacaataactaagtctgtctgttttttattattactgtgtgctggcaattctagaaaaagtcagtgaaaaaaatatccttccctaccaaggtaaaccacttctaccaccactccttgataggccatatcatccttaaagaggaagagtgtaattgaataaatttaaacctcctcttttatagacccatctatcctgaaatgttacccaacacttgcattcaagcaggacattttgaccttcattagcagaggataatttaagggargtgtactactcaatcagtaacaaacagaaacatcattacatgattagagatcgcaatcaatactgacctctcttctctatttgcattgaagttgtttactgaaaaaataaattgatctgaaaagttactttgtttagaatgtgtttggaaatgttaagactatctatttacaaagcaaaaaaaaaaaaaaaaaaagtaacatgtacacagatagttgaagggaaagctgaaaaaacaacccagtggtttgagatggagtctcgctatgtggccaggctggagggcagtagcaccgtctcggctcactgcaacctctacctcctgggttcaagcagttctcctgcctcagcctcctgagtagctgggactacaggtgcatgccaccatgtgcagctaatt

SEQ ID NO: 667188 - DNA, 2035 bp, Homo sapiens
tacatgttctcactcataagtgtgagttgaacagtgagaacacattaacacacagaggggaacaacacacagcagggcttcttgggggttgggggcgaggggagagaacttaagagaatgggtcaataagtgcagcaaaccaccgtggcaaacgtatacctatgtaacacacctgcatgttctgcaaatgtatcctggaatttagagcaaaaaaaaaaaaaattaatatcttcaactgaaaaaagaattcttggtaaagttatgaaaaaataatctttcttaaaaaacattgcatattcatattatgcttattaatggtatacctacaattataattttaaatttcaacagcaaattaaggttgcacagtatgttgaaaattattttggtatttaatacaatgcaatagtttaaaaaaattgaattgcactgtaaatatgtaaaatagaaaatatattttaattgcctacctagagaatccggtagaaccaactgaaaatacacacacacacacacacacacacacacacacacacacgtgtatatatatatatatacacatacatatatatgtatacgtattaatatttttgtatcatttatcagtagcaaatgggagaaaatggtatttttaaagttatttgcaattaaaaaaatatataaagtctcatgagtaaacttttcaagacatgtatttaagattactcttctctactttcagctacatccaagacatttgtttgacagttacctctctatctatcagaaccatgtacagccaacaactatgagaactacgttggcctgtacttctagcggaagccctctgcagtctagagctggattctattggggtcaagctgtctcctttctcagagattctcaaaactatatcactcactgtttcaatcatttaccaaaagtttaaacacctttatctatctttcagtttactaccaacctcattgtcctctgtatttcttttcctcttaataaaattcaccatttttcaccttcctaacagccctttctcctatcttctgtaattctatacttcatccgagatttcctctgtctcctgcttcacatatgaagtcattgcttcccccgaagcccttttaggtaaaggctgtgtcgtctctcacatcctacctacttctgttcctcccacccagtgccactttaaaataaaaatgggaaaaaatccaaacaaaacaacttgcttctttgagcttatatcatacaattaaaattttaatttccttcctcatcgctttacttgttgaacttcaaatgactctttctagtttacttaagatattgaaaacaagagagcaatcttctcctttgttacaacttgttaacaaattataacttgtcctctaagatgtttcccaagagttttggtagcagatgtgttgggtactgaactaggartcagaagttctccacccctttcaggaattgtttaagagacaccccatcttgtagtgtataggatggggttgaaacctttttatgatattacgtacggtgtgtctttaaagatgaagctcttagaataacatggattcgattaatacataaaatgggatggtgtgttgaaccaaatgttctacaaaaaaaacctttagattttaaattctgtgatggaatgagttttcaaaataatccaaatttaggttccattttaactggatagaacccttattgagaaggtactttcagaagtacagaaacattattgggctgtgatggttattgggcccaccttgcacatggcaggatgtaactatggagttctggttgcctggactaagcaggtttgttgaaaatgtatacacttgcaggttaaagctttaaaaaccttttaaaaatattttagctgtttcttcatgacactttgaaaactatttttatccttcttggatcaagatggtttataaacaataaaaaattaacaaggactgtattatagcattttatagatagaaaattgaaacataaagcagttaaactatatatttatctgaac

SEQ ID NO: 667189 - DNA, 650 bp, Homo sapiens
gagagagtaacatatttttagtttaagtttcaaaaacagtgttttatatgcatgtataagttaaacagacatcatttaaagatacatatgttaaaatcacacaatattaaaatatttaatattattaaccccgaggtacgtatgtgaacctcatcatgttacccacaaagatattatttttacaaagtcctatatgaaattttgtctttggccacatttaattcayatttatttgcttactatttattagtattactatttatactttgccaatacattttaatgcaataaatcaatttactttattttaaatataatgggcataattgtaaaaactaaaatttcactttggcttaagtcagttatttaacaaatttatttgtcttgtggattttcaagttttatgaaaatagaaagatttcatgaaagtaagctaagtctccaatatacaaagcaaaaactgaaagaatttttaaattgacaattcaacagtgttaactggggactttagtacctcattctaaataatgtgtacaccaaaaaaaggatatagaaataacatccatctttatagagcattctaggcaataagcggaatttatattctactgaagcacaaattgaacattctacttggatagactacatgc

SEQ ID NO: 667190 - DNA, 663 bp, Homo sapiens
tcactatctccgctgggtgcggtggcttatgcctgtaatcccagcactttgggaggccgaggtgggcagatcacstgaggtcgggagttcgagaccaacctcaccaacatggagaaaccctgtctctactaaaaatacaaaattagctgggtgtggtggcacatgccatgtaatcccagctactcgggaggctgaggcaggagaatcgcttgaacccgggaggcagaggttgcagtgagccaagattgcaccactgcactccagcctgggggatagagtgagactccatcttgggggaaaaaaaaagagagagagagagagagagagagagagagagagagagagagagagagagggagagagagagagagagagagagagagagagagagagagagagagagagagaaagaaagaaagaaagagaaaaatcactgtctcctttttatcatgaggaaactgaaggtcagagacagaggtctaacatcacatggtaggtatgggaaaggaatactgtagcggtctgtaattgcttttggtttgtgacttcccacaaaaaggaacagaccctgttccccaaagcccaggtctgctgcttggcttatgacctacacctaatagagtaactcagccgtctgataacagtggcccaatggttagcatc

SEQ ID NO: 667191 - DNA, 616 bp, Homo sapiens
ttggtttaactaaatacattaactctctgatgtaaaattaataatttatctttactatttcaaagagactcaaaaataaccagtacacaaacatcttcactaagttttctttgtgcagcatttgtatgtggtgacttttttttttgagacggagtcttgctctatcacccaagctggagtgcaatggtgccatctcagttcactgcaacctccgcctttcgggctgaagcaattctactgcctcagcctcccaagtaggtgggattacaggcgcccaccactgtgcscatctaatttttgtattttttagtagagaccgggtttcaccatgttggtcaggctggtctcgcactcctgacttcaggtgatccacccacctgggcctcccaaagtgctgggattacaggcgtcagccaccacacctggccgtatatggtgacttttgttgttatttgggtcaagaatggattcatattagactttattaggttctctttttctatttcattttactaagagaacttctttatgttactagttattatagtctccaagcagatctaaaaatgattttttttctctattttagcaccaactaattctgctgttttggaca

SEQ ID NO: 667192 - DNA, 616 bp, Homo sapiens
ttggtttaactaaatacattaactctctgatgtaaaattaataatttatctttactatttcaaagagactcaaaaataaccagtacacaaacatcttcactaagttttctttgtgcagcatttgtatgtggtgacttttttttttgagacggagtcttgctctatcacccaagctggagtgcaatggtgccatctcagttcactgcaacctccgcctttcgggctgaagcaattctactgcctcagcctcccaagtaggtgggattacaggcgcccaccactgtgcgcatctaatttttgtattttttagtagagaccgggtttcaccatgttggtcaggctggtctcgcactcctgacttcaggtgatccacccacctgggcctcccaaagtgctgggattacaggcgtcagccaccacacctggccgtatatggtgacttttgttgttatttgggtcaagaatggattcatattagactttattaggttctctttttctatttcattttactaagagaacttctttatgttactagwtattatagtctccaagcagatctaaaaatgattttttttctctattttagcaccaactaattctgctgttttggaca

SEQ ID NO: 667193 - DNA, 580 bp, Homo sapiens
cgccgtctctactgaaaatacaaaaaaatcagtcgggcgtggtagtgggcacctgtaatcccagctactcgggaggctgaggcaggagactggcgtgaacscaggaggcggagcttgcagtgagccgatcgtgccactgcactccagcctgggtgacaaagcaagactccgtctcaaaaacaaacaaacaaacaaacaacaaccaaagtaatccgtggaccatgcctgttctgagccaaccaggtgctggggacaggccctccccaaccagggccacgctggggcatacagtatgggctgaggctgccccagagctgggctctgggagttcttaggaggcagtggaggccagggaggagagagtggcccaaccctctgagaaactgaaccaaaaggagagttttgaacaaagaaggtacaggctccagcaagatctcagacctggccaggcgcagtggctcacgcctgtaatcccagcactttgggaggcctaggcgggcggatcacttgaggtcaggagttcaaaaccagcctggccaacatggtgaaactccgtctctactaaaaatgctaaaaatta

SEQ ID NO: 667194 - DNA, 991 bp, Homo sapiens
tgaacattattcactgaagaatcaaataatactatttgattcgttaaaaaatgaaatataatttctctgtcaacacacttgaagggtctattttttcttacacactataaattgctagaaacactgcaacattttagtttgatttatatttggaccaatactttcttataagatttctgtttttcttaaagcttctacagttgaatttattggaggagtggagggagtttctattctccaaaggatatgtttgctagaatatagaaatcaaaatagtaataataaaaagattctgagaattaatggtataatttcgaagttttgttccctcaaatctcatgttgaaatgtaatccccaatgctggaggtgtggcctggtgggagctgtttgagtcatgggggtggatccttcataaatggcttggtgctctccccatggtaatgagtgagttctcactctgagttcacacaagatctggttgtttaaaagagtgtggtgctgagtgcggtggctcacacctgtaatcccaacactttgggaggctgaggcgggcrtatcacctgaggtcaggagttcgagaccagcctggccaacatggtgaaacctccgtctctacttaaaatacaaaaaattaggtgtgtgtggtggtgcacacctgtaatcccagctactcaggaggctgaggcaggagaattgcttgaaccctaggcggaggttgcagtgagcagagattgccccattgcactccagactgggggacaagagagagacttcatttcaaaaaaaaaaaaaaaaaaagagtgtggcaactcctaccacttttctttataaattacccagtctcaggtattcctttatagaaaagcaaaataaactaacacaattaataacctgtaaaatttttcaggtatttttcttattttcctgtcttgcttcttagtgcagcttgatgaatgttgagtcgaaatttgaccttatattctcaaccta

SEQ ID NO: 667195 - DNA, 991 bp, Homo sapiens
tgaacattattcactgaagaatcaaataatactatttgattcgttaaaaaatgaaatataatttctctgtcaacacacttgaagggtctattttttcttacacactataaattgctagaaacactgcaacattttagtttgatttatatttggaccaatactttcttataagatttctgtttttcttaaagcttctacagttgaatttattggaggagtggagggagtttctattctccaaaggatatgtttgctagaatatagaaatcaaaatagtaataataaaaagattctgagaattaatggtataatttcgaagttttgttccctcaaatctcatgttgaaatgtaatccccaatgctggaggtgtggcctggtgggagctgtttgagtcatgggggtggatccttcataaatggcttggtgctctccccatggtaatgagtgagttctcactctgagttcacacaagatctggttgtttaaaagagtgtggtgctgagtgcggtggctcacacctgtaatcccaacactttgggaggctgaggcgggcatatcacctgaggtcaggagttcgagaccagcctggccaacatggtgaaacctccgtctctacttaaaatacaaaaaattaggtgtgtgtggtggtgcacacctgtaatcccagctactcaggaggctgaggcaggagaattgcttgaaccctaggcggaggttgcagtgagcagagattgccccattgcactccagactgggggacaagagagagayttcatttcaaaaaaaaaaaaaaaaaaagagtgtggcaactcctaccacttttctttataaattacccagtctcaggtattcctttatagaaaagcaaaataaactaacacaattaataacctgtaaaatttttcaggtatttttcttattttcctgtcttgcttcttagtgcagcttgatgaatgttgagtcgaaatttgaccttatattctcaaccta

SEQ ID NO: 667196 - DNA, 1378 bp, Homo sapiens
tgcatacatgtatgtgtatgcgtgtatttttaaaatcagtatttgtagtaacatatcaaaaaggaatttctaatattccaaggttctaatgttagaatagaaacatattcacaatagtgtttaccagtttcatatatttagagtagtttcacactaaaatgagtgattaggctaggcacggtggctcatacctgtaatcctcgtactttgggaggccaaagcaggggggcttgcttgagctcaggagttccagaccagcctggggaacatagtgagaccctgtctctacaaaaaacatttttttttttaaattagctcctcacagtgacacgtgcacctataattccagctacaggggaaactgaagtgggagtatgacttgagctgaggagttagaggcttcagtgagccatggtggcaccactgcactctatcctgggtggcagagtgagagcctgttgcaaattaaaataagtgattaggacaaaaaagatatagggccaaataaatagaatgcttacccacctcaaataaaaagaaaataatatttgttaatatgaaggtgatactggataagtgaagtgcctaggacttttttcttaaataatctagtatattttatgtgaataagggactataaagtagggagatcagcaggactgtaaaagtgggtgtgggagaagaaagtttgctagtcaaacttggtttaaattgactgcctttgtaatagcatgtggctgaatgttttgatctatttataatgaatattttaaggatttgctaatttttgaaaattggcaagaaatactcatttttttcctgtcttgaggtatgccaaaaataaaacttgctagaataaaaaaaaatgaaagtgaaggaatgtcttgtgtgtgctaaaacacctccacttaaagagtttgatatccactagaaaatgttgtttctttaaaaaggggayaaagggcatttgatgcttctcacctttcacggttgtgacaattctcttagacatcttaaattctctaagtggagatttcttatattcttcacagtacacctgtttaaaaattgtagtccacagaaatctgaaactacaaaagaaacttttctcaagatgataactcacaaggagtgtaaattacagttacttcatttgtgggagttttcctatcacttttcaattaataagacaccctggttatgggaattttagtctcactgaaaaactcaatttttctatgcaaattaaatttgcgtatgcaagttacaatttgagtttaagcttaggcctacgctgatggagggataacaggcaaactggaatgtggtacttgaccatacttagtcagtgcaggaaaaacaacaaaaaaatcttcag

SEQ ID NO: 667197 - DNA, 1378 bp, Homo sapiens
tgcatacatgtatgtgtatgcgtgtatttttaaaatcagtatttgtagtaacatatcaaaaaggaatttctaatattccaaggttctaatgttagaatagaaacatattcacaatagtgtttaccagtttcatatatttagagtagtttcacactaaaatgagtgattaggctaggcacggtggctcatacctgtaatcctcgtactttgggaggccaaagcaggggggcttgcttgagctcaggagttccagaccagcctggggaacatagtgagaccctgtctctacaaaaaacatttttttttttaaattagctcctcacagtgacacgtgcacctataattccagctacaggggaaactgaagtgggagtatgacttgagctgaggagttagaggcttcagtgagccatggtggcaccactgcactctatcctgggtggcagagtgagagcctgttgcaaattaaaataagtgattaggacaaaaaagatatagggccaaataaatagaatgcttacccacctcaaataaaaagaaaataatatttgttaatatgaaggtgatactggataagtgaagtgcctaggacttttttcttaaataatctagtatattttatgtgaataagggactataaagtagggagatcagcaggactgtaaaagtgggtgtgggagaagaaagtttgctagtcaaacttggtttaaattgactgcctttgtaatagcatgtggctgaatgttttgatctatttataatgaatattttaaggatttgctaatttttgaaaattggcaagaaatactcatttttttcctgtcttgaggtatgccaaaaataaaacttgctagaataaaaaaaaatgaaagtgaaggaatgtcttgtgtgtgctaaaacacctccacttaaagagtttgatatccactagaaaatgttgtttctttaaaaaggggacaaagggcatttgatgcttctcacctttcacrgttgtgacaattctcttagacatcttaaattctctaagtggagatttcttatattcttcacagtacacctgtttaaaaattgtagtccacagaaatctgaaactacaaaagaaacttttctcaagatgataactcacaaggagtgtaaattacagttacttcatttgtgggagttttcctatcacttttcaattaataagacaccctggttatgggaattttagtctcactgaaaaactcaatttttctatgcaaattaaatttgcgtatgcaagttacaatttgagtttaagcttaggcctacgctgatggagggataacaggcaaactggaatgtggtacttgaccatacttagtcagtgcaggaaaaacaacaaaaaaatcttcag

SEQ ID NO: 667198 - DNA, 1378 bp, Homo sapiens
tgcatacatgtatgtgtatgcgtgtatttttaaaatcagtatttgtagtaacatatcaaaaaggaatttctaatattccaaggttctaatgttagaatagaaacatattcacaatagtgtttaccagtttcatatatttagagtagtttcacactaaaatgagtgattaggctaggcacggtggctcatacctgtaatcctcgtactttgggaggccaaagcaggggggcttgcttgagctcaggagttccagaccagcctggggaacatagtgagaccctgtctctacaaaaaacatttttttttttaaattagctcctcacagtgacacgtgcacctataattccagctacaggggaaactgaagtgggagtatgacttgagctgaggagttagaggcttcagtgagccatggtggcaccactgcactctatcctgggtggcagagtgagagcctgttgcaaattaaaataagtgattaggacaaaaaagatatagggccaaataaatagaatgcttacccacctcaaataaaaagaaaataatatttgttaatatgaaggtgatactggataagtgaagtgcctaggacttttttcttaaataatctagtatattttatgtgaataagggactataaagtagggagatcagcaggactgtaaaagtgggtgtgggagaagaaagtttgctagtcaaacttggtttaaattgactgcctttgtaatagcatgtggctgaatgttttgatctatttataatgaatattttaaggatttgctaatttttgaaaattggcaagaaatactcatttttttcctgtcttgaggtatgccaaaaataaaacttgctagaataaaaaaaaatgaaagtgaaggaatgtcttgtgtgtgctaaaacacctccacttaaagagtttgatatccactagaaaatgttgtttctttaaaaaggggacaaagggcatttgatgcttctcacctttcacggttgtgacaattctcttagacatcttaaattctctaagtggagatttcttatattcttcacagtacacctgtttaaaaattgtagtccacagaaatctgaaactacaaaagaaacttttctcaagatgataactcwcaaggagtgtaaattacagttacttcatttgtgggagttttcctatcacttttcaattaataagacaccctggttatgggaattttagtctcactgaaaaactcaatttttctatgcaaattaaatttgcgtatgcaagttacaatttgagtttaagcttaggcctacgctgatggagggataacaggcaaactggaatgtggtacttgaccatacttagtcagtgcaggaaaaacaacaaaaaaatcttcag

SEQ ID NO: 667199 - DNA, 1378 bp, Homo sapiens
tgcatacatgtatgtgtatgcgtgtatttttaaaatcagtatttgtagtaacatatcaaaaaggaatttctaatattccaaggttctaatgttagaatagaaacatattcacaatagtgtttaccagtttcatatatttagagtagtttcacactaaaatgagtgattaggctaggcacggtggctcatacctgtaatcctcgtactttgggaggccaaagcaggggggcttgcttgagctcaggagttccagaccagcctggggaacatagtgagaccctgtctctacaaaaaacatttttttttttaaattagctcctcacagtgacacgtgcacctataattccagctacaggggaaactgaagtgggagtatgacttgagctgaggagttagaggcttcagtgagccatggtggcaccactgcactctatcctgggtggcagagtgagagcctgttgcaaattaaaataagtgattaggacaaaaaagatatagggccaaataaatagaatgcttacccacctcaaataaaaagaaaataatatttgttaatatgaaggtgatactggataagtgaagtgcctaggacttttttcttaaataatctagtatattttatgtgaataagggactataaagtagggagatcagcaggactgtaaaagtgggtgtgggagaagaaagtttgctagtcaaacttggtttaaattgactgcctttgtaatagcatgtggctgaatgttttgatctatttataatgaatattttaaggatttgctaatttttgaaaattggcaagaaatactcatttttttcctgtcttgaggtatgccaaaaataaaacttgctagaataaaaaaaaatgaaagtgaaggaatgtcttgtgtgtgctaaaacacctccacttaaagagtttgatatccactagaaaatgttgtttctttaaaaaggggacaaagggcatttgatgcttctcacctttcacggttgtgacaattctcttagacatcttaaattctctaagtggagatttcttatattcttcacagtacacctgtttaaaaattgtagtccacagaaatctgaaactacaaaagaaacttttctcaagatgataactcacaaggagtgtaaattacagttacttcatttgtgggagttttcctatcacttttcaattaataagacaccctggttatgggaattttagtctcactgaaaaactcaattkttctatgcaaattaaatttgcgtatgcaagttacaatttgagtttaagcttaggcctacgctgatggagggataacaggcaaactggaatgtggtacttgaccatacttagtcagtgcaggaaaaacaacaaaaaaatcttcag

SEQ ID NO: 667200 - DNA, 1378 bp, Homo sapiens
tgcatacatgtatgtgtatgcgtgtatttttaaaatcagtatttgtagtaacatatcaaaaaggaatttctaatattccaaggttctaatgttagaatagaaacatattcacaatagtgtttaccagtttcatatatttagagtagtttcacactaaaatgagtgattaggctaggcacggtggctcatacctgtaatcctcgtactttgggaggccaaagcaggggggcttgcttgagctcaggagttccagaccagcctggggaacatagtgagaccctgtctctacaaaaaacatttttttttttaaattagctcctcacagtgacacgtgcacctataattccagctacaggggaaactgaagtgggagtatgacttgagctgaggagttagaggcttcagtgagccatggtggcaccactgcactctatcctgggtggcagagtgagagcctgttgcaaattaaaataagtgattaggacaaaaaagatatagggccaaataaatagaatgcttacccacctcaaataaaaagaaaataatatttgttaatatgaaggtgatactggataagtgaagtgcctaggacttttttcttaaataatctagtatattttatgtgaataagggactataaagtagggagatcagcaggactgtaaaagtgggtgtgggagaagaaagtttgctagtcaaacttggtttaaattgactgcctttgtaatagcatgtggctgaatgttttgatctatttataatgaatattttaaggatttgctaatttttgaaaattggcaagaaatactcatttttttcctgtcttgaggtatgccaaaaataaaacttgctagaataaaaaaaaatgaaagtgaaggaatgtcttgtgtgtgctaaaacacctccacttaaagagtttgatatccactagaaaatgttgtttctttaaaaaggggacaaagggcatttgatgcttctcacctttcacggttgtgacaattctcttagacatcttaaattctctaagtggagatttcttatattcttcacagtacacctgtttaaaaattgtagtccacagaaatctgaaactacaaaagaaacttttctcaagatgataactcacaaggagtgtaaattacagttacttcatttgtgggagttttcctatcacttttcaattaataagacaccctggttatgggaattttagtctcactgaaaaactcaatttttctatgcaaattaaatttgcgtatgcaagttacaatttgagtttaagcttaggcctacgmtgatggagggataacaggcaaactggaatgtggtacttgaccatacttagtcagtgcaggaaaaacaacaaaaaaatcttcag

SEQ ID NO: 667201 - DNA, 844 bp, Homo sapiens
ttttccttgactgacatcagagttaagcagaacagaaactagtcctttatgttggattatatggattagaacattacaagtataatctgttttgctcccttgaatttgagggagtgaatttggaactgggttgccacgtcttccaggctcaaactaaatactgtgccagggaaagagctgggtcagagcttgtaaaaatgcaataaaatttcctgtcagtttgaatatrgctttatgttgatgggttatttgcttggttgccgtagacttttgaatgttttccaaagcttaatttagtcatttttggtggttattggtgtgtgtgtgtgtgtgtgtgtgtgtgtgtgtgcgtgcacgtgtgtatgtgtctgtgtgtcacctggggaaaggttttggagtttattagatatttttctgtcctctattattaacatcttacattggcatggtgcatctgttacaatttatgaacaatattaatatattatgatcaactaaagtctatagtttactcagagttccttcatttttacctaatgtccttttcttattccagaatctcatccaatgtactatattacatttagttgttatgtctacttaggacgttttggctatgaccgtttttcttgattttgatgtccttgaaagttctgaggagtactcattaattatgccccgccactagaattttttaatgctttttttttctaattatactgggactttgggtttttggaagcaagatcacagaggtaaaatcacattgacataatgtcatacagaggtaaaatgtatcacattacatcaaggacacactgtgtccacatgatttatatctatt

SEQ ID NO: 667202 - DNA, 844 bp, Homo sapiens
ttttccttgactgacatcagagttaagcagaacagaaactagtcctttatgttggattatatggattagaacattacaagtataatctgttttgctcccttgaatttgagggagtgaatttggaactgggttgccacgtcttccaggctcaaactaaatactgtgccagggaaagagctgggtcagagcttgtaaaaatgcaataaaatttcctgtcagtttgaatatagctttatgttgatgggttatttgcttggttgccgtagacttttgaatgttttccaaagcttaatttagtcatttttggtggttattggtgtgtgtgtgtgtgtgtgtgtgtgtgtgtgtgcgtgcacgtgtgtatgtgtctgtgtgtcacctggggaaaggttttggagtttattagatatttttctgtcctctattattaacatcttacattggcatggtgcatctgttacaatttatgaacaatattaatatattatgatcaactaaagtctatagtttactcagagttccttcatttttacctaatgtccttttcttattccagaatctcatccaatgtactatattacatttagttgttatgtctacttaggacgttttggctatgaccgtttttcttgawtttgatgtccttgaaagttctgaggagtactcattaattatgccccgccactagaattttttaatgctttttttttctaattatactgggactttgggtttttggaagcaagatcacagaggtaaaatcacattgacataatgtcatacagaggtaaaatgtatcacattacatcaaggacacactgtgtccacatgatttatatctatt

SEQ ID NO: 667203 - DNA, 895 bp, Homo sapiens
tgcctattctggatatttcatatcaatgaaaatctgacaccatgtggccttttatgtctggcttctgtcactcagcatcgtgttttcgaggtttgtccatgctgtagcatggatcagtgctacagtcttttttttttgagacagggtcttgctctcttgcccaggctggagtgcagaggtgcaatctcggctcactacatcctctgcctcctgggttcaagcgattcttctgcctcagcctcccaagtacctgggattacaggcatggggcaccactcctggctaatttttgtatttttggtagagatggggtttcaccatgttggccaggctggtctcaaactcctgacctcaagtgatccacctgccacagcctcccaaagtgctgggattacaggcctgagccactgtaattgcccggcctacaatcatattttgttgtacggatggaccacattttgtttatccatttatttggtgggttttgtctttyggatgttgttaaccgtccacctaccgtttgtaagtttgttgacatcttatctccaatctccccatggggagagacggagacctgtctcttcccatctgccttagcatccttgcttctgaagacagctctcaggaagtagcagggcgtgaggaagggatgaagggtgggtgtctgtgtcaccacagcccagaggtgcggagccacgtggtgtctccatgctgtggcttaaagtgttggaagtttgtggccaaggccagttcaccggggaccccaggtccagtatgggtttcctaacggtgggcttgcgtcacattagataaaagacctgagagagaactctggagggcaagggggcatctggttggtatttctgcctgattgccatttgtctggggcctggag

SEQ ID NO: 667204 - DNA, 3144 bp, Homo sapiens
tgtcacctcctcaaaggactttcttccctgaccacccgatgaacatttttcatctcccatcatgccctcacgtttcatcccaggcacttattgaaatttgcagtcacttgattcacttcttattttctcctgtactcgtggcctccctgtgttttcctccctagggggaacggggccctgagataccttaggactggctagtgaaggagctgggacaaggagatggcagggtgggggaaagtttggggatggggccagggagagtattgtttggggccaaatgggaaaagtcttcttctcccaggagatttgggtcctgcacaggtgactccgtggtttccccctttgggttctgtccctggaagtgggtacacgctggtgtgatcctctaagcttgggaaagggcacaggtgacagtggtcagggcagtggcttcctgtgaggaggcaagttcaggcttcaggaacagagaattggctgatgtggggtgtcaggtgggcagggcaaggcgccaaggaaggaattctagctgggcttgccgcctgcactggagcctgctgctccaaggcgcctgaccaggcaacgtttagctgtcacctgctccaaagaagcagcttgagcttgtacctcttctcaggctccgcctcactcctctcctcttgcttcctgctcctccctccctcccactaagattctctcaccagctcacatgcaccgcctgctcttgagcagcttcttggaaagccaagttccagtctgcctttgggaacccaccacctttccaggttcttagccgcacagaggactgggaargaatgctgtgatttaattcaatgtgcccttcagaagccactggaaactttaaatagcaagtatcattcttcccccttccttcatgcataggaaaaaagagtaaaaggagaaagccccagatttataacagattatccctaatcacaggatcatgagggatttttttttctgtatatattttgtattttctgttttccctaatgagcatgtatatattttaattatataaaaataaggcctggtgcagtagatcacacctgtaatcccagcactttgggaggccaaggcaggtgtatcatttgaagtcaggagtttgagaccagcctggccaacatggtgaaaccctgtctctactaaaaatacacaaattagctgagtggtagtggcagtcatctatattcccaactactcgggaggctgaggcagtagaatcgcttgagcgtgggagacgaaggttgcagtgagctgagatgatgccactgcactccagtctaggcgagagagtgagaccctgtctcaaaaacaaaataaaataaaataaaataaaataaaaaataaaggttattactgtagaagggccttgtagttggcgggagctggtctaatatgaccaaagcatctactcctaatttaatgaagggattttgttgatgggagaaacaaagcttttccagagggtatttgcagcaggagtgaggggcataaagtcaagggcaaacagacccaagaggaagctgagttcacggacaggcgcaggtggctgcttctccatccccaggctgaggggactggcatgtgtcacctccatggtaggacttgagcaaaccccaaagggtcatccattggacatgaaatccttggagataaaatatctttgcctcaaaacatccccatgaagtgtagatgtctggatggagtaatccaatgagttttcttcagctattcatgtcttagcatcgatgaaagtattgattttttttcttgaacaaggttcagccaaggtgagcgtgggtggaaggccacagatattcttcagaatcagggttttctcccagtcacacaagtccagagggtgccctggctggggcccttcacgtgggcgagcaaaatgctctgtcttctatttctaatcactcgccatgacaattgtgggcagtttgtgtgatgctgtgtggcagaaactctacctcaatcgtcaaaggggaatgagtttaggaagacaagagaggaaataaaatacttaatttaagaattataaaacattttcaaaaataaaagtagcataaagaatacttggatatctttgcctggatttctactctgacatttataatacaaatgtaatatgcatgatgtaaataatatcatgtataatgtcataaatgtaatgtaaataatcaatgtacctgctattatatttttctctttgctttattgtctactctctctctgtttattttgtaagttacacacattgtggtcctaaatacttcagtgtgtgctcctaggagcagggggctctcctacctggccacagtgccaacgtccatgtgtttaaactgagacaaaactgttatccaccgtttctatgccacttaacccagcaatgtctgcttgaacgttttcctctccagtagagtctaagggcagggattacattttttccttgtcatgtctctttagccttgcttaatccaggacatttctaatcttccctcctcttctgtaattttgaaattttaaaataatttttttgagatggggtcttgctctatagcccaggctggagtgcagtggtgtactcatggctcactgcaacctcagtctcttgggctaaaatgatcctgccgcctcagcctcccaatagctgggattaactttgacattcttgaagaacacagatcccaacatttccttccctttttaataggatattcctcattttggcttcatctgatgtttccttgacatagattgaaattatgcatctcttaacccttacctctggccctcaacagtacttaatcaatctgtctattattgtattcctctgcattctcatttccccaatgttttataattcattacttcacctgattgttttcataatcaaatcagtgacccaggcgctcacgcatctttgtggcatgtttcacctaaggaagtgaagaagagcgagcgcctccttactttccggcataacaagctgttccatacccagctgcttttctccaatctggaggccgccatttccccaagtagccctggccccctaagagactaaacttgagccctaagtgtgctccatactcttgacctttatgtggacag

SEQ ID NO: 667205 - DNA, 712 bp, Homo sapiens
atctatttctaataaaacattttattactagatctctttgcaattggtaatctattttcatttttttttagcgcttttgattcccgtaacaccccccattaagtaaaatgaatatgcatatgttttcagatgtgggaacagaatcctaaagaaggtgattgatgtgtccaagtttatatyaattataaacagcagagccaaaactggatttcaggggctgttgcctcagtcagatttttttttacagcatcctaattcctgaaaaggtatgcttaagtcagtggtctacctagatatttctttcttacttatttcaagctgctgtttcctatcagtttatttacttgacttttatttctccattaagtacctaaattaatagagaaataagtgttcatccaatataactgagccagtagtttgaaatttttattaaatgttaggaaacgaaatgtgcagttatagccaaagattagaagaattataggaaaacagtactgggtgctgttgtatgaacattaaaaaatcagtttcaggcatcatttcaaattttttacctcattttcccactgactccaattttctgaatcattcctttattttttagaatgtggtttaatcacatacattttgaagctgccttaaatcactctgtaacaaaatggattataaataaactaatgaattatatacaactgtagttagttttgca

SEQ ID NO: 667206 - DNA, 630 bp, Homo sapiens
tggaataaactacctcatagcagttataccccaggcaataattcaaggtttcatttttaatttgatcgggtagattttaattgtgacagttttattctttcatatgtgcagtgtttacatttttttctctgaagcaggaggggccaaagttcttttgatttttggaacagcattatgctttgaaggaactcattaaaatctaaggagttgagtctccagataaacaagaccataaatggtacccttagaaaatatctagaattgttacaaggttgactaaagcccagtagagattttgatgtgaaacaatgaattgtaaatgaagaatcactttgggctgggtttcgtttcttctttttaacatgcagaattgcttgattttttaaaaaatgtaatatgtctttcrctacccttctccttagttcccattttgctatatacaaaaatcccagaagcagaaaatgaaaacgttgtttaattattgagctatctttttcaaaaagttttgaagtttttgtattgataagaaaaatagcttaagaacttagaaaaaatctgatgataatcagttgggaaagaaaatgtattttcccactctagaaatgaacagcaagaagactgtgctgcagc

SEQ ID NO: 667207 - DNA, 624 bp, Homo sapiens
actgcaaccgcttcccaggttcaagccattctcctgcctctgcctcccgagtagctgagacgacaggtgtgcaccaccatgcccagctaattttatatttttagtagagacaggatttcaccatgttggccaggctggtcttaaactcctgacctccagtgatccgcccgccttggcctctcaaagtgctgggatgacaggggtgagacacygcacctggccttccagctttactatgctgaaaacaactttcttcctcccctccagtgcaacccaggctgagcggggatggagactccacaggccaataaggagagccccgagacagcatcttgcatcccgctgctaacaggaggggcttcctgcaacaggaccaggcatctgtggtggatgagcactgggactttattacacggcacggcactcgtgacaacggaaggggtgggcagaaatgcaggccggaacattccacagtccagggacggttggtcattcagaaagtatgtatttccagaacactcagtagtaaggccgtctgggattgttctgtggaaggcaaaacagataacaggaggaggggattagcactaaagacagcagttcctcctgtctggaaccttccgg

SEQ ID NO: 667208 - DNA, 662 bp, Homo sapiens
tgccacggcactccagcctgcgtgacagagtgagaccctgtctcaaaagaaaaaaaaaaagaataaagttggaaaaattaactcaaaatggaccaaaaaccctgggtgcaatggctcatgcctataattccaacactttgggaggccaaggcaggaggattgcttgaactcacgaattcaagaccagcctgagcaacatggtgaaactccatctctacaaaaagtacaaaagttagccaggtgtgctggcatgcacttgtagtcccacctacttgggaggctgaggtgggaagaccacttgagcttggggaggtcgaggctgcagtgagtagccactgcactccagcctgggtgacagagtgagactcaaaaaaaaaaaaaaaaacccaaaataggctaaagacctaaatttaagaactaaaggtacaaaactctcggtaggaaacacaggggyaaattttcatgcccggatttggcaattgttccttaaaaatgacaccaaaagcataaaccacagaagaaaaaatagatacatttgacttcattaaaattccatttctagggagggctggattacagcaggcactgggagaccgcacaactacctgccccctccctggcactaccatcccctggagggtctgccttcagttcaaaaaaaa

SEQ ID NO: 667209 - DNA, 662 bp, Homo sapiens
tgccacggcactccagcctgcgtgacagagtgagaccctgtctcaaaagaaaaaaaaaaagaataaagttggaaaaattaactcaaaatggaccaaaaaccctgggtgcaatggctcatgcctataattccaacactttgggaggccaaggcaggaggattgcttgaactcacgaattcaagaccagcctgagcaacatggtgaaactccatctctacaaaaagtacaaaagttagccaggtgtgctggcatgcacttgtagtcccacctacttgggaggctgaggtgggaagaccacttgagcttggggaggtcgaggctgcagtgagtagccactgcactccagcctgggtgacagagtgagactcaaaaaaaaaaaaaaaaacccaaaataggctaaagacctaaatttaagaactaaaggtacaaaactctcggtaggaaacacaggggtaaattttcatgcccggatttggcaattgttccttaaaaatgacaccaaaagcataaaccacagaagaaaaaataratacatttgacttcattaaaattccatttctagggagggctggattacagcaggcactgggagaccgcacaactacctgccccctccctggcactaccatcccctggagggtctgccttcagttcaaaaaaaa

SEQ ID NO: 667210 - DNA, 615 bp, Homo sapiens
ggccaggagttaaagaccagcctggccaacatgatgaaaccccatctctactaaaatacaaaaattagccgggcacgatggtgggttcctgtaatcccagctactcgggaggctgagcaggagaatcacttgagcccaagaggcggaggtcgcagtgagccaagatcacaccactgcactccagcctgggcggctgagtgagactctgtctcaaaaaataaaataaataaataaataaataaataaataaatagccgggcatcgyggcgcacactggtaatcccagctactcgagaggctgagcaggagaatctcctgaatccaacaggcggaggttgtagtgagccgagatggcaccactacactccagcctgtgtgacagagcaagactcgtctcaaaaataaataaattaattaattaaataaaattaaaaaaaacagaaaaacacctcaacactcaaccagtgcttgtctctgtgttgcagagttatgagtgactttggttttttgtttacccctcttctacttcctggatttcctaccatgtacatgaattacctttaaagtttaaaaaaagaaggagtagaagtaattttatatgaaaaagaaggttca

SEQ ID NO: 667211 - DNA, 1365 bp, Homo sapiens
tggcttctccaggttcgcaccgaggggaagttggggtaccggtttccgccgccagcacccaagatggcggcacgagcgtcgcaaccacaagaaccacatgcttcgtgtcccgcctcagcattctcgggtctcactagacttttgcaagtcactgtgggaaccctcaaggcgagggtgttccgcactctggcggcgatacaccttcctattccctgacctaggccttcattcccccgccacagaaagcgctggaagcgcccaacctggatacttcacccaacgcccaagcccactaacatcgcccgccgcgaaggcgcggccgaggggcccagaatgccagacactagggccttcgccctcctcattggtgggtccataccgcggggcgggcctaggtactcattgggccgggaattatgtcagtcttgggaaatcaggtccggggatgaggaggtacactcagccattgggccctctctgctgccaatcagagggacatccgtcgacggccccggcctcggctcgttgattggagaaactgttcctagggtgtttgcggcgggcgggtttccgagtgcggtagcaggagggggcggggaggtaagcggaggctccgagctctaggccggccggcggtggcggcggcgaggccgggactcgggcttagggcctgctgtggaggcagcggcggacgccgagctaagcagtgggtatcgggcacattcctttcccagaagggagggttgcagcgccgcggggccgaggcttatggggcgacgggatggtgctgaggtgcaggaggcgggggccgagcggggttcccgccagagcccggccctgggcctgacagggaggggccccgcgcggggccgagaggaaagctggctccggggtgggatggactgggcagggttgagggcacgagaaggcgtggtgtgaggcctggacttgggagtggggtggggccatcgggacggagggcggggtggggtttgctgtaagggtgggtcaaggccagggaagtagcacttgttcgctggccgcccctggaggctagaagctccggcgccgagagtgggcatggcgacttggtctcagccggactcgggtatccgggcagggtgggaccagcctcaggctatgggccctgcacctacttgatttttaagggactttgtccggttcctcgaacttaattggctcctgggaggttttagtaataaattgcgtgagaacgggagggtagcgtaagcargaattctgggtcgcaattgtgtttactctgaccagagagagggagtgtgagtgtgtgtgtgtgcgcacgttcgtgtgtgtacgtatagctcgctctccccctgtagaatg

SEQ ID NO: 667212 - DNA, 600 bp, Homo sapiens
tggctcgtgatccctggccttgagaactggccactgccttcctgaggaatgggataactctttccacttccagcaaataatttagattcccagagaatctgcgggagaagtgtctgcccagtcctgagtgggctggatgagcaagatgcgacaggagggaggagagtggcaccccttcccccagggctctcactgcgccaccccagctgastgactgggctgggtggggctgcccgcccctgggcgcatctcctcaaggagacggaggcggcccagggatgggctggttccttgcggcagcttctccagctgccctgatgcagagattggctcccgtctgcagctaggtaacaggcggtgggaggggattggctccttccgcatctccagcggagacttgggggaggagattggctctcggcgcagcctaggtaacgacagtgggaggggattggctctttgcgcagcccagctgctgacctgggggaggggattggctctctgcagcctcagcagtgacctgcggggtgggagggggtggggattggctccctgctgcagcctaggtaacaagtttggggggcgtgggggggaggagcg

SEQ ID NO: 667213 - DNA, 600 bp, Homo sapiens
tggctcgtgatccctggccttgagaactggccactgccttcctgaggaatgggataactctttccacttccagcaaataatttagattcccagagaatctgcgggagaagtgtctgcccagtcctgagtgggctggatgagcaagatgcgacaggagggaggagagtggcaccccttcccccagggctctcactgcgccaccccagctgactgactgggctgggtggggctgcccgcccctgggcgcatctcctcaaggagacggaggcggcccagggatgggctggttccttgcggcagcttctccagctgccctgatgcagagattggctcccgtctgcagmtaggtaacaggcggtgggaggggattggctccttccgcatctccagcggagacttgggggaggagattggctctcggcgcagcctaggtaacgacagtgggaggggattggctctttgcgcagcccagctgctgacctgggggaggggattggctctctgcagcctcagcagtgacctgcggggtgggagggggtggggattggctccctgctgcagcctaggtaacaagtttggggggcgtgggggggaggagcg

SEQ ID NO: 667214 - DNA, 651 bp, Homo sapiens
atcaatctccacttgtccttgttggaatcagagtcaagcccaatctttcttccccactgcaccgmaagttcccattgcagtggtccctacacctattgcaatggtccctccttaggaccttcctcaccttatttaacaagtgttataaataatgcttttctttaacagttataacatattcaactaatataaatgtatcatctgattgcaacatcttagtgtaggacagagcacagcctgtataaccataacaactactgtattgaattccaaacccaaggtacattgtcagagcaactgtggaattttacatttcttctgtacatgccatcacttatcccacagtccattacccctagcacgccgagataagctgcatgagtttagtcgcttcctttctggctgtaacagaacatggaattggaaataatgtggtgggcagaattgtcaactattatttaaacacagatttttcttttgctttgattgctgactttattgtgccaattttaaatagcatttctttttttaaagggaaaatgttgacttaaggtttccttggtaaaaattaatgatttcatttaaaaataattgtatcataataactaaaaactcttaattaaagcatagtattggaagttaaggatccaa

SEQ ID NO: 667215 - DNA, 651 bp, Homo sapiens
atcaatctccacttgtccttgttggaatcagagtcaagcccaatctttcttccccactgcaccgaaagttcccattgcagtggtccctacacctattgcaatggtccctccttaggaccttcctcaccttatttaacaastgttataaataatgcttttctttaacagttataacatattcaactaatataaatgtatcatctgattgcaacatcttagtgtaggacagagcacagcctgtataaccataacaactactgtattgaattccaaacccaaggtacattgtcagagcaactgtggaattttacatttcttctgtacatgccatcacttatcccacagtccattacccctagcacgccgagataagctgcatgagtttagtcgcttcctttctggctgtaacagaacatggaattggaaataatgtggtgggcagaattgtcaactattatttaaacacagatttttcttttgctttgattgctgactttattgtgccaattttaaatagcatttctttttttaaagggaaaatgttgacttaaggtttccttggtaaaaattaatgatttcatttaaaaataattgtatcataataactaaaaactcttaattaaagcatagtattggaagttaaggatccaa

SEQ ID NO: 667216 - DNA, 651 bp, Homo sapiens
atcaatctccacttgtccttgttggaatcagagtcaagcccaatctttcttccccactgcaccgaaagttcccattgcagtggtccctacacctattgcaatggtccctccttaggaccttcctcaccttatttaacaagtgttataaataatgcttttctttaacagttataacatattcaactaatataaatgtatcatctgattgcaacatcttagtgtaggacagagcacagcctgtataaccataacaactactgtattgaattccaaacccaaggtacattgtcagagcaactgtggaattttacrtttcttctgtacatgccatcacttatcccacagtccattacccctagcacgccgagataagctgcatgagtttagtcgcttcctttctggctgtaacagaacatggaattggaaataatgtggtgggcagaattgtcaactattatttaaacacagatttttcttttgctttgattgctgactttattgtgccaattttaaatagcatttctttttttaaagggaaaatgttgacttaaggtttccttggtaaaaattaatgatttcatttaaaaataattgtatcataataactaaaaactcttaattaaagcatagtattggaagttaaggatccaa

SEQ ID NO: 667217 - DNA, 2307 bp, Homo sapiens
acaggagaaaaaaaattgatcccccgtagacattcctatggcctacctagtttgttctctaatccatttggcttgacctagaagtagcaagtcagttccaatgaattgagatagggaatctcactgcactatttgttttccagtgtttgtaaaggaawaaagtcagggaatgagccaggattatgcttcggaatcccgaggcctctggctcttgctctttattctccttcgtcaatgatacaaggataccttgtaatcgctctgtctccacctcagccacatatgttttaatatttagtatttgcattggctaggaaagcatcatttccactgctaatctatctgtgtagtcatggccaagattttctttgttaattcatatagaaatcaatataggctggtgcagtggctcatgcttgtaataccagaactttgggaggtagaggcaggtggatgacttgagctcaggagtttgagaccagcctgggcaacatggtaaaaccctgtctctactaaaaatataaaaattagctgggcatggtggctcatgcctgtggtcccagttactggggaggctgaggtgggaggatctcttgagccaaggagatagaagctgcaataagctgtgatcacgccactgcactccagcctgggcaacagaatgagaccctgtctcaaaaaaaaaatattataaacagtgcacaatcactcagatgaatgtgtgaggccccgccttatatacatcagcccctgaaatcccacattttgtcacaatggtataggctgagtctttccattagtgaagacagactacaagaacccccttcaaaagcagaaatcaagatattttcccatcattattgcaactccataatttgatctttggttgtaataataagagttgagctttgaggctgctgtctgaacatttggataagcaaattaaaataaacctagcaactggacagctattttctgccactgagcagcttatagaggatcaccatatgtgttttatacctagaatatcaatttttaaaaaatttaacccagaaaaaaatttgaacccagaaaaaatgaattaagccctaaaatgattctcaacctcatccaaattttcttggatgatttatgagaatcccgtgaaatcctagagcatcttcactacaaccgccaatcatatttgggcaacagatgtgcagaagtgacagttagtagagaattctggttaacagaatgtcagctattcaagagttcacttaggcaccaggaagaatttatttaaatattgacgtggatgacaaccccttcatctgaaatacacatgaactcactgacctgcctgaaactcctctcctgtgcctgtaatcatctcccggcagcatcttggccacagattgtcaccatctggatcataatacaggaaaaacatgatgcttagtaaaacagagatgaaggtgatatcaggagctgtcagcatcataatatctacgtactgggaagagacgtgaacttgccttttgcaaagaagttctgatttcctcagcaatgtgtccaggcttcctgtaccaattgctcagacagcatcatgttttcttgttttcttgtgacttgctgagagcctgaggtatcttgaattttatttatctcctaaatcatagaaggaagtagagaagtctgtaattactagtacctcatattcaccggaatcctcgtgaggggacccccaccatgcctattcatcggccacagcattccctgcttagatgttttccagccttttcttttcctgtgacaataggtttttctgttacagcatgatacactagatctgactgggctcctactagtcccatgggcaagccaaaggttcttctcttcccgttggaggttctaattctactgactctctcctctctggctcccttcaccttgggaaaaaaacacacctgaaccaagacagcttccacgtcattaagttacatgtgattggtaaccaaaaatttaccaatcacagataggctaattagtttatggaaacacaagttgagtcaagacaggccgtatgtaattttctatgtagatgtgtgtagttattccttgtatcttttcctaagcaccctcttcctgcttgggatgtaagatccagcctgtgtggctgttacaggtctttcagccaaaattccttggcacaggttttgatggtcagttttattgattcagaaacttaatttttttttttacttcagtgtatattcatgtctggaagagggactcacttaagctaaactaacaatagatttataa

SEQ ID NO: 667218 - DNA, 2307 bp, Homo sapiens
acaggagaaaaaaaattgatcccccgtagacattcctatggcctacctagtttgttctctaatccatttggcttgacctagaagtagcaagtcagttccaatgaattgagatagggaatctcactgcactatttgttttccagtgtttgtaaaggaaaaaagtcagggaatgagccaggattatgcttcggaatcccgaggcctctggctmttgctctttattctccttcgtcaatgatacaaggataccttgtaatcgctctgtctccacctcagccacatatgttttaatatttagtatttgcattggctaggaaagcatcatttccactgctaatctatctgtgtagtcatggccaagattttctttgttaattcatatagaaatcaatataggctggtgcagtggctcatgcttgtaataccagaactttgggaggtagaggcaggtggatgacttgagctcaggagtttgagaccagcctgggcaacatggtaaaaccctgtctctactaaaaatataaaaattagctgggcatggtggctcatgcctgtggtcccagttactggggaggctgaggtgggaggatctcttgagccaaggagatagaagctgcaataagctgtgatcacgccactgcactccagcctgggcaacagaatgagaccctgtctcaaaaaaaaaatattataaacagtgcacaatcactcagatgaatgtgtgaggccccgccttatatacatcagcccctgaaatcccacattttgtcacaatggtataggctgagtctttccattagtgaagacagactacaagaacccccttcaaaagcagaaatcaagatattttcccatcattattgcaactccataatttgatctttggttgtaataataagagttgagctttgaggctgctgtctgaacatttggataagcaaattaaaataaacctagcaactggacagctattttctgccactgagcagcttatagaggatcaccatatgtgttttatacctagaatatcaatttttaaaaaatttaacccagaaaaaaatttgaacccagaaaaaatgaattaagccctaaaatgattctcaacctcatccaaattttcttggatgatttatgagaatcccgtgaaatcctagagcatcttcactacaaccgccaatcatatttgggcaacagatgtgcagaagtgacagttagtagagaattctggttaacagaatgtcagctattcaagagttcacttaggcaccaggaagaatttatttaaatattgacgtggatgacaaccccttcatctgaaatacacatgaactcactgacctgcctgaaactcctctcctgtgcctgtaatcatctcccggcagcatcttggccacagattgtcaccatctggatcataatacaggaaaaacatgatgcttagtaaaacagagatgaaggtgatatcaggagctgtcagcatcataatatctacgtactgggaagagacgtgaacttgccttttgcaaagaagttctgatttcctcagcaatgtgtccaggcttcctgtaccaattgctcagacagcatcatgttttcttgttttcttgtgacttgctgagagcctgaggtatcttgaattttatttatctcctaaatcatagaaggaagtagagaagtctgtaattactagtacctcatattcaccggaatcctcgtgaggggacccccaccatgcctattcatcggccacagcattccctgcttagatgttttccagccttttcttttcctgtgacaataggtttttctgttacagcatgatacactagatctgactgggctcctactagtcccatgggcaagccaaaggttcttctcttcccgttggaggttctaattctactgactctctcctctctggctcccttcaccttgggaaaaaaacacacctgaaccaagacagcttccacgtcattaagttacatgtgattggtaaccaaaaatttaccaatcacagataggctaattagtttatggaaacacaagttgagtcaagacaggccgtatgtaattttctatgtagatgtgtgtagttattccttgtatcttttcctaagcaccctcttcctgcttgggatgtaagatccagcctgtgtggctgttacaggtctttcagccaaaattccttggcacaggttttgatggtcagttttattgattcagaaacttaatttttttttttacttcagtgtatattcatgtctggaagagggactcacttaagctaaactaacaatagatttataa

SEQ ID NO: 667219 - DNA, 2307 bp, Homo sapiens
acaggagaaaaaaaattgatcccccgtagacattcctatggcctacctagtttgttctctaatccatttggcttgacctagaagtagcaagtcagttccaatgaattgagatagggaatctcactgcactatttgttttccagtgtttgtaaaggaaaaaagtcagggaatgagccaggattatgcttcggaatcccgaggcctctggctcttgctctttattctccttcgtcaatgatacaaggataccttgtaatcgctctgtctccaccycagccacatatgttttaatatttagtatttgcattggctaggaaagcatcatttccactgctaatctatctgtgtagtcatggccaagattttctttgttaattcatatagaaatcaatataggctggtgcagtggctcatgcttgtaataccagaactttgggaggtagaggcaggtggatgacttgagctcaggagtttgagaccagcctgggcaacatggtaaaaccctgtctctactaaaaatataaaaattagctgggcatggtggctcatgcctgtggtcccagttactggggaggctgaggtgggaggatctcttgagccaaggagatagaagctgcaataagctgtgatcacgccactgcactccagcctgggcaacagaatgagaccctgtctcaaaaaaaaaatattataaacagtgcacaatcactcagatgaatgtgtgaggccccgccttatatacatcagcccctgaaatcccacattttgtcacaatggtataggctgagtctttccattagtgaagacagactacaagaacccccttcaaaagcagaaatcaagatattttcccatcattattgcaactccataatttgatctttggttgtaataataagagttgagctttgaggctgctgtctgaacatttggataagcaaattaaaataaacctagcaactggacagctattttctgccactgagcagcttatagaggatcaccatatgtgttttatacctagaatatcaatttttaaaaaatttaacccagaaaaaaatttgaacccagaaaaaatgaattaagccctaaaatgattctcaacctcatccaaattttcttggatgatttatgagaatcccgtgaaatcctagagcatcttcactacaaccgccaatcatatttgggcaacagatgtgcagaagtgacagttagtagagaattctggttaacagaatgtcagctattcaagagttcacttaggcaccaggaagaatttatttaaatattgacgtggatgacaaccccttcatctgaaatacacatgaactcactgacctgcctgaaactcctctcctgtgcctgtaatcatctcccggcagcatcttggccacagattgtcaccatctggatcataatacaggaaaaacatgatgcttagtaaaacagagatgaaggtgatatcaggagctgtcagcatcataatatctacgtactgggaagagacgtgaacttgccttttgcaaagaagttctgatttcctcagcaatgtgtccaggcttcctgtaccaattgctcagacagcatcatgttttcttgttttcttgtgacttgctgagagcctgaggtatcttgaattttatttatctcctaaatcatagaaggaagtagagaagtctgtaattactagtacctcatattcaccggaatcctcgtgaggggacccccaccatgcctattcatcggccacagcattccctgcttagatgttttccagccttttcttttcctgtgacaataggtttttctgttacagcatgatacactagatctgactgggctcctactagtcccatgggcaagccaaaggttcttctcttcccgttggaggttctaattctactgactctctcctctctggctcccttcaccttgggaaaaaaacacacctgaaccaagacagcttccacgtcattaagttacatgtgattggtaaccaaaaatttaccaatcacagataggctaattagtttatggaaacacaagttgagtcaagacaggccgtatgtaattttctatgtagatgtgtgtagttattccttgtatcttttcctaagcaccctcttcctgcttgggatgtaagatccagcctgtgtggctgttacaggtctttcagccaaaattccttggcacaggttttgatggtcagttttattgattcagaaacttaatttttttttttacttcagtgtatattcatgtctggaagagggactcacttaagctaaactaacaatagatttataa

SEQ ID NO: 667220 - DNA, 2238 bp, Homo sapiens
acccttctcatcttctcaagcccctagatcctaatctgaccccccatgagaaggggtcaggcactgccctgggaaaaatagctatacatggtcctctgatgagctggggaaggaagaagcatctttgagcataacccagttacagaagagtaagttatgggttcatagtctctcctgctccaattagcatggcatggtctgatgcctctttaagtctcttccaaatcctttctgctttatcccaggttaggcagtacttccccagccctaaactccaggctcgtctgtctttcctgccctctctcccatttctgtgtcatggccagagctctttctctaagagcccttgttcagtagaaagccaatgcctttgctctccagcactcaagtgtatgcttgtgaaggagaagcagccctccctacaatgaccaaactcactggccttcattcagaagcaccccatgaggtgcctgttcccaggcaatcaacccaggagaaagagacagcatgtctcctctgcttttatccctttgctcttcctccttcttctgtaccctttgggaccccttggttcctccaagatcgattcacacatcttccccttaacatgatgagacacggacaaaaattaggaatgtctgaaaattcagagggcattctcccctctgtccatcccccagctcacacttcattgcacacattgaggtcatgcatagtggaagaagatatattttgaaaaggaaaagaaaagcaaaaatgttgaaataaaagaagaaaaagtaaaaccatctagaaatcctgggtaacatggacagagaaaagaagagtcatgcaggattttggaagtttgggcttaacagtcaagggaatggaaaggagagattcaggaattagctgcattctgcatagaatcaattgagaaggggttagagagagagaggattttaagatagtttgctgcattagggacatacttccctcagagactgtgtaaagatttgaattatggatcgtgactttatgatgtcttcactatgtgtctctgaatatgatccagtgtcaaaattcatcacagatggactcacttgtattttggggacagttactcactctaaggaggccttctccccaggctgggttcctacatgttcctttcctgtccttgacctctacaagtcctcatctactgatccatattctcctccccaaaaatacaaacttgaatcacttattcttgccccaggcacactagaattttgcaaaaatccttattatttgagaggactggcttcccttcttcccactttcagaaactcttttcctccaaactgatcccaatttcccatactagtaaccagcttcaaggtggtagccaggagaaggggagatggtaaaaagtaggtgaggaatgctgaagccctcagtggggaggggaggtggctggatgacttggtaaggtttccccagtgccgacatcagtatacttaaataagaacattccaaaggcttgctttgtcttaaagttgggattagcaagggcacgtgtcactctgtaaaagcctagttttcctagaaggcacaagaagtatagaggattggaaaacatgcaaggatgtggcattccacatgctccaaagggcctatattagagccttaaactctcttccaattcttagccagcaatgtcgattaratgggtaacttgaagacagccaaaaccacacaatttccatcaaaaggcaattcactgctttcataacagtggggatggctaccggtagttaaaaaggcagaagtggctcatccatctctgggaataatttatatgacttggatgacatttaatttaacacaggtcacccaaaaggatggtgatttaatgccccagctttttttttttttcagtgctgcgttgctgtcattaggtgagtttcacctcatacttctttgtttttatttgaagagaaatctgtttgaaagacataattgtaaactatcacttttccagctgtaggcagggaataaaacccccaaggtgaaacatctgaccttgaaactcagagtgaataagcctctgtgctcctagcaaggggaatgaaggtagatttgtgaattaaaacaacaaagtagactccagcttccctaggagatggagcccgggaagatggacttttctattgttgcctgccatgtccaggcctcagatgcaaataatatcctctctgcaattttgtgaga

SEQ ID NO: 667221 - DNA, 646 bp, Homo sapiens
tcataatcttatgggaccactgctataygtgtgggccatcattgaccaaaatgttgtgaagtggtatatgactatatgcgtggtgatgagtactcagcttatttgtgctgaaagatggatttttcagtcaactttctttgtgtattactaattttaataaagaaaattcccagatatactaggttaataactttgatgtgtaataaattatgacttacttaactttttagattttaaaaatgctttacatattggtatttagttccaagaataaagaaataaaaataaaggaaattttagggaaattgcggaacaattttatcttagtttcattaaaggaaattacattttgcagcaacactgactccattgcctgaaaaaaagttataattttttatatgcagagaatattgtatattctacaagattccctaggtcatgatgaatattgctattcatgcattttttggtaaagttttaagatgtcatataaacatatttatacatattttttacagtgtggtatgaagtaccagtatgggatgagactcattttctttgatttagaaatgacatgtaaaaatataataacattcattctaaagtaagcccatgcaagtaggtacttgaaggaggaagtttaata

SEQ ID NO: 667222 - DNA, 404 bp, Homo sapiens
ttgatctctaccaaaaatacaaaaactagccaggcgtggtgctacgcgcctgtaatcccagctactcaggaggctgaggcacgagaatcacttgaaccagggaggcagaggttgcagtgagccgagatcatgccactgcactctagcctgggtaacagagcgaaaccctgtctcaaaaaaaaaaaaaaaattatgatgcaaattgcaaacggcattcgaaacaggactaagtgaaagactmtgcttacatttccattcttgttcaatgtgtttttcttggagtaactcctttgttgttttatttgtacaccttcctttgtgccacagacattcttttcccaaatatcccattgtttaaggcattctgcggggcgcctggtttccaggaggcaccccccacgcca

SEQ ID NO: 667223 - DNA, 655 bp, Homo sapiens
aaaaaggaaaaaaaaattagctgggtgtggtagcacatgcctgtaatcccagctacttgggagggtgaggtgggagagtcgcctgaatccaggaggtggaggctgcagtgagctgagattgcaccactgcactccagcctgggtgacagagcgagactccatcttgggggggaaaaagaaagtattatttcaaataattttacaaatgaaatcattactacataattgtccatcaaaacctcttcatttagggccgggckcggtggctcacgcctgtaatcccagcactttgggaggccgacgcaggcagatctcgaggtcaggagatcaagaccatcctggctaacacgttgaaaccccgtctctactaaaaatacaaataaattagccgggcgtggtggcagacgcctgtagtcccagccacccaggaggctgaggcaggagaatggtgtgaacccgggaggtggagcttgtagtgagccgagatcgcgccactgcattccagtctgggcaacagagtgagactccgtctcaaaaaaaaaaaaaacctcttgatttagaaaccgagacagcttgttcccttaggatttcacttttcaggtgaatatgtgtactttggggttggatcaattttagggatatgaaaggtaacaag

SEQ ID NO: 667224 - DNA, 2942 bp, Homo sapiens
aagaggttgtgttgatgctgtctctagcatttttatacttcaaaacctaataatgttatcacatcatcatataaagactgcctttcctcaagggtcatttactctcatagcatggcaagtcgaaatctcaggcaaacttcaaaagaatgtttgttctaaacattgagttggaaaaataattttggaatgcagtgtttctagttgggttgaaagataagcattattaatccattaatatcacagtagaaaatttctctaataattttgggattgtctcaacagctttttttccttaattggtgagggaccaataaggctggaggtgttggggtatgttagctgtcattcatggggacttgtgccattggcacagaatttctagattgaaaaatttcaaggaggagaagaaataggcccaggaatggtggcaaacaagtctatatgataagctatcttggatagacttgtttcttataacttttccattactaaactagcatcttttaggttcagcgtttttagattaattgcaaaaaaattacatgtgatatagtggggtcaatttgaagtatcattgaaagatgaagggaagatatcaatatttttatagtaggagggctggccaaagatgttttaaattcattgtgtacatgtgcctgtttcttagtaaaatgcaggtcatatctgtttaaatttttcacaatttctttaaaaatagtggtcagtcagtagtcagatgagagggtggctgaactgaattttggcagttcttggttaatttagaatttcatgtgttcggacttttcctgtatcccttttctgttcatcctagtcaatgtcttatcattgcatacattttctggatgcttgagccatcagatatcagctagctttttaaaatcacctttaagaaagcagtattttctaatagtaaatttataaacatcttatacatcttagctttcatatataggattactatgtattgatttgtaaacattcactgagtttaattttatttccacagggctcacaacaacattaaaccaggatgcttatgttcttaagtctatatttgcatatacattgactcttgatggaaagacttaagaagatcaaggtctcaccatttgtcctcaattcgtgtgaccataagatactgatagcattgagtcttgaaatgatttaataatatgagtgaggatttgctttctccattagagcattaagctaaaactatcaacattttaaaccaaattgccttatttttcttccaaacttcatatatgtctatcaggtaataataggcttgaaaattgatatcctgtggtgctaaagtacagtagaaagagaggagaagtgtatacatgttttattttaaattgtacgaaaggggaatttaaaaaatatgtaactgctgtttatacattggctccttactgcttattaatctgtattgtacacatgatgaaatgaagcagaagctgggagtcggcctttcctctagtaaccaccacatggctcagcatctgtgccaaacataggcgctcctagtctggtcagtgccaagaggctaccagaacatggggcaggtggctggtgttggtgtcccagcctaagagccacctgctgcagttaccatggcatgctgagttgatgcaccaggtggcagcagccatccgttattatttccaatggagacctagcccaggccaaggtaaagttagttaatagcattgggatatagtcactgtaatggtgctattaacaaacagtcaacaccattgtattttttaacttcgtgttctgtatctcctcagccatgtatcttaaatatattttgtcatcataatctttatggtgggggcagactttgcacttactgcagtgcaacacttgcactttaattttcctccaactgtctaaaattagagcaaatacattggcaatacagctgcttttgctctgagctacaatcatggcttttcatgttacttaccaagtggtgtttctggttaggaatcacagctgtaaaattgatttcagttcatcacacttcttcatgatgttgcccctaaattttgcacactatattcttgtatattatttcaaataaatggaaaaaaaagttgcttatctctgacgtctactgattgattgattgattgattaatcttggctgaattttatttatgagttctcagaataacaggttcaggagatgagatggaaaacataaggcaaattcctaacactgctaattaggaggctgctgataggattttaaaaattaaaaacaatsttaatagtggaacaagagccatcagaaaataaggacttagattatctactatttatagagaattgctatacaataaaaatttttatttttcacgtggcatttttgttacacggttaaacagcccaaaggtctgcttttaataacatgacaaagtgtaacaaaagccttgctttatttaaagatccagtatgacatacttaaaaaggccatttaaccttgtatcttagcttgggatgtgccagtggttcctcaactttgttgtctattggaatcattttggggattttttttttttttaatagtggtgtctgtcaggctcccactcctagacatgttaattaatgtggagtgcaagttgggcatcaggattttaaaaaaatcccctggtgattggtatgaatgtgcagccaaatttggaaaccactgagctacatgcttatttagtgaagaaggcagggttgggggaagcagggtacatgttataacttgatcatatccctttaaaagaagtggggactttgggtttatgtacccataggaggacttggttatggatgggaaagacattttagccttgtacaaaaatctgaaagaggaaaacatctttctggaaaaatcaggtccatggaattgaaaggtg

SEQ ID NO: 667225 - DNA, 2823 bp, Homo sapiens
tcatcaagctgctcccagccctttctgtgctactgctgggttttagatagcttgatgtggcctaaaaagaccctcaaatcattagtttccatttttgtgttaccaagtaatgtgcaaagcatatttgccccatttgtatggcccaacctggctgcccacctagggaaagatcaagggtgtttgttcatacattgctatgaaataaagctgtctctgcctaacaaagtagggggtgccaaagggcctgtttatctttggccatactgaatgtttcagttaaagagccacattctcttagccctttgcacattatcttccttatccttagaatacccttccttgcttactttcttgcgcagctctttatctcttaggactcggcttcaatgctcccttttaaggaaagcctttcttaactccaggcagcaggaaagaatggaaaccatcttggagtcacacaggtttgtgaaacgatctcacctctgtatcaacagccttgacttagtaggatccggcactttggaatccctgaaggctggctccatgctctggtcagggcaggagtactttaaatcaggtatgcagggggatgggcaagcccttactgaagaagtgtagctgttttttttttttttttatttttttgagacggagtcttgctctgtcgcccaggctggagtgcagtgccgcaatcttggctcactgcaagctccgcctcctgggttcacgccattctcctgcctcagcctcccgagtagctgggactacaggcgcccgccattgcacccggctaatttttttgtatttttagtagagacggggtttcaccgtgttggccaggatggtctcgatctcttgacctcgtgatccgcccacctgggcttcccaaagtgctgggattacaggcgtgagccagaagaagtgtagctgttttaaataacatgtaagttcataccattactcagctcacatacccagtttcaagtcccagctaacataccactctcaactggcatgcaagatggaatttagtgctcttagagaacaatgttttgtgagatgccttagttaaaccagagctgaccctgaatggagatatttttctatgaaaaaaacttgcttcttttggtaatatgcttctagttggtatgccatcctgggaaattgtctccactccccaaatgtagtccctacagaatcatatacagtaaagaaatccccaagggctcatctgtctttaagacaccaaggtgtatgtatcagcgtataagaagtgtttaaattcacaggaactacaatcatttcatagtgaatggattagatatatttgatggacaaaaatcaacttagtttcgttggcatttaaaaggataagacatcacgtaagttacacaacatgtagaagagatcagaaatgagtttggttagatttttgggtagtcatcaaaaacaccatcagaagtatggggcaaaaaagattaagctgccctcccacatgaaattagagcaagattttcgagtacttattaaattacttcatttgcttaagcaaaacattagctttcttggaagtcaggccaagtgttatgtaacagttagtcttaactctggtttgtaaccaaaataagtagattattgaggttatccttattgagaaaaaaaacacgattagtagaggaatggtttgtggtaacatggcaacactgctcaacatgacaaaaactagccaagtggaagttttcatggaaaacaacattgatttttgtcaggcatttaaatattcaatgtgattagtaagtactgaaatgcataaatgacttaaagatacactacatgcctcaataagcagttaagcccaggcttttccctggttccatcctccctcttcgtcctatttcagacactccrttcacagaactgataggtagctagtgacatggtaccaggaggagaaacatttccctccatcgatggagatcttgggagttctgcagaagtacagaggagctgagggaatggcttccagattgtggaccctggaccatggcaagagggcaagggatccaaggatgcacatggcaccaagcattctctgatggtgtagataaaagtaccactaggctaataaggtctgtgaacatttgtgtactcctactcaaagagggccataagaagaagagttgctctccacggcaaatatccagagtaaatggatttgaggccaaccccaccgctgttacagagcttgagaaatctttccatcaaagactctatctttattgaaaacacattcaacacttacccacaggcacgagccaggcggctgcctctgcatctgagggagcacacgtgtctggagcacctgcctgatgcaggctgaacacatacaactgcccccatttacaccacttggtcccatgagtaagttattactctgattttcaaatgaacttgactagtattcatttaagctccagaaagcatctggtgtcagaagaaaacaggaaggcaggatggttcactatttcccatttattcagcagcagtagttacactatcctcaatttgccctattttatgacaacctaacatattatgctgggaggaacagaatgagtatacaacaaggtttgccccagaagctaaaacaaatttactgacatttaaagagcaatactcaccctcggtttgtctacaggggaaagaaattcatccagtgatgcttcagtatgcaagaacaaaattgttttgcaataatacataagaaagaacattctctaggacaaaagtcccctccttgccaagagcctggggtgcagcagg

SEQ ID NO: 667226 - DNA, 581 bp, Homo sapiens
tgagagattggccaaaacgtaggcatgagcaccactctgtcaccatcgtggacgggtggtggttgtctcattcagggacttgaggtcacagcgtgaggctctttgaggagagatttcttttattgttcatctcattgtggtttctttttcttttttttttttwtttttttattttttgagatggagttttgctcttgatgcccaggctggagtgcaatggcgtgatctcagctcaccacaacctctgcctcctgggttcaagcgattctcctgcctcagcctcctgagtagctgggattacaggcgtgtgccaccacgcccaggtaatttttgtatttttagtagagacgaggtttcacgatgttggtcaggctggtctcgaactcctcacttcatgatctgcccacctcagcctcccaaagtgctgtgattacaggcgtgagccaccgctcccggcctcactgtggttctaatgacacacgatcttggcttactgcaacctccgcctcctgggttccagcaattctcctgccccagactcctgagtagctgggattacaggcacgcgccaccaagcctgg

SEQ ID NO: 667227 - DNA, 581 bp, Homo sapiens
tgagagattggccaaaacgtaggcatgagcaccactctgtcaccatcgtggacgggtggtggttgtctcattcagggacttgaggtcacagcgtgaggctctttgaggagagatttcttttattgttcatctcattgtggtttctttttcttttttttttttatttttttattttttgagatggagttttgctcttgatgcccaggctggagtgcaatggcgtgatctcagctcaccacaacctctgcctcctgggttcaagcgattctcctgcctcagcctcctgagtagctgggattacaggcgtgtgccaccacgcccaggtaatttttgtatttttagtagagacgaggtttcacgatgttggtcaggctggtctcgaactcctcacytcatgatctgcccacctcagcctcccaaagtgctgtgattacaggcgtgagccaccgctcccggcctcactgtggttctaatgacacacgatcttggcttactgcaacctccgcctcctgggttccagcaattctcctgccccagactcctgagtagctgggattacaggcacgcgccaccaagcctgg

SEQ ID NO: 667228 - DNA, 1594 bp, Homo sapiens
catcagaatctgaaatgcggtggaaatctcagtaagccacaaagtaacaaggtgggtcataagctgtgaaggaaaatagtgggtaaacccaaggcccaggcgaggctacatgtggaacagtctcttgaggatttctgtgcttctgcctgtgtccttcagtaaagcagaatagttgctaatgaaataagaaatgagtcagtgcttttcagcatgtgctggccagtgtagaggttagagagcagcagcttgcaaattggcatttgcaacattctcaacattttggttttaggtgtttttagtttggatatgtactccccgtattgttataatccctaccattctcttctgatgtacacccagaccaagtcacacttaaataactaatctgctatgcacctctatgccccagcttattttccttaacaaaggtcagaactaaaaatattgctggctyatagccagctgtcatccctaaatacttccaagataattttggatatagaggcaaaatttgtatatttaaggtctgcttttcttagactaaggaaatgtgaaaactcacgcatgtctgtgattggaggataataatcgtacaatgaagagatctgaatcactacatatatagagactgtgggaaaaacagcctgatcttttcagctctagtgaggaatttacaggagaatgtaaagttttaagtagtctatatcaaagaatactataatttcttccgatacatgtctatgattgtgaaagaccagaagttaagcttgagtaggtgaacagataggtaccagaatggccttaccaagtaagtaaacttagaacacaaacaccactccagttgacctgagaatcacatatactacagggagaatagagcactttcttaaaatggagtgagatattttcctctctccttttcataaaaccacagtgccacgtgcagatgatatatattcagacaaattagaataatacatgacttcttttttgaatctttaaaaattgaaattgtccacattatttaaatttttagaaaaccaaagcttactactctctatactatacctaatgagtttccattatcatagtatagagatgttttgctcaactagtaagctgtttagggctgctggcccctgtagcccacagcctcagatcgctggacttggctgtgggatttaattcatagaataatgtggaataagagcttgtgtatgatagactctgctcttttggaagctaggactttttttatggaattttaaaaaatggtccttttgtgcttaaaaagtattactttttttgtaagattttattttatttttcttacttttagagacagggtattactctgtcacctaggctggagtgccatggcattcatagctcactgcaacctcaaactgccgggttcaagtgatcctccctcctcagcctcccaagtagctaggactacaggcatgcgaccccacacctggctaattttttatagagatggtatcttgctatattgctcaaactggtctcaaactcctggaatcaagcagtcctcccacctcagcctcccaaagcactggcattacaggtgtca

SEQ ID NO: 667229 - DNA, 1594 bp, Homo sapiens
catcagaatctgaaatgcggtggaaatctcagtaagccacaaagtaacaaggtgggtcataagctgtgaaggaaaatagtgggtaaacccaaggcccaggcgaggctacatgtggaacagtctcttgaggatttctgtgcttctgcctgtgtccttcagtaaagcagaatagttgctaatgaaataagaaatgagtcagtgcttttcagcatgtgctggccagtgtagaggttagagagcagcagcttgcaaattggcatttgcaacattctcaacattttggttttaggtgtttttagtttggatatgtactccccgtattgttataatccctaccattctcttctgatgtacacccagaccaagtcacacttaaataactaatctgctatgcacctctatgccccagcttattttccttaacaaaggtcagaactaaaaatattgctggcttatagccagctgtcatccctaaatacttccaagataattttggatatagaggcaaaatttgtatatttaaggtctgcttttcttagactraggaaatgtgaaaactcacgcatgtctgtgattggaggataataatcgtacaatgaagagatctgaatcactacatatatagagactgtgggaaaaacagcctgatcttttcagctctagtgaggaatttacaggagaatgtaaagttttaagtagtctatatcaaagaatactataatttcttccgatacatgtctatgattgtgaaagaccagaagttaagcttgagtaggtgaacagataggtaccagaatggccttaccaagtaagtaaacttagaacacaaacaccactccagttgacctgagaatcacatatactacagggagaatagagcactttcttaaaatggagtgagatattttcctctctccttttcataaaaccacagtgccacgtgcagatgatatatattcagacaaattagaataatacatgacttcttttttgaatctttaaaaattgaaattgtccacattatttaaatttttagaaaaccaaagcttactactctctatactatacctaatgagtttccattatcatagtatagagatgttttgctcaactagtaagctgtttagggctgctggcccctgtagcccacagcctcagatcgctggacttggctgtgggatttaattcatagaataatgtggaataagagcttgtgtatgatagactctgctcttttggaagctaggactttttttatggaattttaaaaaatggtccttttgtgcttaaaaagtattactttttttgtaagattttattttatttttcttacttttagagacagggtattactctgtcacctaggctggagtgccatggcattcatagctcactgcaacctcaaactgccgggttcaagtgatcctccctcctcagcctcccaagtagctaggactacaggcatgcgaccccacacctggctaattttttatagagatggtatcttgctatattgctcaaactggtctcaaactcctggaatcaagcagtcctcccacctcagcctcccaaagcactggcattacaggtgtca

SEQ ID NO: 667230 - DNA, 727 bp, Homo sapiens
gaaacaaaagcagaatatattaggaaaactgaattagcgtgtttaattttaatgtgcctccaaacactttttttgttatagtatactaagcttatggggaaagtgctccaactgacagattattattgagaaggatgtaagggaaagcctgtttttattaataccttttcacaaatactagcctcaagrtattagaataaaatgcaatgtgtgagtttaagtgttgaataatatgctaggttgctgtaaaggaatatgcttaacaaagtatttcccctttgaaatattattattttttccccaggaaaccagccggacagtaaagaaatgttcttcttttttaccaaattacagaattcatttatgtcctgtgggcaaaggtaaacacacagtaatcatagctcagaatcttctcattcaagaaatgcccatcaagcaccctaatgatgtcttgtttatgttgatgatttattgttttcttcgaacacgtctgaaatattttacaattcagctggttctggcggtttccaagcattttcccagcctcagagaggagtacttgccccgccttctgcagagctggctgacaaaggcagtgtcctggcctttggccaggcgcttgtctctagcatgctcctcacatttctgatttgcgcagggagtactgagcactgcaacctcaaaagcatattagactgcaaaactccattcaagtgaatgctgttct

SEQ ID NO: 667231 - DNA, 727 bp, Homo sapiens
gaaacaaaagcagaatatattaggaaaactgaattagcgtgtttaattttaatgtgcctccaaacactttttttgttatagtatactaagcttatggggaaagtgctccaactgacagattattattgagaaggatgtaagggaaagcctgtttttattaataccttttcacaaatactagcctcaaggtattagaataaaatgcaatgtgtgagtttaagtgttgaataataygctaggttgctgtaaaggaatatgcttaacaaagtatttcccctttgaaatattattattttttccccaggaaaccagccggacagtaaagaaatgttcttcttttttaccaaattacagaattcatttatgtcctgtgggcaaaggtaaacacacagtaatcatagctcagaatcttctcattcaagaaatgcccatcaagcaccctaatgatgtcttgtttatgttgatgatttattgttttcttcgaacacgtctgaaatattttacaattcagctggttctggcggtttccaagcattttcccagcctcagagaggagtacttgccccgccttctgcagagctggctgacaaaggcagtgtcctggcctttggccaggcgcttgtctctagcatgctcctcacatttctgatttgcgcagggagtactgagcactgcaacctcaaaagcatattagactgcaaaactccattcaagtgaatgctgttct

SEQ ID NO: 667232 - DNA, 727 bp, Homo sapiens
gaaacaaaagcagaatatattaggaaaactgaattagcgtgtttaattttaatgtgcctccaaacactttttttgttatagtatactaagcttatggggaaagtgctccaactgacagattattattgagaaggatgtaagggaaagcctgtttttattaataccttttcacaaatactagcctcaaggtattagaataaaatgcaatgtgtgagtttaagtgttgaataatatgctaggttgctgtaaaggaatatgyttaacaaagtatttcccctttgaaatattattattttttccccaggaaaccagccggacagtaaagaaatgttcttcttttttaccaaattacagaattcatttatgtcctgtgggcaaaggtaaacacacagtaatcatagctcagaatcttctcattcaagaaatgcccatcaagcaccctaatgatgtcttgtttatgttgatgatttattgttttcttcgaacacgtctgaaatattttacaattcagctggttctggcggtttccaagcattttcccagcctcagagaggagtacttgccccgccttctgcagagctggctgacaaaggcagtgtcctggcctttggccaggcgcttgtctctagcatgctcctcacatttctgatttgcgcagggagtactgagcactgcaacctcaaaagcatattagactgcaaaactccattcaagtgaatgctgttct

SEQ ID NO: 667233 - DNA, 627 bp, Homo sapiens
ctgacctcaggtgatccgcccaccttggcctcccaaagtgttggaattacaggcgtgagccatcgtgcttggccaaggaaaacattttaattaataaagagatacataaatctgttgaagcgttgcctgaaatttctggattaataagcttgaaatgttagacatttaattaaaataaatgttctgtttatcccacgatatctaagcccccttctctttgtctggctgttaatgctgtcatgactgctgatgaaaatcaaaatcctctatagaagtaaaaaacatttacaggtattagagagattttaaacaaattattttggatataatgtcatggaaaaattatttttcacaaatcattttaaatatttttcttctaaagtrttacattacatctagaaccttaacataaagagaaaaaacagaataacaattggtagtgtttgaagcaataattagctcaaaagatttcagtataaatgtcttcattgtaatctcccaaaaaacatcatcttttcaaactgttgtcagaaatgaaatgaactatgagtccaatatacaacaatatttcttcctttactacacaatacaaacatgaataggaaaatgtaactttatgctttggta

SEQ ID NO: 667234 - DNA, 627 bp, Homo sapiens
ctgacctcaggtgatccgcccaccttggcctcccaaagtgttggaattacaggcgtgagccatcgtgcttggccaaggaaaacattttaattaataaagagatacataaatctgttgaagcgttgcctgaaatttctggattaataagcttgaaatgttagacatttaattaaaataaatgttctgtttatcccacgatatctaagcccccttctctttgtctggctgttaatgctgtcatgactgctgatgaaaatcaaaatcctctatagaagtaaaaaacatttacaggtattagagagattttaaacaaattattttggatataatgtcatggaaaaattatttttcacaaatcattttaaatatttttcttctaaagtattayattacatctagaaccttaacataaagagaaaaaacagaataacaattggtagtgtttgaagcaataattagctcaaaagatttcagtataaatgtcttcattgtaatctcccaaaaaacatcatcttttcaaactgttgtcagaaatgaaatgaactatgagtccaatatacaacaatatttcttcctttactacacaatacaaacatgaataggaaaatgtaactttatgctttggta

SEQ ID NO: 667235 - DNA, 986 bp, Homo sapiens
tacctttatatctgcggtcattagatcacctacatcagaatcaaatgtagggttgcttttaaaaaaaatgcatgttcatttttgctgactcagactgtctaacagcgtggcttgagagtctgcctttttagcaagtattctaggtgattctttgtacattacagtttgagaccattgataagatcaagcatagactaactccaggggtgctcccacctccccaaaagctattgggctccagactgtttccttaccaagcctattattagtttgacatgatttagttgatctctctattcacactgttctcaaagtgttgttttaaaattatgcgtagggtatcttggtaagtaaattttgatgtaccattaggccgttattggagtctccatctggtggccacagtagagaatggcatgtttcactgaagaaattatgggcaagtgtaaaactggggaaattaaaaaaaagtttccttggtgtcttaagggattggcaatcacagtctttcttttttattttatacgctctaagtttttcttcatataggcagaacactttgayacacagctgtggactgtactttcactttcaaacagagacgatttcaattagatgacctagcccagcaagcgctttctgcaaagggccagatagtaaatattttaggctttgtgggccatatggtctctgttgcagttgcttgactctgcttttgtaggataagggtagccacagacaatatgtacacaaatgggcatggtgtgtccctataaatatttattaacactgaaatttaaattttgcatctttttcacatgtcacaaaacattatttgtatttttcactcatttaaaaattcaaaaaccattctcatctttgcaggccttgcaaaaacaggcagcaggtgggagatgtttcgcagtccatagtgtgcagacacctggcctagcctatataaaccgctttccttcaggaatattgtg

SEQ ID NO: 667236 - DNA, 627 bp, Homo sapiens
acagcatggtgactatggttaaaaagaacatactgtattttgaaaatcattagaagagtagattttcagtgttctcactgataagtatgtgaggcaatacatatgtgaattagccctattgagccatttcacaaagtatacctacttcaaaacatgtggtacacaaaaatatatacaatttttttaattttaaaaattaaacctaatttaaaaagaaaaaaatcaattaatccacggagttctatcaattaatgatggtaaggaatccaaccaaaaatgatgacaatggtgttgaaactcaaggcaataccatctgtgtatctttgtggataaataggcttgacggtasagttctattcccattgcttctgtggtcctcagctctggctgttttgcagggtgctgatgtccaatcatgtaatcatttataattcaaccttgtcctgaggaaccctttcattttaggataccaggttaggttcctgggatgtatgttaccatctcctaaatggactcagccaaaggtcaatcaatgccattgatagccaagaacatgtcacagctgtgttttcttttccattgaattaaattagaggaaattttgaatgattcagggccctgccttcc

SEQ ID NO: 667237 - DNA, 1189 bp, Homo sapiens
tgcaaaaacacagctctaagcccctcgagtgatttatttagcgcacrgtctaattgatcagggccaactttccacgtggtgggggaggcagcgcctcggcctccaggaatctttggtctagggggtcagctgcctgctgggtgcctctgggcagacactaaagactcggccgcacccacccccacctgaggctcccttgtgaggcagcacccacccaaagggaggccctggtctgtggggagaggcggcccctagcgagaccgaccagaggccgggacagccactgcgcctctgaagctgggcctgccgcccccgtggcccaagggctggtgctgtgagtctggctggtgctgtgagtctggctggggagggaagatgcagggccctgggcccggggtgcctggactcctactcccaggcccacgctctgtgtgtgaggagtcaggactcgggatctgtaaaggccctggagggacagccctggagggacggccctggagggacagccctggagacctggtgacctctgtgctgcctggggtttggggagcatggcccacaccagcagcccccgccacgtgaccctcgattcagcccttctgcatgctgtgcattcagtgatctgggcatctttggacagtgccatggtggatgattaggcctgggcaccctgttccacccagtgcctgtttgctgctcctgggagggcagtcctctctccttgcctcttgggttacaaggcagtctccactgagagccgcctcccttccctgcccatacccccgtggggtctgggggtgtctcctgccctcttctcctggaccaggtgaagggctgagggggaaggggagccaggcgggggcatgggagtggtagggggtgccctggctgccgtgggctggtgcatccctccccgggctctcgcagggaccccccgccctccagcagtgttagagacattcctttgctccctcagtgtgctggggcacctgctttgagatagtgctaattcgcagggggcactgagcacagacccccagaagcacgctggcttggcctccccaggcaaccgaagtccataccaggggccacagctgcccctggggtgtctagacctcagccagccgcctgggtgaagcccctgcctcctgtgcttcaggagaggttgcccaggaacccccaacctcca

SEQ ID NO: 667238 - DNA, 813 bp, Homo sapiens
aggctgttggctgaggcccatgtcctgcattgcagggtagcaggtcccacgtacttgttagggctcagcaggctgcttctgagcaggtgctttcttacgtatcctggggggctctggggaggaagaaccctcaccccacgttgcctgggccttcagtttctgaaacccagacttgtcaggagtgagacccacagtttcaaagcctttctttgggctcttcattttgagtcccaggcaaacccagaggcactttctctctgggccaagatgtccacagcctgccccggccacctcctgggcctccccactctgcccctggggctggccttactgggtggggatggggttgtgttccggtgtaaatggtccctggaggccgagccggcgggccctgccactagatggcagtcacacgatggtggaaaccgcctcctgggccagccggcctgttgtggggctaaggaggcagtttgtgaaaaaggccaagttagcatggcagcttttctgaaaaacagtcacatttgttgttctaaacaggggcccccggaataatttggcctgatayttgctgtgcatgaaatcagccaatccaggtggggagagcagccgttggcctcataaaggcctctgtgtgctcagtgtcagtcgggcccatctgtctttgtcatggcatgtgggtggacatcccgtgtgccggcaccgccacgggcacttcagaggcagctacggttacaagtggcattcaagtcatccgagcccttgcgttcttcctctgggccccacctcccatgaaaactgaacccagcagctccg

SEQ ID NO: 667239 - DNA, 609 bp, Homo sapiens
tggaattatttatgtaagaatttcagtggcctcctgccttaagcatgattatcacagacttttaagtgataaaaatgtcataaatcataataaaggacaaaaggaatcagggtcagggaaggtaacaggaaagaagatattctgaaaagcmaagaagtaggtacagatgcaacagggtaactctcagcatttacataaacactttcctagcaatttattcatctgatcctcataataccctggtagatgttagtatctccattttacagatgaagaatgtgagggttagatctgaggtccaaggtcagaccgtgggtaggataagaacccaggtctcctaattctcgctcagtgcttcccataagccactcacccaataaagtgaagacagaaatccatgagaactatcagagaaagaactctgtagtcttgcccctctgcatgacaggaccagggaggggaaagtggctgcgacagtatcagagagtagtagcacggagtctggaactgtgggctcaggaacatttttcaagtcccaccttagatatatactactacataattgtgtgaccctaggcaactcatttaatctctgccctgatttcctca

SEQ ID NO: 667240 - DNA, 1561 bp, Homo sapiens
cacctgccttggcatcccaaagtattaatttttttttttttttttgagacgaagtcttgctgtgtcgcccaggctggagtgcagtggcccgatgtcggctcactgcaagctccgcctcccaggttcacgccagtctcctgactcagcctcccgagtagctgggactacaggcgcccgccacgatgcccagctaattttttgtattttttttagtagagatggggtttcaccgtgttagccagggtggtctcaatctcctgacttcctgatctgtccgccttggcctcccaaagtgctgggattacaggggtaagccaccacgcccctccaagtattaaattttttatttaaaaaatctcccctctccaaagatctcccagcatttctgcagaggtctctacctaggtaaggagaagaaactattcttggccgggtacagtggctcacgcctgtaataccagcactttggaaagccaaggttggaggattccttgatcccagaagttcgagaccagcctggccaacatggtgaaaccccatctttaccaaaaatacaaaaattaggtgggtgtggtggagtgtgcctgtagtcccagctactcaggaggctgaggtagaaggatcgcttgggcctgggaggtcaaggctgcagtgaaccaaggtggtgccactgcactccagcctgggtaacagagtgagatcctgtctcaaaaaaaaaaaattatttgtgagggtgaaatttaaatacctttgtgcatagctatcagttattctttgttttaatatttagtttattgtgaaatataacacatatagaaacatacataaaacaacacacagggccaggcccggtgggtcacgccttgtaatcccagcactttgggaggccgaggcggrcggattacttgaggtgaggagtttgagaccagcctggccaacatggtgaaaccccatctctactaaaaatacaaaaattagtcggatgtggtggtgcatgcctgtaatcccagctacttgggaggctgaggcaggagaatcgcttgaacctgggaggcagaagttacagtgaaccaagatcgcgctactgcactccagcctgggcaacggagtcagactgtgtctaaaaaaaaagaaaaaaaatataggctgggtgtggtggctcacgcctgtaatcccagcactttgggaggccgaggcgggcagatcccttgaggtcaggagttcgagaccagcctgaccaacatggagaaaccccatccctactaaaagtacaaaattagccgggcatggtgttgcatgactgaaatcccagctactttggaggctgaggcaggagaatcgcttgaatctgggaggtagaggttgttttgagctgagatcacgccattgtactccagcctgggcaacaagagcgaaactccgtctcaaacaaacaaaaaacaaaacaaaaacaaaaaacacagtgtaacatgttattataaagtcactgctcagggaccaacttggccggtcctgtgcctctagagggaagctccttcccactgttctttagagttttata

SEQ ID NO: 667241 - DNA, 1561 bp, Homo sapiens
cacctgccttggcatcccaaagtattaatttttttttttttttttgagacgaagtcttgctgtgtcgcccaggctggagtgcagtggcccgatgtcggctcactgcaagctccgcctcccaggttcacgccagtctcctgactcagcctcccgagtagctgggactacaggcgcccgccacgatgcccagctaattttttgtattttttttagtagagatggggtttcaccgtgttagccagggtggtctcaatctcctgacttcctgatctgtccgccttggcctcccaaagtgctgggattacaggggtaagccaccacgcccctccaagtattaaattttttatttaaaaaatctcccctctccaaagatctcccagcatttctgcagaggtctctacctaggtaaggagaagaaactattcttggccgggtacagtggctcacgcctgtaataccagcactttggaaagccaaggttggaggattccttgatcccagaagttcgagaccagcctggccaacatggtgaaaccccatctttaccaaaaatacaaaaattaggtgggtgtggtggagtgtgcctgtagtcccagctactcaggaggctgaggtagaaggatcgcttgggcctgggaggtcaaggctgcagtgaaccaaggtggtgccactgcactccagcctgggtaacagagtgagatcctgtctcaaaaaaaaaaaattatttgtgagggtgaaatttaaatacctttgtgcatagctatcagttattctttgttttaatatttagtttattgtgaaatataacacatatagaaacatacataaaacaacacacagggccaggcccggtgggtcacgccttgtaatcccagcactttgggaggccgaggcgggcggattacttgaggtgaggagtttgagaccagcctggccaacatggtgaaaccccatctctactaaaaatacaaaaattagtcrgatgtggtggtgcatgcctgtaatcccagctacttgggaggctgaggcaggagaatcgcttgaacctgggaggcagaagttacagtgaaccaagatcgcgctactgcactccagcctgggcaacggagtcagactgtgtctaaaaaaaaagaaaaaaaatataggctgggtgtggtggctcacgcctgtaatcccagcactttgggaggccgaggcgggcagatcccttgaggtcaggagttcgagaccagcctgaccaacatggagaaaccccatccctactaaaagtacaaaattagccgggcatggtgttgcatgactgaaatcccagctactttggaggctgaggcaggagaatcgcttgaatctgggaggtagaggttgttttgagctgagatcacgccattgtactccagcctgggcaacaagagcgaaactccgtctcaaacaaacaaaaaacaaaacaaaaacaaaaaacacagtgtaacatgttattataaagtcactgctcagggaccaacttggccggtcctgtgcctctagagggaagctccttcccactgttctttagagttttata

SEQ ID NO: 667242 - DNA, 1561 bp, Homo sapiens
cacctgccttggcatcccaaagtattaatttttttttttttttttgagacgaagtcttgctgtgtcgcccaggctggagtgcagtggcccgatgtcggctcactgcaagctccgcctcccaggttcacgccagtctcctgactcagcctcccgagtagctgggactacaggcgcccgccacgatgcccagctaattttttgtattttttttagtagagatggggtttcaccgtgttagccagggtggtctcaatctcctgacttcctgatctgtccgccttggcctcccaaagtgctgggattacaggggtaagccaccacgcccctccaagtattaaattttttatttaaaaaatctcccctctccaaagatctcccagcatttctgcagaggtctctacctaggtaaggagaagaaactattcttggccgggtacagtggctcacgcctgtaataccagcactttggaaagccaaggttggaggattccttgatcccagaagttcgagaccagcctggccaacatggtgaaaccccatctttaccaaaaatacaaaaattaggtgggtgtggtggagtgtgcctgtagtcccagctactcaggaggctgaggtagaaggatcgcttgggcctgggaggtcaaggctgcagtgaaccaaggtggtgccactgcactccagcctgggtaacagagtgagatcctgtctcaaaaaaaaaaaattatttgtgagggtgaaatttaaatacctttgtgcatagctatcagttattctttgttttaatatttagtttattgtgaaatataacacatatagaaacatacataaaacaacacacagggccaggcccggtgggtcacgccttgtaatcccagcactttgggaggccgaggcgggcggattacttgaggtgaggagtttgagaccagcctggccaacatggtgaaaccccatctctactaaaaatacaaaaattagtcggatgtggtggtgcatgcctgtaatcccagctacttgggaggctgaggcaggagaatcgcttgaacctgggaggcagaagttacagtgaaccaagatcgcgctactgcactccagcctgggcaacggagtcagactgtgtctaaaaaaaaagaaaaaaaatataggctgggtgtggtggctcacgcctgtaatcccagcactttgggaggccgaggcgggcagatcccttgaggtcaggagttcgagaccagcctgaccaacatggagaaaccccatccctactaaaagtacaaaattagccgggcatggtgttgcatgactgaaatcccasctactttggaggctgaggcaggagaatcgcttgaatctgggaggtagaggttgttttgagctgagatcacgccattgtactccagcctgggcaacaagagcgaaactccgtctcaaacaaacaaaaaacaaaacaaaaacaaaaaacacagtgtaacatgttattataaagtcactgctcagggaccaacttggccggtcctgtgcctctagagggaagctccttcccactgttctttagagttttata

SEQ ID NO: 667243 - DNA, 661 bp, Homo sapiens
tttttagccgtctgcagggtcgggtgaaggttcagcagcctgctgtgattttatcaatgaaggagggggtccatgcctgcccctgcctctgcgcacagcgatggacgggtttgtgcagggcagggagctgggctggaggacctgcctcacgaggctcatggttctatcaccaggaaccagattcagcagctcagcgacggtgggtttctatccatttatgctggagggattcaccgcatcttgtctctatctctttttcacacccargttctggattcatcactgtcctgcttgggaacatggtgaggacaaaatgatgtccaggagccttttctttggccattgctagcctgagacgaaaagtcagtggcaacccctcttccctttcctgggcatggctgcagcctgggagccctgaaggaggctgctgcctttggcccagccatggttacggcccaaggccttagacccggggtccctggacatgagggggtctcagccttcctggagggcagtactcccggcctctatgaagtgcactctgcatcatccagtcctgccttcccttctccccttgaaccttgttcctgttttataattctccctcccctagcctcactgcctctgcagcccacagccccaccacatcctgccctatctg

SEQ ID NO: 667244 - DNA, 654 bp, Homo sapiens
ttgcaaagactctccatatcctttggttcctgtgagtctcaaatccacccagtgaggtacaggtgggccggtggatggtcacctccatttcagaagagaggcagctaaggctcagggaatctccctatccctgacccgggaaaggccttaagagaaagtggtcttttaaactgtgtgtatatatcactttgataaaattaaaaattagttttaaagaagagagagggccaggcgcagtggctcacgcctgtaatcccagcactttcggaggccgaggcgggcaggtcgtaaggtcaagagatcgagaccatcctggctaacacaggtgaaactccatctctattaaaaatacaaaaaaaaaaaaattagccgggcgtagtggtgggcacctgtagtcccagctactccagaggctgaggcaggagaatggcgtgaacctgggaggcggagttttcagtgagccgagattgcgccactgcactccagcctgggcgacagagtgagactccatctcaaaaaaaaaaaaaaaaaaaagagtgagggccaggcgcagcsgtcacgcctgtaatcccagcactttcggaggccgatgcgggcagatcacgaggtcaagagatcgagaccatcctggccaacatggtgaaaccccgtctc

SEQ ID NO: 667245 - DNA, 1483 bp, Homo sapiens
tgccctgggaatctagctgccaagttctgaggaagcccaagagaccacaagtgggtgttccagccaacagccccaattcatgtactagctgacagccagtttcaatgccaaacatggaagaatgcttttaatacgactccagtcccaggcactatctgcctgcaaccacataagagaccccaagtgcaaaccaccccagttgacctgaagaaccaccatagatactgacgatcagtaatttgttattatcttgtcaccaagatcggggcagtttgttacagggcaagaaataactgaaacaaactatgattttaagctcctttaaggcaagtagaggaaagaggatatagaatattacactcatgcaagacgcccaggatgtacaatgaagccctgctactaagtagctgcgtgcctggttaagctctgtgagcttcaatttccctaagcgaaaaaaagtgtcgatttatatcaatttacatgtctcaaggttttttaagcataggatatattgcatgaaagtcagatcatatacagtaaacaacaaagggcagctattgacattagtattactgttgttagggctggtatttgggtggccagcgttctcttccagacctcttccattcctatatgggccatagatagaattctccactgctcattggctgagaacacatcaattgtgtctgcagctcacacgagggaccagttagtttcacttttctctgagtttgctctttctttcctattccttaatcttggttctgattcccaggcagcaaagcctagcaaataagagaggcagcagagtgtagtggatacaggcataaatgctggagctgactgcctgagtttggatcctggctctgcttcttgctgtctttgttacctgggacaacttgtatgctttctttgcctcaatgtcttcatcttaagaatgggactaagaatactatctatcttacagggcttttaagaggattcaaataaatgaattaacatatatagttcttagaactttgatatatagtaaatttcttagtaagcattgagagcacttgttcactaagttggataaagtgacttattttggtaatgtgaaaaatagacctcaatagaaacagaagggctggcttcacttccaaccagctccccagtagaragtagggactgggttttgactaggggattgggtacccctacagtgacatcttgaagacacattctggtagccattgcttgacaggcactagggacagatttgaaggcagggtgtgataggctaactattgctgtacttctaaaatctgaaacacataaaacatgctccgagaaaagtgacatgaaaagtgtgacttatataccagactggggctagaagaatagatgaggaaatgagaatcaaattgtgctaccgatggacagaaggtgccatgaggaaggcatcatttcatctgcaatgcgatgcccagacatgttc

SEQ ID NO: 667246 - DNA, 641 bp, Homo sapiens
ttttctggaaatgagctttaaactttccacacatgttaaaaaatattttcacgtgcagggaaacagattaattttattaataccttaattatttatataattgasaagcaagcatacaaataaatatcactgagggagatatttgtgaaaatttttaatggacatattttgtgttttctgtgagctgggttagttctattagaaatctattttaatctaatcagttaattactaagatgtaaatacggcatggggaggattttacttttcagaaaaataggactcaattttttcaatttttttaatgttatgggaaaactccaagaacaaaaaaagcaatcttttacaaatatgtgacttcttttgtttttatgtctcatttttcatagaacaattctattcctggcattttccacccaatttgagaccatcatagtccactgaatatagatgcccttcactttgggtcacaagtgtaatcctgaaaaattgtagaccagtcagagttttctaagttgaatcagctaaactgcatgcacttttttttccaaggggattctatgggaagtcctttggggaaatgaataaaaccatttatatgacaatatcttcatttgcctatttttacattcggattttaa

SEQ ID NO: 667247 - DNA, 641 bp, Homo sapiens
ttttctggaaatgagctttaaactttccacacatgttaaaaaatattttcacgtgcagggaaacagattaattttattaataccttaattatttatataattgacaagcaagcatacarataaatatcactgagggagatatttgtgaaaatttttaatggacatattttgtgttttctgtgagctgggttagttctattagaaatctattttaatctaatcagttaattactaagatgtaaatacggcatggggaggattttacttttcagaaaaataggactcaattttttcaatttttttaatgttatgggaaaactccaagaacaaaaaaagcaatcttttacaaatatgtgacttcttttgtttttatgtctcatttttcatagaacaattctattcctggcattttccacccaatttgagaccatcatagtccactgaatatagatgcccttcactttgggtcacaagtgtaatcctgaaaaattgtagaccagtcagagttttctaagttgaatcagctaaactgcatgcacttttttttccaaggggattctatgggaagtcctttggggaaatgaataaaaccatttatatgacaatatcttcatttgcctatttttacattcggattttaa

SEQ ID NO: 667248 - DNA, 641 bp, Homo sapiens
ttttctggaaatgagctttaaactttccacacatgttaaaaaatattttcacgtgcagggaaacagattaattttattaataccttaattatttatataattgacaagcaagcatacaaataaatatcactgagggagatatttgtgaaaatttttaatggacatattttgtgttttctgtgagctgggttagttctattagaaatctattttaatctaatcagttaattactaagatgtaaatacggcatggggaggattttacttttcagaaaaataggactcaattttttcaatttttttaatgttatgggaaaactccaagaacaaaaaaagcaatcttttacaaatatgtgacttcttttgtttttatgtctcatttttcatagaacaattctattcctggcattttccacccaatttgagaccatcatagtccactgaatatagatgcccttcactttgggtcacaagtgtaatcctgaaaaattgtagaccagtcagagttttctaagttgaatcagctaaactgcatgcacttttttttccaaggggattctatgggaagtcctttggggaaatgaataaaaccatttayatgacaatatcttcatttgcctatttttacattcggattttaa

SEQ ID NO: 667249 - DNA, 658 bp, Homo sapiens
tggaggccaggaaggccaggatcagggcacctgcagatttagtgtctgatgagagccttcttcctcatagatggtgccttttcactgtgcccgcacatggtggaagggatgagggagctctctggggctgcttttataggcactaatcctgtaatgaagggccagctctcatgaactaaacaccttacaagggccccgcctcctagtactattaccttgggggttaggatttggcagayacacaaacactcagtccgtagcagtgtagagtggcatgtatcatgtgggggtcataatggaggtgtgtaccttgtattgtatgagatcagaggaggctgtagggtctgttgagcctgggagtgtcagagtatttcatggaagtgttggcatctttgcctggatttgaaagatggatgggatttcatcaggctgagaaggtgggataggagggcactccaggtagagggaacagcaagtgcagagataagagtagggagagcggtttggcatctgagcttggggactgagatcagaggcatagtaagaatcacaaattttggatttctgtttcaaatattactgatgtttatgtgatcacacagtgacccaaggttgccagaacagacatttcctccctgccacatgtgtcacacaggcc

SEQ ID NO: 667250 - DNA, 414 bp, Homo sapiens
ggttatttgagtgtagagaatgtattcatccacgtgtatcttgcagcttccaggaaagcaacttaagcttaatagccgctccaatgtgaaagatattatggaataaattgtcaaaaaagacagatattacatttacttttgtgatagtttacatctataaggaaaaaataggaaagacttttcaggaatggtagcgacatgaataccaataaccaattccattctttaaaaatttaaaaatgtgaatttaaacaagtggcaattttagttgtaaaaccatatgtaagaattaccttttcttctrctctcttgcctggtgaagagagtctaaggcttctgaatatatctgcattgccaagaccttaccgacttaaccatatttagcacaacatgtgattttattgttcatctgca

SEQ ID NO: 667251 - DNA, 675 bp, Homo sapiens
cttagatattcctttcttgattattgtccagcaatgagcaaggtcttggaactggctaatttccttcttcttcctatcttcttgcttgcatttgtttgmaatttggtcttcagcatgtctttaaaaaatactgcatgtcacaattatttaaggaacctcagaacactgcaattagattttcataacaagcatatactttatgtcctttatttccaattcatgcagtatttaaaatgacaatatgaaaaaataaactatgaaaaattaaaataaatatattagtatattagacataaataaaaatttaaaaacacactgaatggggaaggtgggtagttggctggagctgtgtgtgggaatagggagcaaataagaaaacctgggaatctccattgggttcagcaactgcttggctgtgtggccttggacaagtcaattctcgctggtttcccagtctgtaaaacaggcaggatgtgatagctgaggttccttccttattaattttgaagtgtgtaagagctttcttaagcatcttaaataacatgtttaattttctctgtggttgtgaaatgatgcaaaagaaattagaaaaatgtagctgttaatgagactcatctgcgttttgtgattccttagaatttgtggtgtatattttagggttactcccatctcttt

SEQ ID NO: 667252 - DNA, 821 bp, Homo sapiens
tgatttcagaatccactctagagtggtgatgggcactttggaaaacagattagaaattggtccagaactccaaagatgtagcagattcagttagcctgctcaaggcatggttgcggtatacagaacaccctataggcccatagtactatttaatcataatgttcaaggagattttgttaatttttttaacttgctacactgcgtagcactattttattgaatgatcatttaaaagtttcgtctttccctacagtgggcttttattacaaatgtatattttaataactttttataaagaacatttcaaatatatttagagtaaagagaaaactataacgaacctcttaccatccaacttcaacaatgatcgcatcatagcctggtttcacttccactccatcccatacccaggattattttgaagcaaatcccaggcttggcatcatttcatctgtaaatatttcagatggtatctctaaaagatagggactcttttttaaaaaaagaatgctgggctggactgagctagttacctcctgctattgtggaggcaactcacttcatcccaacttcttgatacttttgcttctggaagtcatatttctctaacatcttccagaaaagtcttaaagctgccttaaccytttttccagtccacctcttaaattttttccccctcttcctcaatactaacatgagtgtggatctggcttgtctgcaaagcttgccttgcttcgaagcatccgactgtaaagaatcttaacctatggctgtgatttgtgggcctgaagaaaactatccatccttgcaaatgtcttctg

SEQ ID NO: 667253 - DNA, 575 bp, Homo sapiens
agctgcaggggaaggccttaatgtaataagcaaatgactaggtattttagtactccacaaaccatggatttattcctaaactactccacgaacacgcaacctgaagatgtgtgaagatgagtgaaattgatattactcagtttcactctgggtagtggctgaatccttcctctcccctcctcccctccctgataggatttttcttgtatggaaaccatgtgttctggcttccattatgcctatccagtcaatttgatggaggrtacagtatggttggagcctaatcagagaggtttctttctttttttcctattggatcttccggagaaaagacgttttaataaccttggctactaaggacaacatgatagaagctgtctctggctatagataagtagatctaatactagtttgaatatcttcagggtttagaatctaacctcaagaataagaaatacaagtacaaatttgtgtgatgaaggcatattcctattttttgggattgggaggctttacttattttttaaaaactattgaggtaaagggttaagctgtaatatacttcattgatttcc

SEQ ID NO: 667254 - DNA, 1369 bp, Homo sapiens
tggaatgtggagttcaaaagtttcttagacaacttcctctcagacttggttcagaaaaggataataggatgctctacttttactttgctttttagattctttgtgaaataagataggatatagaataaatgtctaaacttataatgccctgcaaggctgaggcatctctgctggctgtagcttcagttgtccagttacagccttcttgcccatttaactcttacctttgcttcagatcctgttcttaactctgagttgctctgctcattcccaagcttacctttgttggagatgctttttccaattaatacatttatggagcacttactgtgtgtcagattcaggcacaagggatrctgtttttcttttctatgctaactctgccttcttgcatcccaacctcagctggatttctggagctccttgagatccatttaccctatgcctaggaatgggcaggccagcagttgcagagatactggagtctattgagaccatatctacggggaggagccgaggctcaggtaatctgaagcaagttaacaggtttcaagtcagggtcagagacttaagaaatcagatgtgggtgttaagatcagacaaaagcaaattatagggaacaggagaaaattaaacgagcagttgtcataaacgccagtttgtctttgaatcatgtctttctaggtggttggcttggttcaaattttgttatttattatcctgctatgaattgtggtttcataaatattttatttatagtagtagtattttttagatgtttagatgtggaaacataataacgttatattttctgctggtaaaattgttccttgcttgtataatgttatgctggaattaaatacatcagtaaatcatggtgctgtgtgaagggcattatggcttccaagtatttggtcaccttaacaagtctgaaaatcactgttgaggaaaataatctaatggcaaagaataagctaactgaaaaaagattccaacccaattcagtaatactgtaaacagttaccactttaatgtattttatgtttttgcagccctttacattagcttattctttgtcaggttcatatatgtacacatgaaatgtatgtgtgtacatgttaggtggagcatcatatatgtttatagtttataaggcagaattaaatttatgttactatggtttggcattatagttgcttattctctgtccttaattatgtggacagacataaaattgttagaaaattaagccctattctgattatcacttacaaccttgtttaaattttcttttcttttcttttttctttttttttttttttttttttgagatggagtctcactctgttgcccaggctggagtgcagtg

SEQ ID NO: 667255 - DNA, 1369 bp, Homo sapiens
tggaatgtggagttcaaaagtttcttagacaacttcctctcagacttggttcagaaaaggataataggatgctctacttttactttgctttttagattctttgtgaaataagataggatatagaataaatgtctaaacttataatgccctgcaaggctgaggcatctctgctggctgtagcttcagttgtccagttacagccttcttgcccatttaactcttacctttgcttcagatcctgttcttaactctgagttgctctgctcattcccaagcttacctttgttggagatgctttttccaattaatacatttatggagcacttactgtgtgtcagattcaggcacaagggatgctgtttttcttttctatgctaactctgccttcttgcatcccaacctcagctggatttctggagctccttgagatccatttaccctatgcctaggaatgggcaggccagcagttgcagagatactggagtctattgagaccatatctacggggaggagccgaggctcaggtaatctgaagcaagttaacaggtttcaagtcagggtcagagacttaagaaatcagatgtgggtgttaagatcagacaaaagcaaattatagggaacaggagaaaattaaacgagcagttgtcataaacgccagtttgtctttgaatcatgtctttctaggtggttggcttggttcaaattttgttatttattatcctgctatgaattgtggtttcataaatattttatttatagtagtagtattttttagatgtttagatgtggaaacataataacgttatattttctgctggtaaaattgttccttgcttgtataatgttatgctggaattaaatacatcagtaaatcatggtgctgtgtgaagggcattatggcttccaagtatttggtcaccttaacaagtctgaaaatcactgttgaggaaaataatctaatggcaaagaataagctaactgaaaaaagattccaacccaattcagtaatactgtaaacagttaccactttaatgtattttatgtttttgcagcyctttacattagcttattctttgtcaggttcatatatgtacacatgaaatgtatgtgtgtacatgttaggtggagcatcatatatgtttatagtttataaggcagaattaaatttatgttactatggtttggcattatagttgcttattctctgtccttaattatgtggacagacataaaattgttagaaaattaagccctattctgattatcacttacaaccttgtttaaattttcttttcttttcttttttctttttttttttttttttttttgagatggagtctcactctgttgcccaggctggagtgcagtg

SEQ ID NO: 667256 - DNA, 789 bp, Homo sapiens
gtggatcttagcttgctgggctccatgggggtgggatccgctgagcaagaccacctggctccctggcttcagccccctttccgggggagtgaatggttctgtctcactggtgttccaggcatcactggggtatgaaaaaaaactcctgcagctagcttggtgtctacccgaatggccgccctgttttgtgcttgaaacccagggtctggagatgtaggcacccaagggaatctcctggtctgcgggttgcgaagactgtggcaaaagcatagtatctgggccagagtgcactgtttctcatggcacagtccctcatggcttcccttggctaggggagggagttccctgtccccttgcacttcctgggtgaggcgatgccccaccctgctttggcttgccctccgtgggctgcacccactgtctaactagtcccaacgagatgagccgggtacctcagttggatatgcagaaatcacccaccttctgcgttgatctcgctaggagctccagaccagagctgttcctggggctttwacgtttttagtgctcatttgtttggcatggggtggggggcaattctatgaggacatttagaattttcagaactattttgctcataatcaggggttgcatgagcattaagtttcaaatctcttcagtagacgaaccatgcaaaataccaatatcactgtgtattagtatttagcagtcttatccttgatgtggagtgtatcctcacacttcctctatgagaagtcttttgtgagacttattcccaggtaaagagcc

SEQ ID NO: 667257 - DNA, 959 bp, Homo sapiens
tcagagtgggccctcacctgggactgcctctcacctgcctggtgctgggagggctggggtgtgctggagcccactggccagtgcgggcagggctggaggtgcccaccacacacatctggtggctgcaccacttcacggcattgccttcggggagccagtggccaggcacacccctgctcagtgcccctcacctagtgggtgggacattgtgtataaagggctctaacctcaaggagcggtcagggttcaaacctaggggtatgagcatcgcttctgcgaaagggttttagcatcttttgggtccgggcactgaggctcacgcctgtaatcccagcgcttaagaggccaaggtgggaggattgcttaaggccaggagcttgagacccacctgggcaacacagtgagaccccatttctaaaataaaaaaaaaaatatatatatatatatatacacaaaaattagctgagttaggtggttcctgtctgtagtcccagctactcgggaggctgaggtrggaggatctcttgagcctaggagttagagtctgcagtgagctatgattatgccaccgcactccatcctaggtgagaccctgtctcttaaaaaaaatgatacttttggaagagagatttatactttccttcagatttgcaaaggggccttgacccaaaacagcttaagatcctcccctgcaaacacagagacaggccagcgccaatcagctggtctgtaaggtaaacagaagcctggcctcctcttcaccaccccctgggcctctccactgaggggggctcctccggtacgaggggggctgacctggtggccccacagagtctggaagatgggggggtgatacagaggctggaaaatggccatcagtggactcagggaatcttgtggcaggtttgtccagctcacccagcccctggggctcagatttcacagggttggggtgggga

SEQ ID NO: 667258 - DNA, 2229 bp, Homo sapiens
ttatatagtccctgctgagaacctgagtgcattggaaattgttgacgtgaaataagggatgtaatactcatgcatctttgcaggaatttataaactccatctgttcataacattcaatcacaagattatgtacctggacctcattagctcagctcccagaagagaggtcatattttaatgttattactcttactcttattaagagtttatgtaagaaacttatatgaaaaacaagtcarcaaatcctacaaacttggacttttagatgctgttatgtcatttgttgctaaatctgtggaggatgggacaaacagatggttgttgagtagggcagtgccatgaatccctcctgcagggtaggaacattaatctgagagcaatgacatgatagattggaataaatagccagttgagataaacagagggggtgagcacagtcaggttatggttggatttttagctagaaattatgaatcagtcatgacagtagagcccaattcagattttgctggatcttgagttcccattattgcaagttaggataaggaaaccagtcttcacagagtaaggtggtttggagaaagaggtagaagctactagatagttcaataggatctcactccatgaaggaattcatcttgttttcaactgtatcagtgcttacattctcaacctccaaacacagtaaaatggataaacttggtaaagtgaatgactagagctttgcatccttagactagcaacagagacaagagtttgccatggaaacagtgtgtgaatattaatgtccattgtcaacaatgaacatgtcggtggctacatgtttccaaagcctttttacaccttgtgtttataaatcgtcaaagcttgctctcaccaagacagaagatgggggaatcatgtcagtgggaaacagcaaaaataaatgtcccctggatttttaaatagaggattcactgtagaaaacaaatgaattaaatgataccatgaaaagagaaatacaggtgtcaatagactaagggtcacaaaaatgataagaagaaggaaaaataatgatattgggcatcagtactagttctgataacttctcagttctttagcgtctctacagctctgcaacttttagtagcttaacttatgtgttcattcccatgcatgacccaactgggaaataaaataacaaaagaaatgaattggcatttcaaaaaacaacatgcaaccagctactacactcataagaagaaggttaattaaaaggaatgcgcatgggaaggagatgccatgtctgctagtagatctccaaagatgagaatgattgctggcacccagggttgctgaggggcagcaacacacactattgggtgacagtgtcaagagggtgatctttctggagagcattttggcaatatacctcagtatttaaaatgtgtagactctacccagcgatccaagttttaggaattcatattgagagactattaagaagcatctttagagcagatgagttaatatatggaaagcatttcaaacactctagtacatagtaagagccaatgtcagcaaaaaaaataaataaataaaaaaagaaagaaacaacttaaatgtccatcaatacacaatcagataaaaatggaccatcaaatagagcattaccaggcattaaaaattaagatgtggctagatgttgatatcaaaatatatccgtaacatgtgttgaatgcaaaagtcaagttaacgaacagcgtgcgtgctgggattctatttctgtaaagtgacatgtgagtatatgataagaatagagcgataaacaagagcttgtctcccaaatctcattatctctgggtgattttattcttactttattctttatccctttttaataggctgaagattttaatattaccatgtgtattttataatcatagaaaataatactattatgttcatctagaaaacttgagaatatataccaaaaacatgcactttttctgaacctaagatttgataaagattaattataatataaaatggaatttattttataccatatatatccatacagagaaattactatgtaaaaaaaaatagaagcaatctaaaatttggtttgaaatacacaagcatagaaattccaaagttttggtatcacaactcaggaaagtcaccttccattctcaggaaacaatgtagctttatactaacctaagggttagttaatagataaatgca

SEQ ID NO: 667259 - DNA, 1506 bp, Homo sapiens
ctttaggttttctttgatttccttcctccctttccctatttcttttctgtttgtaagaaaacagtaaaaatagctgtattctcatagaaagccttgagattttcatactcactgcatgtaaaaaaatgcaaaggtttctctctgctattttgtttgttkgtttgcttgcttgctttcccgagatggaaccttgctctgtcacccaggctggagtacagtggcacgatctcagctcactgcaacccccccccactcccaggttcaagcaattctcctgccccagactcccaagtagctgggattataagcacacgccaccacacccagctactttttgtatttttagtagagatggggttttgccatgttgcccaggctggtctcgagctcctgacctcgtgatccacctgcctcagcctcccaaagtgctgatattacaggtgtgagccattgcaccctgcctgctatttagtttttaaaggatatataccatacagcaaaatatgtcacccatattttaaaacatttataagcctcaatttttagatattggtattttgagtctggatttgggaatgaaaaaaatgcacattttgttcctatattttcgcattgtatactttgaagagcagacacaaatgtcttaacatggtattcctgaaagttatcctcaaatactggggtagatactaatttctttttaatatactatttaaaactgcaaaatcaattattttactctaaaaattaacatttttgtgaggctggaaatgaatgaagtcattttgattatttagattaccaaactttggcaaaacatttctcaatggatgaataagcagctttgtgttttatttaaaacaagatagatgcatatgttaatattcctagtatttcaaatcagtccaaatcagaatatattctgagcaccttctgtgtaccattgagcactttttgtgtactcaatttaggatactaatggcaatacaagcacaaatgaaagtgtatataaaatggtcaaattcactaaagcacagttggacaaaatttttctgtaaggggacagtttgtaaattgtttatggtttgtgggctgtacagtctctgtcactaatacccagctattccttcataggacaaaagcagatgtaaaaaatttagaaatgaaccgacatggctgtgcttcaataaaactttattcataaaagaagagaagctagatttgccttcaggttaaccccctgtactgaaggattattttatgcatgctgggcactaaaaacattttgtttcctttgcattcacttcaataaaatttccagtaaatggtatttctaaagacagttgagtttgcctctgtagtcacatttttattgaactttatagttgctttatttttatagtcacttatttagttattaacagtcagatttgtattattaatgtccttggatagttcaacatgtgcaacgcaaggaaccaataaaacaaattttggaaataaaca

SEQ ID NO: 667260 - DNA, 1506 bp, Homo sapiens
ctttaggttttctttgatttccttcctccctttccctatttcttttctgtttgtaagaaaacagtaaaaatagctgtattctcatagaaagccttgagattttcatactcactgcatgtaaaaaaatgcaaaggtttctctctgctattttgtttgtttgtttgcttgcttgctttcccgagatggaaccttgctctgtcacccaggctggagtacagtggcacgatctcagctcactgcaacccccccccactcccaggttcaagcaattctcctgccccagactcccaagtagctgggattataagcacacgccaccacacccagctactttttgtatttttagtagagatggggttttgccatgttgcccaggctggtctcgagctcctgacctcgtgatccacctgcctcagcctcccaaagtgctgatattacaggtgtgagccattgcaccctgcctgctatttagtttttaaaggatatataccatacagcaaaatatgtcacccatattttaaaacatttataagcctcaatttttagatattggtattttgagtctggatttgggaatgaaaaaaatgcacattttgttcctatattttcgcattgtatactttgaagagcagacacaaatgtcttaacatggtattcctgaaagttatcctcaaatactggggtagatactaatttctttttaatatactatttaaaactgcaaaatcaattattttactctaaaaattaacatttttgtgaggctggaaatgaatgaagtcattttgattatttagattaccaaactttggcaaaacatttctcaatggatgaataagcagctttgtgttttatttaaaacaagatagatgcatatgttaatattcctagtatttcaaatcagtccaaatcagaatatattctgagcaccttctgtgtaccattgagcactttttgtgtactcaatttaggatactaatggcaatacaagcacaaatgaaagtgtatataaaatggtcaaattcactaaagcacagttggacaaaatttttctgtaaggggacagtttgtaaattgtttatggtttgtgggctgtacagtctctgtcactaatacccagctattccttcataggacaaaagcagatgtaaaaaatttagaaatgaaccgacatggctgtgcttcaataaaactttattcataaaaraagagaagctagatttgccttcaggttaaccccctgtactgaaggattattttatgcatgctgggcactaaaaacattttgtttcctttgcattcacttcaataaaatttccagtaaatggtatttctaaagacagttgagtttgcctctgtagtcacatttttattgaactttatagttgctttatttttatagtcacttatttagttattaacagtcagatttgtattattaatgtccttggatagttcaacatgtgcaacgcaaggaaccaataaaacaaattttggaaataaaca

SEQ ID NO: 667261 - DNA, 1506 bp, Homo sapiens
ctttaggttttctttgatttccttcctccctttccctatttcttttctgtttgtaagaaaacagtaaaaatagctgtattctcatagaaagccttgagattttcatactcactgcatgtaaaaaaatgcaaaggtttctctctgctattttgtttgtttgtttgcttgcttgctttcccgagatggaaccttgctctgtcacccaggctggagtacagtggcacgatctcagctcactgcaacccccccccactcccaggttcaagcaattctcctgccccagactcccaagtagctgggattataagcacacgccaccacacccagctactttttgtatttttagtagagatggggttttgccatgttgcccaggctggtctcgagctcctgacctcgtgatccacctgcctcagcctcccaaagtgctgatattacaggtgtgagccattgcaccctgcctgctatttagtttttaaaggatatataccatacagcaaaatatgtcacccatattttaaaacatttataagcctcaatttttagatattggtattttgagtctggatttgggaatgaaaaaaatgcacattttgttcctatattttcgcattgtatactttgaagagcagacacaaatgtcttaacatggtattcctgaaagttatcctcaaatactggggtagatactaatttctttttaatatactatttaaaactgcaaaatcaattattttactctaaaaattaacatttttgtgaggctggaaatgaatgaagtcattttgattatttagattaccaaactttggcaaaacatttctcaatggatgaataagcagctttgtgttttatttaaaacaagatagatgcatatgttaatattcctagtatttcaaatcagtccaaatcagaatatattctgagcaccttctgtgtaccattgagcactttttgtgtactcaatttaggatactaatggcaatacaagcacaaatgaaagtgtatataaaatggtcaaattcactaaagcacagttggacaaaatttttctgtaaggggacagtttgtaaattgtttatggtttgtgggctgtacagtctctgtcactaatacccagctattccttcataggacaaaagcagatgtaaaaaatttagaaatgaaccgacatggctgtgcttcaataaaactttattcataaaagaagagaagctagatttgccttcaggttaaccccctgtactgaaggattattttatgcatgctgggcactaaaaacattttgtttcctttgcattcacttcaataaaatttccagtaaatgrtatttctaaagacagttgagtttgcctctgtagtcacatttttattgaactttatagttgctttatttttatagtcacttatttagttattaacagtcagatttgtattattaatgtccttggatagttcaacatgtgcaacgcaaggaaccaataaaacaaattttggaaataaaca

SEQ ID NO: 667262 - DNA, 677 bp, Homo sapiens
tataatatataaatatataatatatattatatatwatatataaaatatataatatataatatatgtatattttatatataatatatataaatatatattatatataatatatatattttatttatatataatatatatattttatttatatataaaatatatattttatttatatataatatatatttatattttttatttatatataatatatatttatatattatatattatatatatttatatattatatattatatatatttatatattatatataatatatatatttatgtattatatattatatatatttatatatgtaatatatatttatgtattatatatttatatattatatatattatatatattatatacttaatataatatataatatatattatatatattgtatatatataatatatatttatatattttatatataatatatatatttatatataatatatataaatatatatattatatatatggcattttggtcttgagcaaagcaatccagttgtttgattatctagaaaactcttcttgaaacttgcatgtgcccactgcaggctgagcagttttcctgggagggaatgggacatgaggcatcggagacggtgctgagaagaatccgtttaccctggagcaaaacgagctgcagcctc

SEQ ID NO: 667263 - DNA, 677 bp, Homo sapiens
tataatatataaatatataatatatattatatattatatataaaatatatwatatataatatatgtatattttatatataatatatataaatatatattatatataatatatatattttatttatatataatatatatattttatttatatataaaatatatattttatttatatataatatatatttatattttttatttatatataatatatatttatatattatatattatatatatttatatattatatattatatatatttatatattatatataatatatatatttatgtattatatattatatatatttatatatgtaatatatatttatgtattatatatttatatattatatatattatatatattatatacttaatataatatataatatatattatatatattgtatatatataatatatatttatatattttatatataatatatatatttatatataatatatataaatatatatattatatatatggcattttggtcttgagcaaagcaatccagttgtttgattatctagaaaactcttcttgaaacttgcatgtgcccactgcaggctgagcagttttcctgggagggaatgggacatgaggcatcggagacggtgctgagaagaatccgtttaccctggagcaaaacgagctgcagcctc

SEQ ID NO: 667264 - DNA, 677 bp, Homo sapiens
tataatatataaatatataatatatattatatattatatataaaatatataatatataatatatgtatattttatatatwatatatataaatatatattatatataatatatatattttatttatatataatatatatattttatttatatataaaatatatattttatttatatataatatatatttatattttttatttatatataatatatatttatatattatatattatatatatttatatattatatattatatatatttatatattatatataatatatatatttatgtattatatattatatatatttatatatgtaatatatatttatgtattatatatttatatattatatatattatatatattatatacttaatataatatataatatatattatatatattgtatatatataatatatatttatatattttatatataatatatatatttatatataatatatataaatatatatattatatatatggcattttggtcttgagcaaagcaatccagttgtttgattatctagaaaactcttcttgaaacttgcatgtgcccactgcaggctgagcagttttcctgggagggaatgggacatgaggcatcggagacggtgctgagaagaatccgtttaccctggagcaaaacgagctgcagcctc

SEQ ID NO: 667265 - DNA, 677 bp, Homo sapiens
tataatatataaatatataatatatattatatattatatataaaatatataatatataatatatgtatattttatatataatatatatawatatatattatatataatatatatattttatttatatataatatatatattttatttatatataaaatatatattttatttatatataatatatatttatattttttatttatatataatatatatttatatattatatattatatatatttatatattatatattatatatatttatatattatatataatatatatatttatgtattatatattatatatatttatatatgtaatatatatttatgtattatatatttatatattatatatattatatatattatatacttaatataatatataatatatattatatatattgtatatatataatatatatttatatattttatatataatatatatatttatatataatatatataaatatatatattatatatatggcattttggtcttgagcaaagcaatccagttgtttgattatctagaaaactcttcttgaaacttgcatgtgcccactgcaggctgagcagttttcctgggagggaatgggacatgaggcatcggagacggtgctgagaagaatccgtttaccctggagcaaaacgagctgcagcctc

SEQ ID NO: 667266 - DNA, 677 bp, Homo sapiens
tataatatataaatatataatatatattatatattatatataaaatatataatatataatatatgtatattttatatataatatatataaatatatattatatataatatatatattttatttatatataatatatatattttatttatatataaaatatatattttatttatatataatatatatttatattttttatttatatataatatatatttatatattatatattatatatatttatatattatatattatatatatttatatattatatataatatatatatttatgtattatatattatatatatttatatatgtaatatatatttatgtattatatatttatatattatatatattatatatattatatacttaatataatatataatatatmttatatatattgtatatatataatatatatttatatattttatatataatatatatatttatatataatatatataaatatatatattatatatatggcattttggtcttgagcaaagcaatccagttgtttgattatctagaaaactcttcttgaaacttgcatgtgcccactgcaggctgagcagttttcctgggagggaatgggacatgaggcatcggagacggtgctgagaagaatccgtttaccctggagcaaaacgagctgcagcctc

SEQ ID NO: 667267 - DNA, 2311 bp, Homo sapiens
ctctggcctccaaagagtcacattcatgccacatactttcattccatccacagtccccaaaggtttcatcccattacagcatcatctcaaagtcttaaatctcttcagctcaaaagtccaaaatctgaatcatccaaatccgagctggatgagtaatctgttaagtacagctcctggggaagaacttctctccgtctgtgaacctgtgaaaataaggaagcaacatatctgctcccaacatgcagtgatgggacgacatagtaacaattatagacactccagttctaaaagggggaattgaaaataaaatggagttgctgctccaaagcagcctggaaacccagcccagccaatgccattgggtttccaggccagagcttatcgaacgtcagcctcagctttgccctccgggtcagatgtcagaaaaagatgacagtggaaatgcctcttgtaagggacttgaatgcatcaggctggtgggggaagaagccctgcttcagtccacttttgagtatcgtgcaaacgtcacacatttccacctgcacagaacgacaaggacagaactgcatttccacctgccgtggaactacaagaggcaggagtggtacctctggtgagggatggcccaggatttgcagcaatccacctgggctgtcctgtggccagatctcaggaagcacttagcacagagaatgtggttgagtaaaaggccattaacaagatttgcccttggtccaccatgagccagccacagttttagtagacatattgcactggctgaggatgccaggcttagtaaaaatggagaattatatgccaaaattaacatttgccacagaatgccatggctccctgccaggtcctgtccttggttggagcctgcagaccccacccctgcacggatgtgcgtggatggtatttgcacaggctgttcacctggaacttagcccaaacctgtgcctgtactttaagccttgccctttgcatctaaaagtacgcatttttaatactttccatttacattgcatgagctgcttttttgctggaaacatgtttattatgttccgtgtccttattttttaagttaccacccatgacttgctgctgtaagtgtgaaggaaaataactgatatctacatttacagaattacaacttaaggaaatattttactaaaacagatgaagagtaaaattttcatccatttcagcctatatttgttttctgttgtatatctagatgtcacttccaaagaagatkggttcccaaattcttcacactgctagttacatactgatgatatcgtggttactcacatcaaatataatgtctgtttaccttgctggacggtgaccttctaaaggtcacaagccaggtactctcatcagtttatcccaggacttagcattgcgtatggaagaaagcaggcacccagtcaaggttggctgctttgttgatttgaaattatttatctctgctattttatcttcctagaatgattcctctaaagcccatatctcctccaaaattgaaccaaacattacataatacagtaaaaaattagaaataatctggatattcattaacagggtattaatttaaaaaattatgaattgtgatctattttctttttttttgagacagagtttcactcttgttgcccaggctggagtgcaatggcgtgatctcagctcaccgcaacctccgcatcccgggttcaagcaattctcctgcctcagcctcccaagtagctgggattgcaggcatgtgccaccacgcccagctaattttgtatttttagtagagacagggattctccatgttggtcaggctggtctcgaactcccgacctcaggtgatccgcctgcctcggcctcccaaagtgctgggattataggtgtgagccactgtgcccagccgatctatttataccatgagataccaaaagtcattcaataactgtagctaccatcatgaacagagacagagataaacttttgaggggtaaaagccagttgcctgaggaattgttatggtaaaaaacagaatcttacctacatggttcattaatacgagtggaaaataatcttgaatgataaacaccaaatggtcacagtgatttccttaagggaaagcgaagagtgtggacatcacttttagttctacatttcccccgctgtcttaatatttttacattagtttttgatttttaaaaaataaatgactaaaattgccaatgctactgtgaaaccttctgttctttcctctcacacatttgcgggagacacttttcctgtggggtgctggtaaccc

SEQ ID NO: 667268 - DNA, 894 bp, Homo sapiens
cctccgcgatgccctccgcctcccccgcgcccagcccaggctccgcagccgtgtgggagaagggggacagcgtgcttgcgaagggagggggactgggggtgggcgggggtgagtggcctctccggcatccagcccccgccccctgctcggagccgcgcctccgcgcccccgccccctaaaccgcctccggagccctcggaggccccagcatccctggcggagcgcggggaacaggccctggcaccgcgggacccgctccagcagcctcggcggaggcctggggaaggcgcggctctagtgtcccagtaacaacagccagggagagggctccgctgcccccttctccttgcgggtgcaccttccggccttggccacttggctgctgtgtgcccttgggccaactcctctccctctctgagcctggcttcctccgctaaacaaggaagatggcttggccgaccccacagaaaattaaagctgagaaaattaaagcgcgtgaggctggaaatgctccgtgccagcgcgaagcactgggcaaatgggagatggataatgtcgttcctattgtaattaatattattctttgctgtctttagagcacaccaggcaaggtgcactcgacttttcttctcgaaaggcaatgacttggttgcttcccacatcttctgcctctcctgagagctaatgccatttaaagatctgagcatcaggtctgtcgtatgaataaaaactcagtgcaggctgggcacggtggctcacgcctgtaawcccagcactttgggaggccgaggcgggaggatcacttgaacacaggaggcggaggttgcagtgagccgagatcgcaccactgctctccagcctgggtgacagagcgagactccgtcaaaaaaaaaa

SEQ ID NO: 667269 - DNA, 894 bp, Homo sapiens
cctccgcgatgccctccgcctcccccgcgcccagcccaggctccgcagccgtgtgggagaagggggacagcgtgcttgcgaagggagggggactgggggtgggcgggggtgagtggcctctccggcatccagcccccgccccctgctcggagccgcgcctccgcgcccccgccccctaaaccgcctccggagccctcggaggccccagcatccctggcggagcgcggggaacaggccctggcaccgcgggacccgctccagcagcctcggcggaggcctggggaaggcgcggctctagtgtcccagtaacaacagccagggagagggctccgctgcccccttctccttgcgggtgcaccttccggccttggccacttggctgctgtgtgcccttgggccaactcctctccctctctgagcctggcttcctccgctaaacaaggaagatggcttggccgaccccacagaaaattaaagctgagaaaattaaagcgcgtgaggctggaaatgctccgtgccagcgcgaagcactgggcaaatgggagatggataatgtcgttcctattgtaattaatattattctttgctgtctttagagcacaccaggcaaggtgcactcgacttttcttctcgaaaggcaatgacttggttgcttcccacatcttctgcctctcctgagagctaatgccatttaaagatctgagcatcaggtctgtcgtatgaataaaaactcagtgcaggctgggcacggtggctcacgcctgtaatcccagcactttgggaggccgaggcgggasgatcacttgaacacaggaggcggaggttgcagtgagccgagatcgcaccactgctctccagcctgggtgacagagcgagactccgtcaaaaaaaaaa

SEQ ID NO: 667270 - DNA, 998 bp, Homo sapiens
tctcaaaaaattctcaaagtacagaacaccatcttccgactctctcccagttcactcctttgcccttttcttgcacgttctactatgtacgcttatgtattgaacagttcattaagtctttctataaataaaacctacttttcttttttttttttgagacagtctcactctgtcgcccacgctggagtgcagtggtgcaatcttggctcactgtaacctccgcctcctgggttcaagcaattctcctacctcagcctcccgagtagctgggactacaggcgcatgtcaccacgcccagctactttgtatttttagtagacatggggtttcaccatattagtcaggctggtcttgaactcctgacctcgtgatccgcccacctcggcctcccaaagtgctgggattacaggtgtgagtcaccatgcctggcctaaatgaaacctactttaaaaaaaatagagggaaattctgattccagtgctccacattccccttacacactatcagttatttgctatgtaaatgaaaattcttagggtatctcccaacaggatcaaactaataagcataccactccaacaactgtgtttaaaacatttgtagaaatttaaattgamtaacctccagcagcagcaagcactattcttggccccttataatgtgtggttatataatccactaagtccttacgacttatagatctgtaaatgaagtaaaacaatttttaaaggaaaccaaaaaaaaaacagatcttcacataatatacctgaaatcaaattggaccataactgtatcctaaaatgcagtcagaaataggatacaggcaacacatcaaagaacttcaccttttttacatcaaagaaaaaatacaccattactggtttattcccgaagtacctatgaactcacgtgcttgggagctaggtgggactaaaatgtagctaactacagtttcacttagattaccagggggaaaattactttctgaaacatacttt

SEQ ID NO: 667271 - DNA, 1461 bp, Homo sapiens
cagctcactgcaaactccgcctcctgggttcaagcaattctcctggctcagcctcccaagcggggattacatgcatgtgccaccacgcccggctaattttgtatatttagtagagacggggtttctccaggttggtcaggctggtttcgaactcccgacctcaggtgatccgcccgcctcagcctcccaaagtgccgggattacaggcgtgagccactacgcccggcctgagccaccgcgcccctccaagagtcttaacttcttccagcaccaactcaaaagtccaaaaaccagaatctcatctaaaccagacacagatgagactcaaaggtttgtttcatcctgaggcaaactgctctccagctgtgaacccatgaaatcaaacaagttaatgtgcttccaaaatacaatggtgggacatgtataggatagatgttcccattccaaaagggagaaataagaagaaaggggttgcaagtaagtccaaaacccaacaagaaaaacaacaagtcttgagattaatctttgcttgatgctgatcttgtgaacacagtgggggcagagtatttttagttttggggaaaactccatattattgatttctaaagtttctttagctaaggtcttcagcatattttttaagtacctgataatgtctctgtcttccccattaaactgtaagctccttgatgagtttattcacctttgtgcctctagctcagtgccaggtggtcaataatgtgtgttaaatgaataaatggctggtgctctgatttgaatatttgcccaagaatcagaaccgagctcttcactggaacctgatcttctacctaaaaccaagtcacgaatttttacttctctggccccacccccacttttttttttgagatggagtcttgctctgtcacccaggctggagtgcagtggcacgttcttggctcactgcaagctccgcctcccgggttcatgccattctcctgcctcagcctcccaagtagctgggactacaggcgcccgccaccacgcctggctaattttttgtatttttagtagagacagggtttcaccgtgttagccaggatggtctcgatctcctgaccttgcgatccaccygcctcggcctcccaaagtgctgggattacaggcgtgagccaccgcgtccggccgagcctttttattagggacataatattcactcctagattttttgcctgatcccacagtctttgagctcctcaggctgagactgctattgaaacactcaggattaaaatactaacatcttcatgttttcctccagaatctttcttgaatttacgaaattcgaaagctgctccattggaaaccattcaggaattgtcatgggtttaggttaaaaacaaaacaaaacaaaacaaaacaacacagcagttgtgccatggaaagcagatcacttgaaacaggtcttccttttctgttttc

SEQ ID NO: 667272 - DNA, 3319 bp, Homo sapiens
tgtgggttctgattcagtcggtctagggtgaggcctgaaactgcatttctaacaagcttcaaggtgagatgccaatgctgctggtccatggaccccacattgagtaacatggagagttgcaaaatgaagtaatgtctactatgaaaagtgcagggtgctctggtatgtctaagaatgaacaaagtctacaattctgtaagatgctggcctcctgcagtttttaatcatctttatctctccctcacagagagctttctaatctttgttaaaaaaaaaaatctgtatcctgtcccaagtcattgttacagaagggtctacaaattttatgatttgttcaacagtaagcccacataaagtgctgcaaggactattttaaaaaacagtgtgagaaagtaacattgtcaaaaccaaaattgatgaaactcaaaagggaaaggcatgaacacaaaatctagaaagagaaaatgtgtgtcagaggaacacagcattggaaggcaactaggaggttacctttttattttcttgccctcttggtgagttcctaattcatactttccccctttgtctaaggaaacgaaaggtcgtgtgcacttgaaagcaacacttggggagaaaggtgccttcaaaatccccaacacctagatttttgtcataaataactttaaagtaattcaaactttaagagttcaagctataacatttcaattaaagtgagactttttaacaaagagccacctatttatattgattctttgacacaatttgaagagaaataaaaatgtattgtttctacttggtaaccttaatggtaaaataaaatgtacagtaaagtctttaagtgtctcaacagccctttgatccctttagattctactgtgaccaaatatcaaagtcacgtttaaattcttccaggaagaatgaaagagtgacatgttggcatgagtaaatgatactaggattccctgtaaattaattaaatgattaatagaatatgatcctcagtaccaaaaaacttacagactaatggaagagatgaaagacgaggagtggtaggggaagagaaagatccaagaagatgaaggcctccataggaatgaagaattattctcatggtgtttgtcgtttggagagttcttttgacacacatacatctccatgctacaagttaatattaaattcttctaacttgttatcactgaaaagagaggttcctccctacaagggagttactatgtaacctgtcctcaccatgcactagattgagttctagcgttatgggcaatatgacagaatagaaagtgaatggtctctggttctaattccagctctgcaacttcttagatgtgtgtagttaaaaatcgggcaagttatttaaattctcataattatctgagttttagtatccttctctataaattggagataaaaatataaaattggtgggatcgttgtaagaactaacaattctgtatttaaagtgtctgacacttcaaaatcactttgcaggtgaggggcagagcagtgcatcatgcaggatcccaatgaagatacagaatggaatgacattttaagagatttcggcattcttcctcctaaagaagagtcaaaagatgaaattgaagaaatggttttatgtttacagaaagaagcaatggtgaaaccatttgaaaagatgactcttgcacagctaaaggaagctgaagatgaattcgatgaagatatgcaagctattgaaacatagaaagaagcggttacaggaatggaaagctcttaagaaaaaacaaaaatgtggagaattaacagaaatttctggaaatcagtaagtgaatgaagtcacaaatgcagaaaaagacgtgtgggttataattcatctatacagatcaagggtctcactgtgtttcccaggctggaatacagtgacaattgtatagctcaatgcagccttgaatgcttgggctcaagcaatgatcctcctgcctcagtcctccaagtagcttggacgacaggtctgcaccaccacatctggccaggttttaaaatttttttgtagaaatggggtattgctatgtcgcccagaccggtctcgaactcctggcttcaagtgatcctcctgcctcagcctcccaaagtattgagattacaggcgtgaaccacagtgaaaaaaaaaataataataactttgcaataaatggcagaatcaggatttgacaggttctgtctgtttaacactgccaagtagtgtgtgtgtgtgtgtgtgtgtgtgtgtgtgtgtgtgtatagatagagaaagaaacagagaaagaggtagattctaaattgttaacctttgttacatctggagagtacaactgggcttagtggtagttagataaggaagaatgtgataagtgagtttaaaaaaaagcaagcaagaaatatttcacttattacaattgtataatatttagattcttatagcaaccgttatcacttttgtaataaaaattgaggccgggcacagtggctcacgcctgtaatcccagcactttgggaggccgtggcgggcggatcaagaggtcagcagatcgagaccatcctggctaacacggtgaaacctcgtctctactaaaaacacaaaaaaattagccaggcatggtggcgggcacctgtagtcccagctacttgggaggctgagtcaggagaatggcgtgaacccgggaggcggagcttgtagtgagccgagatcgtgccactgcactccagcctgggcgacagagcaagactccgtctcaaaaaaaaaaaaaaaaaaaaaaatcaaatgtggaaaaacaaagaataaaaaataaagcgtctgacacttaagattctttaaaattgttattactgttttctaataaaggtcataagctcattaaaaccaatactacggtttgtctttgtaattccctttgattcagatgagcttaaggatttaatggtgctgatgacctaagcatttatctaaacatgatctaattcttgggtctcttttctcttgctgacatgaaatgtttagggcactaaagcaagcaaacaggaggcctgtgggcccagtgcagcaaaccaatgttttgtttgatttgcacagtgctcaataaaaatgttaaattagttcatgacatttgaaaatcagaagatttaatataaatgtctagatttctagctccttctgaaaaatcagaaaatctggcaacactgccccaacaatcatgcttggcaaccatcagtgggagctgaaaaacaattactgaacccgttagayacgatgtgttctctgcaatttgctgctggttccacccga

SEQ ID NO: 667273 - DNA, 1112 bp, Homo sapiens
tgggcacgtctgactggcagaacttaaatcacatccagagacccagggacaaacgcatctgaaaaatagaaaagaacgtggaaaacaatggttgctagttttccagactccaaagtataggaaggaacattggaaagttggaaatccatttcacctccaacctaccacaccctcttacccaccagtggtgggggattaagtgaccagacatgctccagggtgtttagagcaactttcaaaggtgagaacctgagatattttctgctaaaagcagaaatcaggagacagcactcatataagtgcactaacaagaaagaaaagtggaaaatatttgaaggagactgggtgccatttataaaccaaagattccagaactgggcaacctctttgtttcaatgcagccactgtgattcctagctttttgcaaagaactgcaagaatcagcagggttttacaacaycctagccagccacacactgtaggactgagggaggccacaggtagggtgaatttccaagtctgaaaaataccagggaagccaaagaaacagacactaggttgagcttgcaggagtgactctgaacgtcggcacccagctcttggttttgtttgtcatatcagtccctgctgaggaaagcaaacagcaggtaactgtagaacacacctgtctatagcagctgtttgatgttagtaggctttgattgtcaaccgagcaatttgcttaggatttggaaacaaaggaaggagattgtcaaaagcccgaggagcaggtgacatgcagcatgcctgtgtgctcccagcagtcaggaggaggatgcgtgagtgagagattggcaccagagctagtgcagtttggggaagtgacagcctcctacggggcaataatgggaactctgcaataatgtgccaacttcctatcccaatgaagtgttgatgtcagcagagaccacactacaggcaaactagtctaaccagtgtcggggtgggacctagggaggaaaattgctcaattcttagtatggttagagaaaaacgtcagggccaggctcagtggctcacgcctgtaatcccagcactttgggaggccaaggaggaaggatggcttgagccca

SEQ ID NO: 667274 - DNA, 621 bp, Homo sapiens
tatgactgcagtgcctatagctgaattcactggttagggagtgtacaatggaattttgtcccttgaattggggatgtttgaagatggaggctatttcactccttcctcctgccttgctaaagaatgactgggatcattactgaactcagttctcatttgctttcttaaaatttgatgtccacaaaacctggagtttatttacttctcccttccctccttttttcatttttctgtcataccatttgttaataccagattagagaaggggagcatgtcaaggaattcctttatgacttcctctctgaggatgaagtcttggtcagtcttgactggacatggtcaggatggatcctgggagtgggactgggctccacggtgtgtgtactctccagggcagttatcctgctkgggctgggccagccctcctgccctagcagcccccatctttctctgccccaccctgtctcctaggtgtgctgggattgctgtgtggggagggagtacggccagcctgcctgggcccacaccttcaaggaaatgaaaaataatttctccttgcaagaggttaggggagcttcccaggcttgtctgttgctatttctgtcagtgaagaagcagttt

SEQ ID NO: 667275 - DNA, 1050 bp, Homo sapiens
taatgccatatgcatgtatcaaacatatatatccacctataggaaatagctgtcattgctataacaatgaaagcagacattgtccctgttctkgtggagcttatatttgaacgtgttcctgtggtgaggggataaaaataaacaaatgaaaaaagcagtgtagtttcatggaatgataaatgctgtggaaaggcagggtctgtgttgaattggtggtcaaggaagtcctttttgaggaagtgacatttgaactaggaactgaataatgaggagtcagccaagtgaagatctgggcagaaatgttccaggtagaaatttgtatatgatgagacatcacagcatttcccccccccgcccctgtcgcccaggctggagtgcagtggcacgacctcagctcgctgcaacctctgtgcctcctgggttcaagtgattcttctgcctcagcctcctgagtagctgggaatacaggtgcgtaccaccccatgcctggctaatttttgtatttttagtagagatggggtttcaccatgttggcccggctggtctcgaactcctgacctcgtgatccgcccgccttggcctcccaaaatgctgggattataggcgtgagctaccacgtctggcccatcacagcatttttatatgaagtaaaccaggatttagagaaaaagctctgcttgaggcacagccttttaaaaatgtgtttgtacagttattttttaaacacatgttctttagtattcaagagtgtccttgtaactctggcaataattctaaggataaagttaggtccaggctgtgctttcattctttattttttatttttttaaaaacttattttctggcagttgtaatacaccatgaatattaaattaaaatcaattgcacacttacttatcccactctagggataaaaagcataagctaactttgaattaacttccactttaaaaacatgacttcatttcaaaagcttaaggtgctttctgagaaagcttgatagctccatgcctcttcattgggagttttatgcagttattttgggtagaa

SEQ ID NO: 667276 - DNA, 1845 bp, Homo sapiens
agtgagactaggaaggacagccaataaaggggctttaataatcataggtaagcaagggtaatatttatacatgggattggacacagaataaaaataagctgataattctctgaaagccataacattaactgggaaacttaaataaaggatctaagcttsattataagatgaagaacaaataatttgggggggcccagaccgatgctatttcttttttcttttttgagacagagtctcactctgtcacccaggctggagtgcagtggtatgatctcagcttactgcaacctctgcctcccgggttcaagcaattctctgcctcagcctcccgagtagctgggattacaggcgtgcgccaccaagcctggctaattttttttttgtatttttagtagagacaggggttcaccttcttggccaggctggtcttgaactcctgaccttttgatccacccacctcagcctcccaaagtactgggattacaggcgtgagccaccacacccagccaactgatgctatttctatagagaaaaatgattgtatgagctctttgctgacatatatttttcacaattttcttaattagtccaaagcaccttgaatgctaaacttgaaaatataagaccagtgtgaagctaacattttccactaagtatatctcaccagtgggcatgttctgtgaagaaagtagacagttttgagtgttcttttttccttaggatttgataagaatttgtaacatagattgttggagttgaaaagtgagccctcaataatagcaacattcttttctatccattctacacaatgtcacaaataaagagtaaatttgcaggccaaaatatcaacttgcttattgatagagactctgtacgaggatgtaatttattgtaagagccaaatgggtctgaaatccacacccaaggactgggctgacttacccaacagttggggaaatatgcttttcatgtggatcaccttcccatggaagatggagtaaggtgagaggaatttctacttttgggggccagcttgttctgggtggagctgagtttaacatgcacggttatcctcctcacatttgtcagatataccactgtgttcccgagtggcagagatagtgaaggagtagagagaggccaagagtgtgtgtagaacagattctccttcataaaaatcagaatttgtgttggagaggtggcaggagagggatatttcccctttttaagagattatgtaaaaagattagaaaaaaacagaaaaaattgatttaatatttttcctgttagaaaaatttgggtttgttgttgtttaggacaaaatgaggaaaattcattataactactcataatgataaagatatagaaaattatagcatcagagtatcccttaaataaaaattttctatttgtttaaaatctgattattaacagtttgggcatcacctttgttctaaacaataagtgtaaagaccagttgtaataacaaacttaactaaaatttaactttgcttcaaattagctttaacagtatcactatatgttttaatttaatatagcctacatcatcttccaaatttttactctatagaatatctaagcagcgagatgctcacatttgaaaaatggcacagtcacattagttgggaaaatattgagctcgtaaagctttgaaggtcccagactatgactatggggtttcttaatttgaatataaattgtgaataacctagaattttaaaaacttgactactgtcctttctttcacagactaattaataggaccattttttttctgtttaaaattctttaatgtgtgttattttattttgttctcaaagctat

SEQ ID NO: 667277 - DNA, 1845 bp, Homo sapiens
agtgagactaggaaggacagccaataaaggggctttaataatcataggtaagcaagggtaatatttatacatgggattggacacagaataaaaataagctgataattctctgaaagccataacattaactgggaaacttaaataaaggatctaagcttgattataagatgaagaacaaataatttgggggggcccagaccgatgctatttcttttttcttttttgagacagagtctcactctgtcacccaggctggagtgcagtggtatgatctcagcttactgcaacctctgcctcccgggttcaagcaattctctgcctcagcctcccgagtagctgggattacaggcgtgcgccaccaagcctggctawttttttttttgtatttttagtagagacaggggttcaccttcttggccaggctggtcttgaactcctgaccttttgatccacccacctcagcctcccaaagtactgggattacaggcgtgagccaccacacccagccaactgatgctatttctatagagaaaaatgattgtatgagctctttgctgacatatatttttcacaattttcttaattagtccaaagcaccttgaatgctaaacttgaaaatataagaccagtgtgaagctaacattttccactaagtatatctcaccagtgggcatgttctgtgaagaaagtagacagttttgagtgttcttttttccttaggatttgataagaatttgtaacatagattgttggagttgaaaagtgagccctcaataatagcaacattcttttctatccattctacacaatgtcacaaataaagagtaaatttgcaggccaaaatatcaacttgcttattgatagagactctgtacgaggatgtaatttattgtaagagccaaatgggtctgaaatccacacccaaggactgggctgacttacccaacagttggggaaatatgcttttcatgtggatcaccttcccatggaagatggagtaaggtgagaggaatttctacttttgggggccagcttgttctgggtggagctgagtttaacatgcacggttatcctcctcacatttgtcagatataccactgtgttcccgagtggcagagatagtgaaggagtagagagaggccaagagtgtgtgtagaacagattctccttcataaaaatcagaatttgtgttggagaggtggcaggagagggatatttcccctttttaagagattatgtaaaaagattagaaaaaaacagaaaaaattgatttaatatttttcctgttagaaaaatttgggtttgttgttgtttaggacaaaatgaggaaaattcattataactactcataatgataaagatatagaaaattatagcatcagagtatcccttaaataaaaattttctatttgtttaaaatctgattattaacagtttgggcatcacctttgttctaaacaataagtgtaaagaccagttgtaataacaaacttaactaaaatttaactttgcttcaaattagctttaacagtatcactatatgttttaatttaatatagcctacatcatcttccaaatttttactctatagaatatctaagcagcgagatgctcacatttgaaaaatggcacagtcacattagttgggaaaatattgagctcgtaaagctttgaaggtcccagactatgactatggggtttcttaatttgaatataaattgtgaataacctagaattttaaaaacttgactactgtcctttctttcacagactaattaataggaccattttttttctgtttaaaattctttaatgtgtgttattttattttgttctcaaagctat

SEQ ID NO: 667278 - DNA, 1845 bp, Homo sapiens
agtgagactaggaaggacagccaataaaggggctttaataatcataggtaagcaagggtaatatttatacatgggattggacacagaataaaaataagctgataattctctgaaagccataacattaactgggaaacttaaataaaggatctaagcttgattataagatgaagaacaaataatttgggggggcccagaccgatgctatttcttttttcttttttgagacagagtctcactctgtcacccaggctggagtgcagtggtatgatctcagcttactgcaacctctgcctcccgggttcaagcaattctctgcctcagcctcccgagtagctgggattacaggcgtgcgccaccaagcctggctaattttttttttgtatttttagtagagacaggggttcaccttcttggccaggctggtcttgaactcctgaccttttgatccacccacctcagcctcccaaagtactgggattacaggcgtgagccaccacacccagccaactgatgctatttctatagagaaaaatgattgtatgagctctttgctgacatatatttttcacaattttcttaattagtccaaagcaccttgaatgctaaacttgaaaatataagaccagtgtgaagctaacattttccactaagtatatctcaccagtgggcatgttctgtgaagaaagtagacagttttgagtgttcttttttccttaggatttgataagaatttgtaacatagattgttggagttgaaaagtgagccctcaataatagcaacattcttttctatccattctacacaatgtcacaaataaagagtaaatttgcaggccaaaatatcaacttgcttattgatagagactctgtacgaggatgtaatttattgtaagagccaaatgggtctgaaatccacacccaaggactgggctgacttacccaacagttggggaaatatgcttttcatgtggatcaccttcccatggaagatggagtaaggtgagaggaatttctacttttgggggccagcttgttctgggtggagctgagtttaacatgcacrgttatcctcctcacatttgtcagatataccactgtgttcccgagtggcagagatagtgaaggagtagagagaggccaagagtgtgtgtagaacagattctccttcataaaaatcagaatttgtgttggagaggtggcaggagagggatatttcccctttttaagagattatgtaaaaagattagaaaaaaacagaaaaaattgatttaatatttttcctgttagaaaaatttgggtttgttgttgtttaggacaaaatgaggaaaattcattataactactcataatgataaagatatagaaaattatagcatcagagtatcccttaaataaaaattttctatttgtttaaaatctgattattaacagtttgggcatcacctttgttctaaacaataagtgtaaagaccagttgtaataacaaacttaactaaaatttaactttgcttcaaattagctttaacagtatcactatatgttttaatttaatatagcctacatcatcttccaaatttttactctatagaatatctaagcagcgagatgctcacatttgaaaaatggcacagtcacattagttgggaaaatattgagctcgtaaagctttgaaggtcccagactatgactatggggtttcttaatttgaatataaattgtgaataacctagaattttaaaaacttgactactgtcctttctttcacagactaattaataggaccattttttttctgtttaaaattctttaatgtgtgttattttattttgttctcaaagctat

SEQ ID NO: 667279 - DNA, 632 bp, Homo sapiens
tttggattacatcttgtttgtaagatagttttcgttaagtgggcttggcatactttcaccccttagcttccatactctataatttctcttaatctggaaattcaatgttgttcatctttggaatatctgaattatttggttgttttcgtctatctttttctgtttttcctgaaatttcaatatttttatttgggtatttgactttgtcgatgagtcacacgactctttccttttctgcctttttaaatattaccccgtcacctgatttaaaattctttatcttcctagatctattaatagtttttaaaaaattgcagtttckattttctcgagtgctttatttttgccattttgatctttcacattacaatctttccttgggtgacagttaaatatgggttttctgctcatgtttagctggggactggttagacttggtgagttttctacttggggcgtgttgactgtgtgtttctctatagcataactgggctggaccttgctttttgggggatctctgataagtgtccttagggcttttgccttggcagaaggctgttagacactgttttcggggggccaagtctagggaggcagatggttttcagtgtctgtctgtttgcgtgtgtgtt

SEQ ID NO: 667280 - DNA, 1434 bp, Homo sapiens
agacttttaatacttctttcattgagataagatgagagtaaacattcgacagagaaatagtaagaaatatttaaattaattcttctaaacataaatgctgggattaaaacaataagtttggccgggtgcagtggctcacacctgtaatttcagcactttgggaggccgaggcgggcggatcacctgaggtcgggagtttgagaccagcctgaccaacatggagaaaccccgtctctactaaaaatacaaaaattagccagacgtggtggcgcatgcccagctactcgtcaggagaattgcttgaacccgggaggcggaggttgcagtgagtcgagattgcgccattgcactccagcctgggcaccaagagcaaaactctgactcaaaaataaaaaagttttaaaatgctgattsaagaggaattttttcccaggagactttccaaatgatcattctattttacttccatatggagtctgtaaagaaacccagtaaatccacgaggctttataattgccctttggaaataaagcaggactaaactattaagagagaccagtcctgtaatttctgaagcctttgtgggaggagatccctgctttcaaggccatgatgttgtcagtgaaaggttagtgagagtgtcgtatagggctggagtaaaaactgaaggcaatatttccatccccaggattggtaatggaaatgtgatttgtagtagttttttcataaatatctctattttctccaaagctgacttctgtctccactattgatgttataaacttgttacaatatttaaagatagttcatctcacaatgttctttccatttactaagcaatggtaacatagcctctggttttatttgagtccattttggttactatttaataaaactgtctgtgttttttagtttaatatacagccccaaattatacaattgggaaaattaatttttaagccttctttttatacctacgtttgacagcttattaaattcctagtattatttactagtagatttatcaaaaatcatttttattcaccctgtatgagataccatgagaccatgagagagcgtatgtgattttccttcaaagtaagtatcacaaggagatgcaaaattgataatactcttctagcctctcattcagaacaactgcgagcaataaaatttaaacgggtaagtgaagaaaaactataccaagtgaaactaccctttcaaaaagtgctggtctatttcaaaagaagtgttgatattttcggaaagcctccattctgtccctcagggctatgctccatcttgtaatggtataatcaaaaagcaatggcattctgttcttacaactacatgctgtggataatcctctccacagttcatttgcttctccaggtattttaaagactctaagtgcaaccaattgggtatggtgtc

SEQ ID NO: 667281 - DNA, 1063 bp, Homo sapiens
attggtatgaatttctcatgaaaataaaatttataaaaaattgattactactatgaatctagactgaatttgcccttacgcaatgaaagcaatttttacctaatactaagttacattccatttcagatttcctatttcaaagggtgtctcaaatttctaagaagttaaaccaagtattgagccatttttgtatatgtaataaaagtctttaaaattaaaatggtaatcctaaaaaaaccaaatgcatgaaaaatatggtctgactgtataacaaagggagttatataattctacttgagtgaaatctttcatctttgatttacaggttagagtcctctctaactaaaaccatattgttccatatctttcatatcatggccttccctaaaaccttgttttaattaaggtttctttcagatttctgaataaaagcatgacaatcttcacttatggctttaatatatcctttgagttagaaaaatatataaaaagaaacatcaactctttcaaaagcattgtcagatattaaatactgtgagatattctacctcaatatgtttaggtgtttgagttatatgttgaaatcgaattttaggaggwaggaggataacctacttatatttagtaagttactttttatctcagaaataaatgtcctttatttttaacttttgacactaaggaaacttgtttaaaggctgttttttgtttttgttttttttttttttcacaagaaggcacagcttctaggttaagtcagttcaaggtgactacaaataagcagtgccttcattaacacatttcaaacacatagaaatttagcaacgttgcttaagtgatattcatttcaacggcttcacagttaataaaatgcaatcagacaaaacaactgtgttaacctgtaaagtaaacaaaataaactaaatagtcaaggccctcaagtaataagaggagattatgggtaatcttcagtttttctaaaggaaggaatgaatgatgaaaggtaagaagaaatcaattgatagagggcagaaaaggaaaggtgagtgaataagtccttgat

SEQ ID NO: 667282 - DNA, 1063 bp, Homo sapiens
attggtatgaatttctcatgaaaataaaatttataaaaaattgattactactatgaatctagactgaatttgcccttacgcaatgaaagcaatttttacctaatactaagttacattccatttcagatttcctatttcaaagggtgtctcaaatttctaagaagttaaaccaagtattgagccatttttgtatatgtaataaaagtctttaaaattaaaatggtaatcctaaaaaaaccaaatgcatgaaaaatatggtctgactgtataacaaagggagttatataattctacttgagtgaaatctttcatctttgatttacaggttagagtcctctctaactaaaaccatattgttccatatctttcatatcatggccttccctaaaaccttgttttaattaaggtttctttcagatttctgaataaaagcatgacaatcttcacttatggctttaatatatcctttgagttagaaaaatatataaaaagaaacatcaactctttcaaaagcattgtcagatattaaatactgtgagatattctacctcaatatgtttaggtgtttgagttatatgttgaaatcgaattttaggaggtaggaggataacctacttatatttagtaagttactttttatctcagaaataaatgtcctttatttttaacttttgacactaaggaaacttgtttaaaggctgttttttgtttttgttttttttttttttcacaagaaggcacagcttctaggttaagtcagttcaaggtgactacaaataagcagtgccttcattaacacatttcaaacacatagaaatttagcaacgttgcttaagtgatattcatttcaacggcttcacagttaataaaatgcartcagacaaaacaactgtgttaacctgtaaagtaaacaaaataaactaaatagtcaaggccctcaagtaataagaggagattatgggtaatcttcagtttttctaaaggaaggaatgaatgatgaaaggtaagaagaaatcaattgatagagggcagaaaaggaaaggtgagtgaataagtccttgat

SEQ ID NO: 667283 - DNA, 650 bp, Homo sapiens
aaatacaaggcagaaagatgtagagaaggaaaaacaaagaaagaagcgttcaacaacccagcattatcttaattgtaaatgagttagaaaaagcacagcctgagtcaggatgtctacaaaggatgcaaacgaaatgaagagacaagarttggcactcttgtgctatttttatgaattgcattagacagtaaaagtctcttgaggttagagagagcacatacagtcagcagaacctaggagaggagagaaaaagcctctcaggggaagttggaggctggtgaggacagaggagcttgcccatgggctatgcatgtgtccaaaagaataaatggtgacccatgaaaggcatccaggcacgtggagtctgaaggaggtgagggagatgagtgagccggtaggcaaaggcatggagggctggaaggagggaagccctctggggtgcccccactatgctactgcgtctctgaggaagctgggatatctctctctctcccttcagggtgaagctggaaaacctggaaaagctggtgaaaggggtccgcctggtcctcaggtaaacgccaccgttcccagcctcaggcatctttcctagcgtctccctccctgtggccttaaacacagtgcatccagttcaatgaggtcacttctga

SEQ ID NO: 667284 - DNA, 607 bp, Homo sapiens
tttgtcaagctcatctactgcaaggagcaaggtgtgcttgtaacaaaggttcccaataggtagcaacaggaacattcgtgtgttccgcctgtggagaaaactgttgggtgtgatctgaggcatcctggctagtcaaggagccagcaccatcaggaggtccttgttttcctgggtgtgggcatcctccctctcctctggtatccgcaaagggcctgcaggtagaaatggtcaccctgagcaccgtaaagccaactcatgcttaggctgtcctggtgtgtgttccagggtcctcgtggcctgcctggtgaaagaggacggactggccctgctggcgctgcggtgagtaattgacaaagccaaacaccaccatttgccgagcactttagagtttacaggtttgtttctcttgaccctcgaaacaamcctgtgaggcatagggagtattgttatcccttaagaattcacccccagtgtgcccatcaaaacttcccaggctgagtctgcacagttgaaggaggaaggataggaatgggagggtcgatgggtgaaagcatgattctcttaaccagtccagattatcaggtaatcccttcaacaaccaccaccc

SEQ ID NO: 667285 - DNA, 607 bp, Homo sapiens
tttgtcaagctcatctactgcaaggagcaaggtgtgcttgtaacaaaggttcccaataggtagcaacaggaacattcgtgtgttccgcctgtggagaaaactgttgggtgtgatctgaggcatcctggctagtcaaggagccagcaccatcaggaggtccttgttttcctgggtgtgggcatcctccctctcctctggtatccgcaaagggcctgcaggtagaaatggtcaccctgagcaccgtaaagccaactcatgcttaggctgtcctggtgtgtgttccagggtcctcgtggcctgcctggtgaaagaggacggactggccctgctggcgctgcggtgagtaattgacaaagccaaacaccaccatttgccgagcactttagagtttacaggtttgtttctcttgaccctcgaaacaaccctgtgaggcatagggagtattgytatcccttaagaattcacccccagtgtgcccatcaaaacttcccaggctgagtctgcacagttgaaggaggaaggataggaatgggagggtcgatgggtgaaagcatgattctcttaaccagtccagattatcaggtaatcccttcaacaaccaccaccc

SEQ ID NO: 667286 - DNA, 1476 bp, Homo sapiens
ggccagccacatgtaaaaacataaaactgaatcattacggcaatatataaattttataaaccaatttttagatgtataaaaagaaactttaaaagtaccagagaaaagcatgtatgaattatttaataaccttggcaagggcagactgcttgagccyggcagttcaaggccagcctgggccacatggcaaaaccctgtctctacagaaagctaaaaaattagctggacatggtggtgtgtgcggctgtagcccagctactcgagagtctgaggtggaaggttggcttggagcctgggaggtagaggttgcagtgggctgagactgagacactgcactccagcctgggtgacagagtgagtgagagcctttctcaaaaaaatataaaaatgaaaatgactttggcatgtataaggactttcaaagtgtgacctaaaactgagaggacataaagaaaagtactattaaatttggtgacataaacccccaaataaatacataaatgaagttaaaaacaaaaaacaaaaaacaggaaaatgtatttgtaaaacataaaaggaaatagaccaatgtatttactagaggaaaaacttcctataaatcaacaagaaaaaatacatcatcaaacagaaaaatatggaaaagaaattaacatatacctcccaattaaaacaaaacaaaaacctatgaaaaaatgctcaatgagaactcaactttaaataaatactaagcaagaaaagagacacttcagaattgcctaccaagtcagtggaaatttaaaaaggtttgataacaaatgtttaatgaaactgtgcaaaaaaacattctccgtgtaaatcagtggaaaactcttggtggataattaaacagctatcgacattttacacgcatacaatatcaactcatgaatgagacggttatgtcattatgcgttatactactataatcaacaagaggtcaggcgtggtggctcacaaatgtaatccctgcactttgggaggctgaggtgaacagatcatgaggtcaggagttcgagaccaggctggccaacatggtaaaatcctctctactaataatacaaaaattagccaggtgtggtggtgcgcgcctgtaatcccagctactcagggggctgaggcaggagagaactgtttgaacctgggaggcagaggccgtagtgagctaagattgcaccactgcactccagcctgggcgacagagtgagactctgtctcaaaaaaataaaataaataaaataaaataagaaaaacccctatcttcatctacctgtaaatcttaggttaaatttagttaaattatggtagaagtatgattcagaaaaccatgtagatattttttaagatgagataaagctgtatataagatgatattaaaatgtttatttttaaattaataaaaagtatgattccagttgttttttaaaaggtatataacacataaatgcttgatatgcatag

SEQ ID NO: 667287 - DNA, 1571 bp, Homo sapiens
ctgtctaaggtcagttaaatatatctagtagccaaacaggcaagggacaaactaggtaaattttttaaaaagagccgggggtgcggtagggaagaatcctagtgaaatgtaagtatgttaaaacaaaaatcttaaaggaatcccaatacacagttcctaaacaagggcaattgctctgtgatattcatcatactacataatatacccaggccctgggaaagcactggccttagaatggccctctacgaagaagaaagttattgattaggctttaatttgaatgtctggcaaatcctcatgaatccagaattgtgatagtacaaactttgaatacatgatttttacagcacgtaacagtcaagatgattttctctttgttagttttggaattcttatccacaaatataggaaatccagttataaaaataataacctctctttttttctgaatctagaagatcaggacaatacaaataacataggtagcatgctttttttgatatactggtcctaattactgcaaacacttgaaagataagcacagaccacccaaaaggtcaaggctagcttaaagatcacactctcatctgcaagacaaaacagaggtggtttccagggaaaagagaccaagctcccagactttttgaaaactgaagcaaacataccataatttgcaaagtatttgctttcatctgtcttctactacctgcatatattatatgagctgtaaaaacaagctggcctccctgttaaaggaaacatgggaaggactcttttcttaaagtttagttaatgagtgaagataaagagttctagcaagagggaacaaatagtccaagaaggaagcaaatagaagagtctagaaagactaaatagaaaataaacaagtgtgtcaagagaataatttcatgaaaaataaataggagggaggacaattgaagctatacaaggattttcatgagacagttaagtccatactttccaaagcccttgcttcgaagaatggtgaggaggatttatagaagctagcaagttcagggaatcctagcattagctccacgatgaaaaaatacatacactcttcatgagaatataaaaacagcattatttctacctgacaaaactaacctggctggggtggggtgatctcctcctgaatgaagcacatatttaatgcataacgaaaagctaggcaagactaacgaaagctacttgaattgttccatagtcaagttgacartcctgaatgtaaactcaatgtttgctgaataaataatacccattaatactttttccctcttgatctatatcaagcataggggaaacaagtcattttagaattgaacaagcgttttagaattgaaaatagtattttcacaacacttttaaattttttataccatacataacagtttacccttcccctcccaagtttctagatatagaaataaattcaacttattaattccatgaactattcaaataaactattcaaacagaaaaacaggataaaatgattgcagctgacaatttttttttttttcgagacatagtttcactcttgttgccca

SEQ ID NO: 667288 - DNA, 1165 bp, Homo sapiens
tgccaaagggaaattgaaaaagtatttttttaagtcattcaacaactttgtctagagcaggtgtaagatgagtagggtgggaagttaggttggcatcagtggttaaaaacagaaagttctgtttcgggaatagtgaggagggggtgttgtaacaaaattggacaacttaaaagaatggtgtgtgctgggtgaaagacaaagactaaagaatgaggaaacaaacgtgatgcctggccagtgactgtcatataaacctttcttatttgagctaggcttgaacagacgtgacctagaagaaactgaacataaagagaagggggtggggggctagttttcaagttggggaacctgatagtgaaaagtcacagatggagaaaattgctctcagaaaaactgtttggattgctttcctcttgttgcacatgtaccatgcatttctcagcttggggtactacattttgtggaaagttaatctatctatctttccacatctgaattaatcattctaggaaagaatacttattcctactcatttcctttatgatgtccaaatggttgcaggatcataatctattgtgccacctttatttctagaagtacaactaatatgttcacattttcaaataaataatactccccgtaagtaataactgcaaccaatcagtgttattcagtgctatgcctccttgtaatgggtagttattaattattttcagagctttccggaaatactgtcctaactggctatgtttaggatctttgttatctctgaagacaaagaaagaagctaggactcttaattttggggtgcttcttgactcttagttgggaaactgaaaatatttccaaccttttacccacgtcaatggcatattctgggaatcaccaccaccaccaccactaccacagaaagaggstggaggctcctgtaccctgttcattccttaagggccctgcttcccttagtaagtaagtaagttggtctacggccctaaatatgcaaatgagagctgaaggtttttaaaaggtagaaaggaaaagggcaagggcttccacccctgctttaaaatgatttatttattctctgcttgtatttcttgtggagagagtaaggatagaaccaacaaggggctgagtagctgagaaaggggccacccaagagtga

SEQ ID NO: 667289 - DNA, 1165 bp, Homo sapiens
tgccaaagggaaattgaaaaagtatttttttaagtcattcaacaactttgtctagagcaggtgtaagatgagtagggtgggaagttaggttggcatcagtggttaaaaacagaaagttctgtttcgggaatagtgaggagggggtgttgtaacaaaattggacaacttaaaagaatggtgtgtgctgggtgaaagacaaagactaaagaatgaggaaacaaacgtgatgcctggccagtgactgtcatataaacctttcttatttgagctaggcttgaacagacgtgacctagaagaaactgaacataaagagaagggggtggggggctagttttcaagttggggaacctgatagtgaaaagtcacagatggagaaaattgctctcagaaaaactgtttggattgctttcctcttgttgcacatgtaccatgcatttctcagcttggggtactacattttgtggaaagttaatctatctatctttccacatctgaattaatcattctaggaaagaatacttattcctactcatttcctttatgatgtccaaatggttgcaggatcataatctattgtgccacctttatttctagaagtacaactaatatgttcacattttcaaataaataatactccccgtaagtaataactgcaaccaatcagtgttattcagtgctatgcctccttgtaatgggtagttattaattattttcagagctttccggaaatactgtcctaactggctatgtttaggatctttgttatctctgaagacaaagaaagaagctaggactcttaattttggggtgcttcttgactcttagttgggaaactgaaaatatttccaaccttttacccacgtcaatggcatattctgggaatcaccaccaccaccaccactaccacagaaagaggctggaggctcctgtaccctgttcattccttaagggccctgcttcccttartaagtaagtaagttggtctacggccctaaatatgcaaatgagagctgaaggtttttaaaaggtagaaaggaaaagggcaagggcttccacccctgctttaaaatgatttatttattctctgcttgtatttcttgtggagagagtaaggatagaaccaacaaggggctgagtagctgagaaaggggccacccaagagtga

SEQ ID NO: 667290 - DNA, 1754 bp, Homo sapiens
ttgcagacataatcagacgaggtcaccctggagtagagtgggctcttaatccagtatgacggacgtcctcacaacaagagacgcacaggaagaggttggccctgcgacgacagggccacagatgggagtgatcatctagaagccatggacaccaaggattgctgggaaacatcagaagctgaaagagacaaggaaggattcctccctagagccttctgagggagcacagccctgcccacaccttgacttcggacttgtggcctctagaactgtgagataatagcttctcgttgtttcaacccacccagtttttggttctttgttacagcagcactaggaaacaaatacacatgggaagaaacgtcccttgttttccacattttctcttgtaaaacgtgtaaaatacacacacacacacacacacacacacacacacacaaacatttctttcaactacccagtcctactagacctcattttacccatgtgagggccaacagtccaatcattatgagacaatccggaaaatggcattagggtattactatgttatattgatctatcggtattttcttaattttgtgtgtgtacatggtcgtatcagatcattaaggaagccactccaatagaatagatggctccttcttagctgatgaaagagatactgcttgaggtgcagaggtggagatcctcaggtgagcctgcctctcacacctcacattcacatgacggatagaaatcattcacgccagataaaatgtttttctttttttaaccttaggattctgtgatatctggagccaatactcatgaaggaagaagtttaaaactttccgtttaaaccacttagaatgagaggatttacaaagatcctgtttaatgttcagctgacacattgtcaaaaacgtttatcatgcaaccttttgaagtttcttccactccctcctagttattaaagcttggattgcagttagttatcaacaacaaagcatacacgtgatggtgtttttagagtcagsctttcagtttgatttctgaactactaagcaaaattcagttctcctgatcagaaaaatgattagtgacctacttttcatgctgaatgcacaaaaccgttgatttctgaaatcacttctatatggacctagggataatgcaagggacatggaaatttcatttgtatcataatgctccaaactgcaagaattttcagatataagaatctgccacttcaagtgaggctgtgattctttcagtgcaaatgaggaaatagtgacctacattattgagaagattcctctggcaacttaattcctaatgtaaatttcttcagattgagaataagcttcagttcgtgttttggcaaggggaataaaactctttctgaataattcaagcgaatactattttttgagtctgtacaatgtattagaaggtacagagttgggtaagacatagtctcaccttttacggcacttacattatcatagaaagtatgtgataaggacaaaaagcaggagagcatggtaagtgtgttaagtgttcaattgagagaacaaaaagaaaaaggaaggacagaggaagatgttcaatgacaccacaaggaagcaggcagataaatccagaatgtgggacattctacaggacaactgacttggtttctgcaagaagtcaatgacatgggaaaaaagtgaggaagggtctgctttagatttgaaaagacatgagagctgtaacaatcaaatgtaatgttt

SEQ ID NO: 667291 - DNA, 1185 bp, Homo sapiens
ggtgcgcaccaccgcgcctggctaatcttttgtatctcgtagaaatggggtttcaccacgttggccaggctggtctggaactcctgacctcaagtgatccagtcgcctgggcctcccaaagtgctgggattacaggtgtgagccactgtattagtctgttttcatgctgttggtaaagatatacccaagactgggaagaaaaagaggtttaattggacttacagttccacatggctggggaggcctcagaatcatggtggtggcaagagaaaatcagaaggatgaaaaarcggaaacccctgataaacccattagatcttgtgagacttattcattaccactagaacagtatgggggaaactgtccccatgattcaaattatctcccactaggtccctcccactgggtccctctcgcaacatgtggggattatgggagtacatgatgagatttgggtggggacacagagccaagccgtatcagccaccatgtcaggccagtatccagggattatattctttaaatcaatgaagtctttatgtttgagcacccagtactgtgggtgttatgaagaaacgaaaagtgtgaggcatgaaataatcaaataattattggctgggcatggtggcttagcactttgggaggctgaggtgggtggatcacaagttcaggagtttgagactagcctggccaacatggtgaaaccccgtctctactaaaaatacaaaaaatagctgggtgtggtggtgggtgcctgtaatccaagctacttgggaggctgaggcaggagaatcgtttgaacccgggaggcagaggttgcagtgagctgagattgcaccattgcactctagcatgggtgacagggcgagactccatctcaaaaaaaaaattattattaaggattaataacaggacctcatgaaagtgtaaggttcttgaggactggggcaatcagcagagcttcatggaggagggagataagaccttgagatgataaaacttgacaagtctgagggttaaagatgctgctgaggaggaaggtgaacagcatgagagaaggcaggttgcgtggctggcaaggtgcttgtggatagtgagaaccagcttgattggaagagaatgtgtgtgtcaaggaatagtgagaaacctggatgggctctgaaagctaagcagaagagtttgatc

SEQ ID NO: 667292 - DNA, 634 bp, Homo sapiens
tttctttcccctttagcaacgcttgacaaaaatttatgtaaaaacaccattattctatttctgggcatgaatttcctttcctttgcccatcactgggagctgcrcagctaagaataagttgtcaggcagtttggatgttattgcctaattttgtccttctttatgctggtaatttggacttttattgttctgttctaattggagatgtgtcatatatttcctgttggcctgggatagatattgctgcattctcaaccttttgttcctgtcagcctcattatgattgcagtattaattagatcatttgttcatttctgtctttggcatctctaattaagaaccaacactctggaattgtttctgcataattcagggaaatcttggaatgagccagtgtaaacctgcaagcctcccagctccacctgcccagtaaacatggccatgtgcttccttctcttctcttctagaagccttccatctagtcttctccatccaggccctgcttaggtctgaggttaggggattactagagaattggcgtgtgaaagtgtctgggatatcaggcctgatccaatatggctctagggtcctctatttcccagagacatacttattttgtgttaactaggaggga

SEQ ID NO: 667293 - DNA, 1774 bp, Homo sapiens
gagtagctaggactacaggcgcccgccaccacgcctggctaatttttttgtatttttagtagagatggggtttcacagtgttagccaggttgttctccatctcttgaccttgtgatcctcccgcctcagcctcccaaagtgctaggattaccggtgtgagccaccacgcccggcccctgctgtcatttttaagaacaacctgtatccaagaagccaaatcccttttactcctaatgcttctgtctgcccagtatcaaaccaaaagaccagtcaacacaaaggaaaaatttcctaaaagtcccgcaaaaccatgtgattaatcaatatgggggaaaaagcacaaaactaaaaataaatttcaaaagattcaaccttaatcaaaacagaatcatcaaaccatagaaagaattatggagaaataatgtttccttttcaagctatttcttagatttctttcatttgctctttagaaaaatagtactttactgaggttaatcaattagaaggtcataagcagaaaaatgagaatgagagatattataaaatagcaagtggccagacttttaagaaactgggtcatcatcaactagaaagagggcaaacctacagcaaccccgcttgacagcatgcttcagtactcttccaataccacagtcggtttttctttcagaattaagcaattctataaaaagagactgttcttaccctcatcctcccattccttattgctggtccatcttctgccagtctcaacacatacaaatccattttgtattcccttcctccacgaatgctgaatccaaatcctttggctcctttctccatgtccacagtgaaataatcaaaatcctttggggttggggagaaaatggaataaataattatttagttrtcagagaagcttctgtggctagtctctgtgttctccttctgtctcttagttaatgtattccaaatgacatgatgttgggagaagtcgtaatctggcttcataaactacccaaatgaaagacaaaattccaaaggtttgagcaggccagagcacagtttacttggtcatcaaagaattactgtgtagcttgtttactttggtattcatcagtttacttggcaaacgtggaatgattacagataggcctgagtgacatcatctctccttttacttctctcattcactgctattgagcaccataaataaatgtcaggtgtgtgtgtgtgtgtgtgtgtgtgtgtgtacaaattacagagtttgctgattagaaaagtaaaatttagtgggatctgataattagatctctcagttgcacagactattgaatatcaagttggaatgtacaaaatcaatttctcttttacctaaaatgcagtatgtccaagattctctgatcttcactattcttaaaatctttgggcataaagttgatcttcaattcataataaaacacaatgtaatctgatagagttgagattgtacttaatttatatcttggtatgtagttacgaagtaggaaatattttctagataccaaactctggtctagactcttttcataaatgttgaatcctcatcctggcctgtaaggaagactctccctttaggaaactgaatctcagagaagttaaggaagttgacatgaagcacatcaacaaataatcataacaacagtgacactggttgtgtagacagagagttgttggctgtggcaggcgctacactctggattgtgaagccaagcctggtcttattcttacgcacaggggcttggccctttat

SEQ ID NO: 667294 - DNA, 1420 bp, Homo sapiens
gaaatcagcatgatttaaatctcttaatcacccacattragccctacacacataaacacacacactttcatatttattgaatgttattaaccatttttcttcctacctcttatgagtacctacctgagccaagcactgtgctaagtgataatatatgtgtgtatatatatgtatatatatgtttaaaaaatatccttaacaaatcatatgaaatgtttgatatcattacaagtttacagtagaggaaactgaagcatatagcagttattaatttgtccaaggtcacatatgccaaacagggcttagaaccctagtctatcagatttcatagcctttgctgttattatagccaccaccctgcatctcttgacttttctggctctgatctctaatctattacttgctttgtgagtatctggtgcttttatttgatgggtatagcctgcctctgagccaggaactaaacacttcatgagtggtcctgattcaaggatgagtggaagtcaggaactttgtctgaagcaggttctttgctgcagttgtcttttgacaggcaaagtgggaggaggagagagaagaaagagaagaggagaggaaattggacagctcttcagatcctatttagttaggatgtcacatcatggtgtcattcttttgtgtgaagtaatttctttgggttttagaaatactgacttttgaaatgaaatttaaaaacgtacttcaaaacacaaatggtatttggatgattttctgttttgacttatttatgcctctgctctcctctattactgtagatcatttaaaatttattgggcataaaatcccaaatgtttcaaaacatagattcacacacacacacacacacacacacacacacacacacacacacacacacacaatttgtatgctcaacgacaatgataaactattacttgttaatttccaggcactgcagaacttgctcattttaaatccttatagcaatagtgtgaagtagctgtaaaagtataataatcatgctaatttcactattaagaaaacaagtgtcaaaggcacaattcaaatccttgcctatggcttcaaaccttggggttattcctttcttttttgatatgttggaggttgaaagcaatttgaattacgaagagcaagcgaatgactattgagacttagtttggaaaagcttgctggttgagacttcaagatgaaagtttcactgtaaacagaattatttgctcatggtaataacttagtttcaaagccattttaactttattagggtagttagaataaaaactaagataaaagactagaaatcaaaataaaagaatgaaaactgaaataaattcagtggtagacacataaaatgactgagtgacttgcataaaatgtaagtgagcacacagtttaaaaatgtatc

SEQ ID NO: 667295 - DNA, 1420 bp, Homo sapiens
gaaatcagcatgatttaaatctcttaatcacccacattgagccctacacacataaacacacacactttcatatttattgaatgttattaaccatttttcttcctacctcttatgagtacctacctgagccaagcactgtgctaagtgataatatatgtgtgtatatatatgtatatatatgtttaaaaaatatccttaacaaatcatatgaaatgtttgatatcattacaagtttacagtagaggaaactgaagcatatagcagttattaatttgtcsaaggtcacatatgccaaacagggcttagaaccctagtctatcagatttcatagcctttgctgttattatagccaccaccctgcatctcttgacttttctggctctgatctctaatctattacttgctttgtgagtatctggtgcttttatttgatgggtatagcctgcctctgagccaggaactaaacacttcatgagtggtcctgattcaaggatgagtggaagtcaggaactttgtctgaagcaggttctttgctgcagttgtcttttgacaggcaaagtgggaggaggagagagaagaaagagaagaggagaggaaattggacagctcttcagatcctatttagttaggatgtcacatcatggtgtcattcttttgtgtgaagtaatttctttgggttttagaaatactgacttttgaaatgaaatttaaaaacgtacttcaaaacacaaatggtatttggatgattttctgttttgacttatttatgcctctgctctcctctattactgtagatcatttaaaatttattgggcataaaatcccaaatgtttcaaaacatagattcacacacacacacacacacacacacacacacacacacacacacacacacacaatttgtatgctcaacgacaatgataaactattacttgttaatttccaggcactgcagaacttgctcattttaaatccttatagcaatagtgtgaagtagctgtaaaagtataataatcatgctaatttcactattaagaaaacaagtgtcaaaggcacaattcaaatccttgcctatggcttcaaaccttggggttattcctttcttttttgatatgttggaggttgaaagcaatttgaattacgaagagcaagcgaatgactattgagacttagtttggaaaagcttgctggttgagacttcaagatgaaagtttcactgtaaacagaattatttgctcatggtaataacttagtttcaaagccattttaactttattagggtagttagaataaaaactaagataaaagactagaaatcaaaataaaagaatgaaaactgaaataaattcagtggtagacacataaaatgactgagtgacttgcataaaatgtaagtgagcacacagtttaaaaatgtatc

SEQ ID NO: 667296 - DNA, 645 bp, Homo sapiens
tatatatatatwttttttttctggagtccctacagcatcaaacaatggctgacatataagaggcaaatttggttaaacttggtagagacccaggagactagaagggagcttagagaattttcgtggcagccccttttccacaacagaaaggcaggcacagaatctcattcagacagacctaacattagctctcattccacaggtcctggctaccttatgtctccaggagaccgtgctagacatggcatttctgtagcccagcagcactggcatattagactacagtttgtgctgccaacataggtcacaattacaatgtgagaaaaaacactttgtagtaacagtaaaacttagatgaaccagaagcaactacctggaacattcaagtagccagttttcttccactcaacaattaacacagagatacattacatgagaataagtggataggcaggaaattatttaaaaaacaaaagggacccccccccctctttagattagattgagagtgtcagtgaaaatttgggccaccaatcttgtggcttctacaaccatctaaataaaaacctgcattgaaatttgctgtcagaatgatgacctcgttctgacaaacatcttgataaactgcaagatgtttattcatcc

SEQ ID NO: 667297 - DNA, 645 bp, Homo sapiens
tatatatatatattttttttctggagtccctacagcatcaaacaatggctgacatataagaggcaaatttggttaaacttggtagagacccaggagactagaagggagcttagagaattttcgtggcagccccttttccacaacagaaaggcaggcacagaatctcattcagacagacctaacattagctctcattccacaggtcctggctaccttatgtctccaggagaccgtgctagacatggcatttctgtagcccagcagcactggcatattagactacagtttgtgctgccaacataggtcacaattacaatgtgagaaaaaacactttgtagtaacagtaaaacttagatgaaccagaagcaactacctggaacattcaagtagccagttttcttccactcaacaattaacacagagatacatkacatgagaataagtggataggcaggaaattatttaaaaaacaaaagggacccccccccctctttagattagattgagagtgtcagtgaaaatttgggccaccaatcttgtggcttctacaaccatctaaataaaaacctgcattgaaatttgctgtcagaatgatgacctcgttctgacaaacatcttgataaactgcaagatgtttattcatcc

SEQ ID NO: 667298 - DNA, 563 bp, Homo sapiens
gggaagatataccatagcagtatagcagtagggcaaacaagtaaaggctgtctaatccgggggagtgggcctgaactgggacagaatgacaatgggaatggaggagaggctgatgtgggaaatgaaagaagtatgctcacatctggggactggttgtacacacacacacacacacacacacacacacacacacacacacacacacgagtggggaagccagccaaggtagttttgagccaaccaggagggttgatggycccttaattaataggtgattcaagaggaggaatattttgggagggaaggtcatgaatacaattttcaatgcataaatgcagggtatctgggtagaattgtctagcaggcagtttgaagtcttgggatgaagctgtgaaatgaaggcaggggtggcaaacagacacaagagtcctctgcacagtgggacaggtggaaccatgagagcaagagagatcctgaaggaaagggtggggagggctgttatgggtggaaagagagttgaagaccccagaggagcaattgaacaggtaagagaaaatccagcg

SEQ ID NO: 667299 - DNA, 737 bp, Homo sapiens
taatttttgtatttttagtagagaagggatttcaccatgttggtcaggctggtttcgaactcctgacctcaagtgatcctcccgccttggcctcccaaagtgctgggattayaggcatgagccaccgcatccggcctccaaattctacttctggtggtgagaacttaacctattctccttaaattgggtctatgttaacaaagtgggcaacaaacaagtaatgaatttgtccatgagttcaacttgtataataaaaacgttgaaagggagcaaagataacaggtgaaagcaagagactgtgtcacccaaaatactatcctgaatgcccagctgcctagagttttatcagcacgccatttcgtgttgtataacctaacgtcagacactatccttcactatggcacttgcagccttgagcagctcccttaaatttctgtgccttgtttttctttcatgaactgggcaggagaagaggtatattatttcacaagggggctgtgcaaagcagtccatgcacatcaggccctgcagaaaggctcagagccatctgccctcctgattaacatgaagtcactgaatgttaagtcgcagactccagctctgccaacactcaagacaatctcaagaccttaataatcatcgtgcctagcacagaatagaaatgcgtgacttgactggctatgcagtttcctactgatagcagtaaaaataagaatgagttctcctccttcccaata

SEQ ID NO: 667300 - DNA, 737 bp, Homo sapiens
taatttttgtatttttagtagagaagggatttcaccatgttggtcaggctggtttcgaactcctgacctcaagtgatcctcccgccttggcctcccaaagtgctgggattataggcatgagccaccgcatccggcctccaaattctacttctggtggtgagaacttaacctattctccttaaattgggtctatgttaacaaagtgggcaacaaacaagtaatgaatttgtccatgagttcaacttgtataataaaaacgttgaaagggagcaaagataacaggtgaaagcaagagactgtgtcacccaaaatactatcctgaatgcccagctgcctagagttttatcagcacgccatttcgtgttgtataacctaacgtcagacactatccttcactatggcacttgcagccttgagcagctcccttaaatttctgtgccttgyttttctttcatgaactgggcaggagaagaggtatattatttcacaagggggctgtgcaaagcagtccatgcacatcaggccctgcagaaaggctcagagccatctgccctcctgattaacatgaagtcactgaatgttaagtcgcagactccagctctgccaacactcaagacaatctcaagaccttaataatcatcgtgcctagcacagaatagaaatgcgtgacttgactggctatgcagtttcctactgatagcagtaaaaataagaatgagttctcctccttcccaata

SEQ ID NO: 667301 - DNA, 737 bp, Homo sapiens
taatttttgtatttttagtagagaagggatttcaccatgttggtcaggctggtttcgaactcctgacctcaagtgatcctcccgccttggcctcccaaagtgctgggattataggcatgagccaccgcatccggcctccaaattctacttctggtggtgagaacttaacctattctccttaaattgggtctatgttaacaaagtgggcaacaaacaagtaatgaatttgtccatgagttcaacttgtataataaaaacgttgaaagggagcaaagataacaggtgaaagcaagagactgtgtcacccaaaatactatcctgaatgcccagctgcctagagttttatcagcacgccatttcgtgttgtataacctaacgtcagacactatccttcactatggcacttgcagccttgagcagctcccttaaatttctgtgccttgttttwctttcatgaactgggcaggagaagaggtatattatttcacaagggggctgtgcaaagcagtccatgcacatcaggccctgcagaaaggctcagagccatctgccctcctgattaacatgaagtcactgaatgttaagtcgcagactccagctctgccaacactcaagacaatctcaagaccttaataatcatcgtgcctagcacagaatagaaatgcgtgacttgactggctatgcagtttcctactgatagcagtaaaaataagaatgagttctcctccttcccaata

SEQ ID NO: 667302 - DNA, 628 bp, Homo sapiens
tcatacatctccatcagcagccaaccatttatttagcacctatgtgtgagaatggaggttccctagagaaaaagcccaagagtgtgacattcttatcaggcccgtaaagagggtgcagtattactgatgaagacagaaagggttcccgatcatggctactccagccctggctttgggaaggcgaarctgccagccaaccttccatgtacactccccgtataaagacagatagtaaaaaggctggcatagacctcatgttttagcagttcagacagaatctactcataatatcatctccctgagacagaaaacagcagtacagttgaaggaggaggtggttttatcattaggcttgaggcctaggctgaatgaagagttcctggcttacctgtcagtttccctggagtacttaatccgtttcctttctggagagtcaaaagactggagcttttccctgcgatcatttcctcttcctttaaactttccctgttggtaagcagaagagcagacctgagattgccacctgagggaattggggagtggggaaattctaccccattgctgttattattattatttttttcttgagacagagtctcactctgttgcccaggctggagtacactgg

SEQ ID NO: 667303 - DNA, 665 bp, Homo sapiens
gggattacaggcatgcgccaccacatccaggtaatttttgtatttttagtagagacagtttcaccatgttggccaagctggtctcaaactcctgatctcaagtgatctacctaggtgccttggcctcccaaagtgctgggattacaggtgtaaaccactaggcccggcctaaataatcttttttattccccataatcyccatcaataatatgagtcaacagttttgttttgttttgttttgttttgttttttaagagatggagtcttgctctgttacccaggctggagtgcagtggcacgatctcggctcactgcaacctctgcctcccaggttctagcaattctcctgcctcagcctcccgagtggctgggactacaggcacacaacaccacacctggctaattttttgtattttagtacaaagggggtttcaccatgttgcccagactggtcttgtacttctgagcccaggcaatccacccgcctcggcctcccaaagtgctaggattacaggcatgagccacaaagcccggccaagagtcaacagtttgaaagggcatagctccttcccctaataccttgtgcaggtctgacagttgctggtgtttgatcagaacttctttattgggaaactgccttctgcaaagcagacaagccagtttat

SEQ ID NO: 667304 - DNA, 665 bp, Homo sapiens
gggattacaggcatgcgccaccacatccaggtaatttttgtatttttagtagagacagtttcaccatgttggccaagctggtctcaaactcctgatctcaagtgatctacctaggtgccttggcctcccaaagtgctgggattacaggtgtaaaccactaggcccggcctaaataatcttttttattccccataatccccatcaataatatgagtcaacagttttgttttgttttgttttgttttgttttttaagagatggagtcttgctctgttacccaggctggagtgcagtggcacgatctcggctcactgcaacctctgcctcccaggttctagcaattctcctgcctcagcctcccgagtggctgggactacaggcacacaacaccacacctggctaattttttgtattttagtacaaagggggtttcaccatgttgcccagactggtcttgtacttctgagcccaggcaatccacccgcctcggcctcccaaagtgctaggattacaggcatgagccacaaagcccggccaagagtcaacagtttgaaagggcatagctccttcccctaataccttgtgcaggtctgacagytgctggtgtttgatcagaacttctttattgggaaactgccttctgcaaagcagacaagccagtttat

SEQ ID NO: 667305 - DNA, 610 bp, Homo sapiens
tcacttgagcccaggagtttgtgaccagcctgagcaacatagggagaccacctctctacaaaaaatttatggccgggtgcagtggcttacgcctgtaatcccagtactttgggaggccaaggcgggtggatctctcgaggtcaggagttcgaggccagcctggccaacatggtgaaaacccatccctactamaaatacaaaatagccgggcgtggtggcacacacctgtaatcccagctactcgggaggctgaggcaggagaattgcttgagcccaggaggcggaggttgcagtgagcccagatcgtgccactgtactccggcctgggccacagagcgagactgtatctcaaaaacaaacaaacaaacaacaacaacaacaacaaaaatgcaaagaaaagaaatcaaccattttcttccccctttcaaaccccatagcctaaccagagggaacttctgaggggaaacttgctctttgctgccatctggtggctgttactggagcagttctcacaggaaaaacttctatccaacaattatgtggcacctactgggttcaaagttctgtaccaggcaacttataaatactttcttacatttttatattcctt

SEQ ID NO: 667306 - DNA, 626 bp, Homo sapiens
taaatagcaagaacctgagatttttatgttctactcaaagagaggttattgctttcccttccctgcagaggtttttagaggagctgtcctttcagcaccctagtactgaatcatgtcttttaaacctccctgcatttattttttcaatccctcctgcatttaaatgaatayttaacacctactgtgtgtttacaactatgcttaagactggaggaaagaagggagggtacaagagaaagtacaatagttaaaattcccttaaggagaattcagatactcagttgaggaaataagaaaacagatacaaatttgttaagtaatcacacatcttttcatatgtgtaaaagctgctagaaaaacatgaatgttcctccctccatgaccaggaagactcttaacatgtatttctccaagagagtttctaatctttctttataacataggcatatttttctcattcatatagatgacatcaggcacaagttagtaataagtctggattcattctggggctcagaaactctcaagctattttgagcaagaaagagatttagcacaggaaattctgtgcttgcagaattgttggaagggctgagagaagaggctctcagctggacctatgtgaa

SEQ ID NO: 667307 - DNA, 626 bp, Homo sapiens
taaatagcaagaacctgagatttttatgttctactcaaagagaggttattgctttcccttccctgcagaggtttttagaggagctgtcctttcagcaccctagtactgaatcatgtcttttaaacctccctgcatttattttttcaatccctcctgcatttaaatgaatatttaacacctactgtgtgtttacaactatgcttaagactggaggaaagaagggagggtacaagagaaagtacaatagttaaaattcccttaaggagaattcagatactcagttgaggaaataagaaaacagatacaaatttgttaagtaatcacacatcttttcatatgtgtaaaagctgctagaaaaacatgaatgttcctccctccatgaccaggaagactcttaacatgtatttctccaagagagtttctaatctttctttataacataggcatatttttctcattcatatagatgacatcaggcacaagttagtaatmagtctggattcattctggggctcagaaactctcaagctattttgagcaagaaagagatttagcacaggaaattctgtgcttgcagaattgttggaagggctgagagaagaggctctcagctggacctatgtgaa

SEQ ID NO: 667308 - DNA, 1701 bp, Homo sapiens
tgggaactctgaggatccctctgtcctcaagaggctgcccctagacatgagactgctattgattccccttggacagcctgaaagggatgggatggtcacatgtggcactgggcactggacactgcaaaccctggggtgcagaatgaggctacttgcctgtgaactaaagagaagggttcctgagccaaccacttttgcagggactctggaccctgactcaatatgagaaggtggctcatgccttgttcttgctcccataaggcaggcagagcaggttgaaggcagggcttttcctggcagaccctgctcactcctgaggcccaggtaagtgaatagttmtgactgtggttagctggagacctgagtcctgtcttggccatgtaggaagctgaagagctgcttgaaagagatcatatgcatagtacaccaacacaggctctgctttctctgaaaagcaatttcaaagccacttcattctccacctgcatttggctaatagcctgattacaaccatactaataaccttcaaacattcttgggagcagccttggctctgaaaggtgtcaccttcctttctccttgccctatctcatgcttctctgtgactgcagtgaaaacagctgtgcattcctcccagggcctgagttacttggaggaaaggcagatggctgtgggctaatttctaaagtgcacttctggggaccatcagcctcagttcccactcagggctacaggtcagagcaagaacaattctccatgaatatggatgccaaggatgggagctgattgcttctctcctgcagggcaaagctgtggccctggggtcggggtgggggggacatttttgctgagatacagggtctagggaagtggtgtcctctgagtcacaaggcaggacattttaagatttaggatgctggcaacttggagaaaggtgtcactaccaggagaagcagcacagagaggaatttgcgtctgtcatacagtccctccattaattagtgcctcttactcttacagcactgaattaagaggttggatggtcaaggtgctgaaaggatttttgcagtagctaagaatttggatggatgaacatcaaggtgtcttccaatttaagaggctaggtgtcctcatttgtgccttagctgataagctgatattattccccctgggttgcactttgtccctctttcctattgtccagatctcacccaatctctatgattcaattcgtgccccatccacctattctttgaaccctttcctgatggccccagtccacactaacatgacatttactgtctgaagatcttagttacttcagtggcctccaggtgggcaccttattatatgctgccatgtttacttgttgctattcctgggcctcatctactgttacctggtgagattatgaattaccttgtgatcagggccaacaccctttgctgtccattcctagtttcctatgtcaaattggtgagtgttgagcagccagcgttctaagggatgagtccccaggatgctcagaggggctgggcattttcactagatgtcattatccctgggctgtggaatgcctcactccaagagagatgcccctgatgacaggtccacaggcttccctttagtgtctcacgacaataggactagacatttcctccccttcctgttcttccatagccccttgatagagctgtggaa

SEQ ID NO: 667309 - DNA, 752 bp, Homo sapiens
ttgcattggtgcagctacactgagtttcctaaatcagataataatgtctgcaaggggcaaaccacccaaattctctactgggggccccagaggtgagagaagtaagtggggtcaaggagataagcaaaatcttaagccctgtcactgggtgtgggatggtgacaggaaatagaaattaggggccaggaagtaagaaaccaacccaatgcttatttttagaaatggcacctcccagccgtcaaaatttagtctgctggttagggtggttcctgtttctttagccagcatcactagcatctgtgagcatcttaattgtgtcctacagggttgggagtccctcctgcaggcttgctttaacctagggttcacccatttggggcacttttcacrctgttgaagttgcccatttacttgtctgtctcccactcaacctcggtgagaacaggggttttgcctgttctttgtggtatcttatcacatagcgcagagcctggaatatagatgtgcttaaaaaatattcactgcagagctggagatcactgcggaagcagtgtagagaggtggttatcagtgtgggcttcagaggtagacagatgtgggtttgactcatggccctgctaactcactacacccacttccccaatgctgtgttctggtttccagattctatcactgacttattacaagccttcagattttgtaaaacactttgaggctttcctggaacaaataaagcatataactgcacattt

SEQ ID NO: 667310 - DNA, 623 bp, Homo sapiens
ttattgatacaacaaattagggggatgtttgacctccacaaaagtggactctgtctgtttagctcccctcttcctggtactttgctctgaaaattctagctactttgacttccctgaactttaatctgtttcttctactcagcaagattgccaagctgttttattttcctccctgtgccacagtctgaaaatatccaccatgcagaaaaaccaaggttattataagaatttaccttccttcttctcctcccagctatcataggttctgcttattgatcaatatccacaaaattgtttcatacattttgtccagttttctagttgtttatcatgggagggtaaacaggtattcctcaggtgatggaatggaaatcatactatgtttgtgcttatactatttgttaacakgattccgatttcgtaaaaacctgccattaatgtgttcccaagtgacttaagaaagaaaatctgctctagggtcatatccttctaggtttaaatttactgtcagagttagactgcatctttaacttgggatttaagaaataattctaaggttcactctgattgcgtaggctcaggtcatggacttatctctaaagccatcaccgtgctacaggact

SEQ ID NO: 667311 - DNA, 623 bp, Homo sapiens
ttattgatacaacaaattagggggatgtttgacctccacaaaagtggactctgtctgtttagctcccctcttcctggtactttgctctgaaaattctagctactttgacttccctgaactttaatctgtttcttctactcagcaagattgccaagctgttttattttcctccctgtgccacagtctgaaaatatccaccatgcagaaaaaccaaggttattataagaatttaccttccttcttctcctcccagctatcataggttctgcttattgatcaatatccacaaaattgtttcatacattttgtccagttttctagttgtttatcatgggagggtaaacaggtattcctcaggtgatggaatggaaatcatactatgtttgtgcttatactatttgttaacatgattccratttcgtaaaaacctgccattaatgtgttcccaagtgacttaagaaagaaaatctgctctagggtcatatccttctaggtttaaatttactgtcagagttagactgcatctttaacttgggatttaagaaataattctaaggttcactctgattgcgtaggctcaggtcatggacttatctctaaagccatcaccgtgctacaggact

SEQ ID NO: 667312 - DNA, 1237 bp, Homo sapiens
ctaatcctgtttagcatttattgtattacttcaaacttaagattcacagtttttcagtcatgtaaaaccagccacttcctctttgaacattagctatcctctgtgcattttctctttctctagaactcttattttatgtatatttaacaatctcgttaggttccatgtattacttaaagctaatatctcatcttctgactcattgtggtattaaaactcatgtgctagcctgtaagctgattacctttagggatgacaggtgttttctgccccacaggcattcaattattgcttagaattgaatgaatattcatttattttaatagtgctgatattatgtagtgtaaggaattgctagatgctgaagtgggaagagatccagtttacctagatctccttgttacaggaaatggaagtgttgttagccactgttctgtttgtttaaatatgtccctcttacattatcttcaagttggtcctatactgattcctcattgttggatgaagtttttttttaaataattttttttaaaaagtatactagagcagatagaagaaagtgagtttattcacaggtatcttagatgtctyttctatacattttctgcttcctctaagcagtttctctctgataatagttatgtctgtgttctaggtaagttgaacgtgcaagtggccagcagcaaggccatgaagttgttcccctttcatgcagtgatttaacacatttgtctttccccagctgactagttttattagctatggagctgattgccacccacatttttctccctcactttcccatactggcagcccgacagcttgcttttctcccagaggtatgactacgaaattcttcatttggattatactttcctgaggccacatcaaagaaggctgaaccatccccagcaatgcccaaacacagtccaacttgcttttccaacaagatatggaggttttgcaatttacttttataggctgtgtacagagctctcatccatcctcagttttctcactcccaaaaccagacccaactgtcatagcctttgccagcctcatgtcatctttggctcaggaatacattttttcccctaattttatgcttttatggctttcttattactgtcagtttataacgcaaaaaaataagtacattattttctaaattttaacacaaacatcacttttattggtttgggagtttttcctcaagctcagtcttccagctaatgtt

SEQ ID NO: 667313 - DNA, 1237 bp, Homo sapiens
ctaatcctgtttagcatttattgtattacttcaaacttaagattcacagtttttcagtcatgtaaaaccagccacttcctctttgaacattagctatcctctgtgcattttctctttctctagaactcttattttatgtatatttaacaatctcgttaggttccatgtattacttaaagctaatatctcatcttctgactcattgtggtattaaaactcatgtgctagcctgtaagctgattacctttagggatgacaggtgttttctgccccacaggcattcaattattgcttagaattgaatgaatattcatttattttaatagtgctgatattatgtagtgtaaggaattgctagatgctgaagtgggaagagatccagtttacctagatctccttgttacaggaaatggaagtgttgttagccactgttctgtttgtttaaatatgtccctcttacattatcttcaagttggtcctatactgattcctcattgttggatgaagtttttttttaaataattttttttaaaaagtatactagagcagatagaagaaagtgagtttattcacaggtatcttagatgtctcttctatacattttctgcttcctctaagcagtttctctctgataatagttatgtctgtgttctaggtaagttgaacgtgcaagtggccagcagcaaggccatgaagttgttcccctttcatgcagtgatttaacacatttgtctttccccagctgactagttttattagctatggagctgattgccacccacatttttctccctcactttcccatactggcagcccgacagcttgcttttctcccagaggtatgactacgaaattcttcatttggattatactttcctgaggccacatcaaagaaggctgaaccatccccagcaatgcccaaacacagtccaacttgcttttccaacaagatatggaggttttgcaatttacttttataggctgtgtacagagctctcatccatcytcagttttctcactcccaaaaccagacccaactgtcatagcctttgccagcctcatgtcatctttggctcaggaatacattttttcccctaattttatgcttttatggctttcttattactgtcagtttataacgcaaaaaaataagtacattattttctaaattttaacacaaacatcacttttattggtttgggagtttttcctcaagctcagtcttccagctaatgtt

SEQ ID NO: 667314 - DNA, 647 bp, Homo sapiens
gaattagttgatttttagatgaatcatctggtgtagattaaaacataaaaataacctatacttcctaaatgttgtcaggtttttaagagacttgaagaggttaattaggataaaggataaataattatattattcaacagtgtgagtgctaaggcttaaatcagcygattttgctcaattccaaaaatgattcttcaagcacaccgttttagtccattcttatgctgctataaagatcttcccaagactgggtaatttatgaaggaaagaggtttaattgacccacagtcccacagttccacagggctggggaggcctcaggcaacttagaatcatggcggaaggggaagcaagcaaggccttcttcatatgcggcaggaaggagaagtgcagagcaaggtggaaaaaagccccttataaagccatcagacctcatgaaaactcactcactatcacaaaacagcatgggggaaccacctccattatctaatcacctcccatgaggtccctcccccaacatgtggggtttacaattcgaattacaattcaaggtaagatttggatggggacatacagccaaatcatatcacacacagtcaagtggattgctttatcgttgacattttcaaggaggtcagagattaaaa

SEQ ID NO: 667315 - DNA, 647 bp, Homo sapiens
gaattagttgatttttagatgaatcatctggtgtagattaaaacataaaaataacctatacttcctaaatgttgtcaggtttttaagagacttgaagaggttaattaggataaaggataaataattatattattcaacagtgtgagtgctaaggcttaaatcagctgattttgctcaattccaaaaatgattcttcaagcacaccgttttagtccattcttatgctgctataaagatcttcccaagactgggtaatttatgaaggaaagaggtttaattgacccacagtcccacagttccacagggctggggaggcctcaggcaacttagaatcatggcggaaggggaagcaarcaaggccttcttcatatgcggcaggaaggagaagtgcagagcaaggtggaaaaaagccccttataaagccatcagacctcatgaaaactcactcactatcacaaaacagcatgggggaaccacctccattatctaatcacctcccatgaggtccctcccccaacatgtggggtttacaattcgaattacaattcaaggtaagatttggatggggacatacagccaaatcatatcacacacagtcaagtggattgctttatcgttgacattttcaaggaggtcagagattaaaa

SEQ ID NO: 667316 - DNA, 632 bp, Homo sapiens
gaactccatcaaaaagttggcaaaggaatatgaacagacacttctcaaaagaagacatttatgcagccaacacacatacgataaaaagctcaacatctttgatcattaaagaaatgcaaatcaaaaccacaatgagatcatctcatgccagtaagaatggcaattattaaaactcagaattatttttcaaataatatgttcagaagagaacactaagggtttggcaaagcaacagtttgataagatagattgtataggtgtgaatcacaaacttaaatcagacacctcatcaactgccagtttgaactgaagcagaaggagatgggaaagaattaaggaatgctctcagacttcttgaattttacaggatgggaccatagagcttttcatctttgaacgtgtactgttctccaagacaagggaagcatggctgctaagaagattcagagatcattagaggyactgcctctgtttcagaggggccaccgttaccttgctttttaataagccagatgctttcagcaggccagatagacaccactcagagttttgggggtgcaatcccttcccagccccagtgggtgcaggtgggaccaccaccccagtaggtcctgggggtggtacttttgtcc

SEQ ID NO: 667317 - DNA, 632 bp, Homo sapiens
gaactccatcaaaaagttggcaaaggaatatgaacagacacttctcaaaagaagacatttatgcagccaacacacatacgataaaaagctcaacatctttgatcattaaagaaatgcaaatcaaaaccacaatgagatcatctcatgccagtaagaatggcaattattaaaactcagaattatttttcaaataatatgttcagaagagaacactaagggtttggcaaagcaacagtttgataagatagattgtataggtgtgaatcacaaacttaaatcagacacctcatcaactgccagtttgaactgaagcagaaggagatgggaaagaattaaggaatgctctcagacttcttgaattttacaggatgggaccatagagcttttcatctttgaacgtgtactgttctccaagacaagggaagcatggctgctaagaagattcagagatcattagaggcrctgcctctgtttcagaggggccaccgttaccttgctttttaataagccagatgctttcagcaggccagatagacaccactcagagttttgggggtgcaatcccttcccagccccagtgggtgcaggtgggaccaccaccccagtaggtcctgggggtggtacttttgtcc

SEQ ID NO: 667318 - DNA, 632 bp, Homo sapiens
gaactccatcaaaaagttggcaaaggaatatgaacagacacttctcaaaagaagacatttatgcagccaacacacatacgataaaaagctcaacatctttgatcattaaagaaatgcaaatcaaaaccacaatgagatcatctcatgccagtaagaatggcaattattaaaactcagaattatttttcaaataatatgttcagaagagaacactaagggtttggcaaagcaacagtttgataagatagattgtataggtgtgaatcacaaacttaaatcagacacctcatcaactgccagtttgaactgaagcagaaggagatgggaaagaattaaggaatgctctcagacttcttgaattttacaggatgggaccatagagcttttcatctttgaacgtgtactgttctccaagacaagggaagcatggctgctaagaagattcagagatcattagaggcactgcctctgtttcagaggggccaccgttaccttgctttttaataagccagatgctttcagcaggccagatagacaccactcagagttttgggggtgcaaycccttcccagccccagtgggtgcaggtgggaccaccaccccagtaggtcctgggggtggtacttttgtcc

SEQ ID NO: 667319 - DNA, 1248 bp, Homo sapiens
tcctctgaaaattctttaaatacctaacctatctatcaccattttcaagtatatacatataacctatctatcactgtaggttactttatattttatacgtatttaatatttatgtgtatatacttgaaaatagtgataggttacattcgtaagtatatacatatttttctgcaacagaatcccagatttggggtcataaatcacctttcccttcttattcaatgtgatttgagtttaacagatacacctattctgaggttaatgggtgtgattcagccagggaaatgagaggaccagcttcctctggtctcagggatcatttagatatgggcacgtctcaatctttaccatatgttaaataaggtaaaacatggaaatggcactatatctgttggaatgaaacatgctctattttcttctgcacccttttttctgcattgcttaaaatttattaatctgtatttctgaaactttgcactgtagtccatgaggaacagaaagctggtgctgagattttgattaaagagaaacactaggttgtggagtaacattacaggaacacattttctcattcaatcacataatcactgtgaatatcatcaataaaagagacggtgactgaatttctctgtgcttttctggtcctcatagtgagactcaaagctcgattctttgcacacatttccagcaccattctactgttagtgcacagcagtcattgtgggacccccttagacctgtttcttctctttggtcttctgtttcctgttccccatatgctctttctttcagtggcacatacacttcagtggcatcccgatacatggtgtaaggtaactgcatttttggagaacttgacaatgtaaacatatctctattccgcccccacttgactcatgccagctggacatataattgtaggtaggaaatcatctttcttcagaattttgaargcattgccttactgtcttctagctctcgtgctgctgttgagaagtctcacctttttctcctctgtggaaacttatcagatatctttgtcccaggtatcacacaatttcttaaaggcacaccttcctttgggtctatttagaactctattttggacaatttgtggaacctttcaaccttcctatttatgaccttaaattttggggcattattttaaattgtttattgtaacattttaaaattttgtttctttctggaacttgtattatttgaatgctgatggtcattgcttatcct

SEQ ID NO: 667320 - DNA, 1248 bp, Homo sapiens
tcctctgaaaattctttaaatacctaacctatctatcaccattttcaagtatatacatataacctatctatcactgtaggttactttatattttatacgtatttaatatttatgtgtatatacttgaaaatagtgataggttacattcgtaagtatatacatatttttctgcaacagaatcccagatttggggtcataaatcacctttcccttcttattcaatgtgatttgagtttaacagatacacctattctgaggttaatgggtgtgattcagccagggaaatgagaggaccagcttcctctggtctcagggatcatttagatatgggcacgtctcaatctttaccatatgttaaataaggtaaaacatggaaatggcactatatctgttggaatgaaacatgctctattttcttctgcacccttttttctgcattgcttaaaatttattaatctgtatttctgaaactttgcactgtagtccatgaggaacagaaagctggtgctgagattttgattaaagagaaacactaggttgtggagtaacattacaggaacacattttctcattcaatcacataatcactgtgaatatcatcaataaaagagacggtgactgaatttctctgtgcttttctggtcctcatagtgagactcaaagctcgattctttgcacacatttccagcaccattctactgttagtgcacagcagtcattgtgggacccccttagacctgtttcttctctttggtcttctgtttcctgttccccatatgctctttctttcagtggcacatacacttcagtggcatcccgatacatggtgtaaggtaactgcatttttggagaacttgacaatgtaaacatatctctattccgcccccacttgactcatgccagctggacatataattgtaggtaggaaatcatctttcttcagaattttgaaggcattgccttactgtcttctagctctcgtgctgctgttgagaartctcacctttttctcctctgtggaaacttatcagatatctttgtcccaggtatcacacaatttcttaaaggcacaccttcctttgggtctatttagaactctattttggacaatttgtggaacctttcaaccttcctatttatgaccttaaattttggggcattattttaaattgtttattgtaacattttaaaattttgtttctttctggaacttgtattatttgaatgctgatggtcattgcttatcct

SEQ ID NO: 667321 - DNA, 465 bp, Homo sapiens
aaaaaaaaaaatctgttttaaataaatttgccccaacttttcccagtttctgaggagtggraaaagccatattttgaaataccagaggtaacaaatcacctcccaagagaagcttttatttaactatcacttacaggtactttctacttaccaggctggctctaagggtttgtaaatattatgatagctcagggctgtccagtggaaaaataatacaagccacacggataactttcaatcctccagagctgtgtaaaaactcattctaagcgccgcacgtggtggctcatgcctgtaatcccaacactctggggggccgaggcaggcggatcacaaggtcaggggatcgatcttggccaatatggtgaaaaattagccgggcgtggtagcacacgcctgtagtcccagctactctggaggctgaggcaagcgaatcacttgaacccaggaggcagaggttgcagt

SEQ ID NO: 667322 - DNA, 593 bp, Homo sapiens
atctgacagtatatccaaataaaaatatgtaattaacggtcacattgatgagaatggaatgttgatttatatcccaggagacctgaatgaaaactgagcccaaacttagcctttgaagtaaagtaacttccctgcagagccggtcctagagcacagaggctatcagctcaccctgttctcttccttcccgtctctaagccctctgttggcccttcccaggtagacaggaaatccacgcacgtataccagtccaatattcccaaactgggtttcaagttcttagaagacagggatcatatctcatgtaccttctgtattcctcataaggctcaaatatttgttgcataggtatttgactctagaatccaaacrataactcacttgactcaactgacttaagagttaaatcaattcgtggctgggcacagtggctcacgcctgtaatcccagcactttgggaagccaagctgggtggatcacctgaggtcaggagaccagcctggccaacatggcaaaaccctgtctctactaaatacaaaaagtagctgggtgtggtggctggcacctatcatcccagctacttgagaggctga

SEQ ID NO: 667323 - DNA, 257 bp, Homo sapiens
ccatcctcctgcctcagcctcccaaaatgtcaggattacaggcgtgagccaccatgcctggcctcaaatagctcatatacaccrgttaatccactcactgtcttcctgcactgacttaaaagggaggtcctcgtcctgcctcacagcgggtattctcaaggcttacagtagcatctggcactcagtacttgctcaagaaagaggtgatgttctaacaaaaaccagacaaactctgattgcctaatttctgaaacttg

SEQ ID NO: 667324 - DNA, 609 bp, Homo sapiens
gcctcaaggagggccagctcctcgccctgtcaggcygcggtgcaagtacaaccttgggtcaggagggaggcgagccgcacagggagagggccagggcagctgaaaagcaccatgtcctcattacacggatggggaaaccgaggcccgcccaggaggtgaggggcttgctgggagccggcaatagcagggtgggcaccagagctctggccccagcacttgctccaaggcccctgtggaacttggccatgggtcccgttaaaggctggggttggccgtgactggggagcgctgatcccaggctgacgaggaccctggagctctgcagaggggcagcggggtccatcactccccgatactccctcacctgtcccttctaaattctctcacagctgtccccagccaccgcctgtcccatcaacttgcctgtcccgagtgccttctctccacagtccatctcgtagaagcttcctgggtccctctctgcctccctcaggacggagggcacttcccatccaaaccattaattgaggccctgcagtgcgcccagggctgcctaggaccgtgagaggctataggagaggaacaggtctgcacctgacccatgtggga

SEQ ID NO: 667325 - DNA, 600 bp, Homo sapiens
taaaaaaaatatttactgagcacctcctatgtgctaggcactgttctaggtgctggggatacttgcttttgtgtagtttaccttttaaagggggaagacaagtgataaaaatggacaaactatagtagtcattagtgctgttctctaaatrtttcaaatactcccccttcttggtacatggtaggatttttaatttttctttaattagtagaaaattttttttggctgggcatggtggctcagctcatgcctgtaatcccagcactttgggaggccaaggcaggtgggccacctgaggtcaggagttcgagactagcctggtcaatatggtagactaaaaacacacaaaaaaatagctgggcatggacctttagtcccagctacttgggaggcttaggcaggaggatcacttgaacctgggaagcggaggttgcagtgagccaagattgtgccattgcactccagcctgggcactgcagcgagactccacctaaaaaaacaaaaaacaaacaaacaaacaaaaaaactgcaaacaacaacaaaaaaaaacaccaaacaaaaaaacccacaaatttttaaattttcttttctttttttttt

SEQ ID NO: 667326 - DNA, 655 bp, Homo sapiens
attttccattaaaatatttaaatcttgtatgaatttttatcagattagaaatttagggcgtttcttaatttctctatactctagcttttgacttttttttttctgacctaagaggtatttagagcacattttagattttttattttgactaatcatttaaaatgtatactaatcttcaatttaaataaaaaactggtctatagtgacaaaaattacaaatgagcctaamtaataaattatcagctgtgtttatatgtataggcatgcacagattttggtaaatatgtacatagtatattggtgagcttatttttgtcgttcttaactcattgtgtagtctaaacgttggggaaaaaataaaatacaataatcagatggcgtgaataagaaaattgttctaatgtttgtaaaccaagcaacggttttaactgctcccctcttcctgattgacttccaaaagggattaatccatattaggtcctgtcgtatatgtcacggtataacatctccagctataaaatggaaatttgagaataactttgctgctactcagatacattttatttcaaaaacatacactaaggtgttgctgttggatctttccaaaaacatattcacacagaactttcaatcacactgagccatatttgaacaa

SEQ ID NO: 667327 - DNA, 1132 bp, Homo sapiens
gccttgacctcccagactcaagctattcttccacctcagcctcccaagtagctggtactacaggcacatgccrccaaacttggctaatttttgtattttttgtagagacagagttttgccaaattttcaggctggtctggaatttctgggctcaagtaatcctgccttggcctcccaacatgctgatattacagacataagccacagtacccggccagttttctttttttaaaaatctattggttattaatttgaagccttccttttcatagctgtgctccttaattgggagcaaacatgaatggaccacaacttagccaattttctatatacgatctttgccatcctaatttaaaggaatattaattctttcttttcctctttcattccacaaacctgtattgactacatctaagttctaaatggtgcactggatgttgaaaaagttgatgatgagcaagaacaaaattccacctttcaggagacttacagttcaatatgggaaatataatttgttaaaatataaaagtgcaattgtgttacatgctgtacgaagtacatgttgacatgtgagcatataataaatgggctggaggccagaggattgccaaagagaatgggcctcctgctgagatgaaaagttgagcagggattagttggcgaaagtggagggacgaccctttctaggcaggaggaagaacatgtacagaatctctgaggtgtgatgcgacaaagtctatatgaaaaactgaagaaaggtctaatgtggcttaaatacagaagccagtaggagaggagtcgaaaagaggctggagaagtagaaagtgtctgcattctgcaggaacttatattgtataaaaagaatttctctttattctaagtgcaatgtgaagccaatgaagtgccttaaacaggtgatgtgatttgattgaatttattacttcacttaacaaatattcattacatgcccactgtttgtcagatattgctgtagcccctggtgatacagtagggaataaaacaggcaaaaatccctgtcctcttgcagcttataatggactgcaatgtttaatatgtcagaggaggtccacggaggagtgacttctaagcaagaatctgaaaaaaatgagga

SEQ ID NO: 667328 - DNA, 606 bp, Homo sapiens
atatttctggacaattctttatattttaatagtagtcagaatttgatcaggaaaacagaagacatcctatgtattataatgataaaagtttaatattaattagggccttatgctattattggaagagcttggtgaatagatattagaaaagcagctagacaaaatcagaagaggtctgttttatatcagagatcttagcctgacagtctagagtgtgggcacagaacccaagcttataggaatttctgaaaggtctgtaaatcttatccagatggacagtgggagctcataaaggattctgcaagccatcacatctgtcaaacctgctatgtctaatccttaagcctgctttatgtgaagacctcctcttcactcctcayttccagctctcatgagtttctttcataggcaaacccaaacctggaacaatgtgcctgaagacttcgcgtgacacagtacccagacttaaataggaggggagccatggtggaagtggccatccagcacagttttcttggtctttactcatagttttgattccttaaaaaaattaaccacattaaaatatgtgtttcataatctacatctaataatacaaatatttaa

SEQ ID NO: 667329 - DNA, 606 bp, Homo sapiens
atatttctggacaattctttatattttaatagtagtcagaatttgatcaggaaaacagaagacatcctatgtattataatgataaaagtttaatattaattagggccttatgctattattggaagagcttggtgaatagatattagaaaagcagctagacaaaatcagaagaggtctgttttatatcagagatcttagcctgacagtctagagtgtgggcacagaacccaagcttataggaatttctgaaaggtctgtaaatcttatccagatggacagtgggagctcataaaggattctgcaagccatcacatctgtcaaacctgctatgtctaatccttaagcctgctttatgtgaagacctcctcttcactcctcacttccagctctcatgagtttctttcataggcaarcccaaacctggaacaatgtgcctgaagacttcgcgtgacacagtacccagacttaaataggaggggagccatggtggaagtggccatccagcacagttttcttggtctttactcatagttttgattccttaaaaaaattaaccacattaaaatatgtgtttcataatctacatctaataatacaaatatttaa

SEQ ID NO: 667330 - DNA, 1879 bp, Homo sapiens
ttaagcctggttatgattacaaaaatagaagtaactgtactgctctaaagatgtacttttgtctgtatttcccagtgttaagagtatcaaaaatgatctccttttagaaaactgagcaagaggaagggaagccttacctcatggatgccagtaaccagaccctgaaaatgaaaataagatttttgcagatgagataactctgatggattcaaaagmagactccacatactcaattctctcttccaattggtgccccctctgcatcactgttcttcagttctttagagagccttatcatggctataatacacacagagtgtcactgtagtacagggtcttatcttatgagaaacaggagtgtgagcagaaaaatgcacagtagtgggccgaatttggatattcacttccaatatcacattgcatttttagtttctggacacgaaaaatgcaacataggacacaaaataaaaatattccacaagcacaatacagaataagaggaaatagtggcattgttttctttttgtgtcatcagttttgaatcacggtaaattatgctgcaatacaaattttatttttttaaatgttgatgccttaaatacatagattgaaatagatatttaattttatatttaaagtaaaatggttccatctcaataatctgatttcatagattgctttccttttgtttataaagactatgtttataaagtcaccatttacataatttaaacctaatatttacttgaaatacacataacaaaccactagtcataaaatgtaaaatgcaggttgtcctttattttatttttggatcaataatctggtttagtaattatgatttatatgataatttagacataaatcttcactatccctttctctgaaactacttagatagcatgcttgaacattgtgcttctttgtagcacggaatatgcataagcccagttccttttgcagtcccatttttttctccttctaaagagaggtcatactgcctactgaagaggcaaatgaaatgagggcaaagactaaacaacttttaatttagggaatattctccattaatgaattccccagagcatccttcagctaagccacgggcttctcattcctctctatcagtattggggagttgaaacacttacagagtatttgctagtgcctgtctctcaaacccattttgccagctggagagaagtgtgtagaagttctagtcaaatcagcaattctcctggaccctttctgatttctgattttttctcctgtaccttgtaaatcacagcacaaacctttctttgtgattctggtattagaaaatgttttcttttttcaaagatcacttttttatttaagaaatggaaatgttatttattggttaaatgacaagcattcaataaacaattatgtgccctagtacttgtctatgaagggctaatatatgacacaaatataaggcatacagaaaaaaaataccttctttagaatggcttttaaatttgctttattatttttaaaataaagacatacatacatacacaaaaatatagttctattactttttatgtaatacttcttataaagaaagaaaatccaccaataactctcaaagaggtcctgaccttaagtatttaattatttccaaatatcaccaaacgagtggcatcagggcagagaggagaaccacgtgcttgcacagacatgctgaggtcagctagcagtggcaccagagctataacaccatccagtgacataccctgtttgcatcactgacacctttttctttgccttcccattcacctggtgaagggcaggacactggaacagatgggtgtaagaagtgaagtagaaacacattgacaagagttagaatgca

SEQ ID NO: 667331 - DNA, 1306 bp, Homo sapiens
tagttatttattgatttcttgtcatttatttcatgttgtcctgagattggatctaaactttgagctcctaatcatcgctcagattgtgtggcctcgtaagattgtgcgtaataagtaaacaagcatctgtacacttgttaacttaatgagcttctgtatgtgacactttaagcctttttaaaaattaagtgctgggctatgcttggtgtctcatgcctgtaatctaagcactttgggaggctgaggaaggaggttcgctggaacccaggcatttgaaaccagcctgggcagcatagagacctcatctcttttaaaaaatttttaaaatagtaattatatgaaaaaaaaattttaaagaaaaaaagtgctggtcttttttgttaacgttgaacatttaccagagtcagttgcacacagatatttcttgaacttaaaaaaagctaccagccaaaataaccattaacatattgattgctttaatatattaatatactgatagataatatgctgatatctattaatatattttagtcatattatcctattatctaaaactattggtgagcaaaatttgagcattaagagagtagaaatgtacttttgcatgatattaaagtgtgacggtaaaagcaaacaagcaatgaaaatgaccttaaattatatttgaccagaactcacaaaggcagttaggaaatccaggtgtctagagatgactgctgtgtaagaacctagataatcttcatatagaaaaggcaaacatttctacagtgtggctgagtttactgatggtgctgggaactctgctgcccatctgagaaatgccaaggaaggatcttgcttcttcaagtgcttttgagaagggaaggtgttattaagtcatcacctccacagagtaccttccaattatcatgagagctttgtgtgacgcatgagaaaataggcttcacttgcaccagcatgatttccatagagacatgaagaacccaaccactgttattcttctaggggcagagaattgagcttctgtctcattctgtctctgaggaagccacagtgataaagagaatgagactaaggcaagaacagaaaatgcctttgtaactgaaaggatacatatattatctaaagtaatatcctgggaccacgtggctatcacagctaccaaaatatgtgaatttgttagagtttcatgaatatttatgctattccttccccaaacattcagaaaacacttgggagatgcaaagatccatgtctaggtttgtttggcggttaaaataaaaccttgacattaattcctrcagtc

SEQ ID NO: 667332 - DNA, 1328 bp, Homo sapiens
tttttggggggttattttggagacggggtctcactctgttgcccaggctggagtgcagtggtgcaatctcagctcactgcaacctctgcctcctgggctcaagtgatcctcctgcctcagcctcctgagcagctgggaccacagcacacaccaccatacccggctgatacttgtattttttgtggagacggggtttcaccctgktacccagggtggtctcaaacaactgagctcaaatgatccacctgtctcggcctcccaaagtgctgggattacaagcttgagccactgcgctcggccgttttctgtatatttgaaatactgtgtaagagggtttgattaaactgtgagaagaaattcagatgtatttgaggacacagcaaccactacaattcaacttgagagtttgaagttacattttaaaaattaacataaaaatgttcttctccctaaggactgttacctttatcatgtgagagggaagctgtggtccgataaagcctggcgcagcctgtttgttggtgacaacccgctgactgatgacggggcggggagaggactggccggggctatgggtgggatgagtaagttcacctccatttttcacatcatgggacctggaaacaaggagagcgatacttagggtgacacaggacacctccttaggagagattcatttacaaagtcaacagcatttaacccctcaggcggaaacctgatgaaaaaaatagcatgtttatgctacacagtatggagctatacacatcccctccttcaggctaatgtcaggcactcagatcaggagacaacaaggataactgggtaaatgacgttctttaaactgtgttttctgaagatgctgtttcatctgaaaggtatttcttttctgtttatttatattttcctttttttgagacagggtcttgctgcgtcgcccaggctggactgcagaggaacagccattgctcactgtggccttgccctcctgcctcagcctcctgagtagctgggaccacagacatgcaccaccacgcctggctcatttttttattttctgtagaaatggggtctcgctttgttgcccaggcttatatttttctaattataaatatatgccactgtggaaaatctagtgtccaaaaaagttagaaacaaaatcctacccctcaacttggcctgaggcctcctctgatcatcatctgtgcttcagcccaactgccgaaatccaatgccagtgtttaatatttcaatgtgcagacatgagcattctgccagttggacatttgagaatattcttgattttcagctatcaaacattttttccaaaa

SEQ ID NO: 667333 - DNA, 615 bp, Homo sapiens
aagccacatgatcagtttcaacagaaagagagtcatcaacggacttaagtggtatttcaatgttaagtaaaatgaggactaaattaattattgaatttatcgaaagtatgggtaatatgatctttccaagagggtttccatggtctgatgtgaaagaaagactgattatatcagtctcgaagggagagtaggaagaaaaaaaaacgatttttctttcaagccattttctttcatcaaaagtgatggcgttttctatttttaaaagggcaatcattacaatgtatttgtatgctgataagaatgatccaataaagatggatttgccaataatatttgtcaattatggcttcacaagagaactgtgcctatggtttgttgaatttacattgtactgcctcagttatattatatattctgattatcgtaatawacaaattatatcttcttgcattctttttttttaacagttttttttgagacaggttctcactatgttgcctaggctggttttgaactcctcctgcctcagccacccaacgtgctgggattacaggcatgaaccacaatgcctggccaattttttggtggagatgtagtcttttttttttttttttt

SEQ ID NO: 667334 - DNA, 1441 bp, Homo sapiens
atgtgagcctccgtgcccagccacccttgcaatttttaatgaagaaactttcatcctgtaaaatttcccataatctagattttgctaattgcaccctcatggtgttgttaaagatgtacttctaacccctatgtttcctgyaattttgtagttagatgtagaggttccaccacatttagatttaactttctggcgagaacgtttcctaggtggtgtgggatgctcgatcactgagaggccccatctctgcttttcactgcagaagtgaaacctacttcaagtgtgggtgtgtgcaccgtactaccagctggtgatgagataagggacttgtgccaaaatataaatcaattaaatcactaagcacactgctgggttcagctgacattttcccatcgcacaactttctggagtaaggaagaggtgcagctatttgcattctgggaccagaccctcctctcctgggaggccaacacaccatctcagaccagcagaccctagacatgcgctgcacctggagtggcaccgccctggtcatctccttcaccagagcctgcaacaggctgattctagtttgcaaaaatccttttcatgtagtattggctggaatacttctatgcaaaagatcacacactatctgttttgcctgaggtacagtttataaatgaaaggtgggttaaatgcttgagtacttctttttttcaaaacagcattcaaaataatgagatggttcctttgcatcctacaaatatgatgacgaagggttttgttagcacccttgcgaactcagagttagctgttttcatgaatgcttcaagtttctgcccatgaccagctagagacaggctcctaaccctgtctcccagccccagccaccctgcaatagcttcctcgctctccagcatgacagagcactccacacccatcttgcagggtcttccccagacctggagccaagcaccctgccaggactgcttcttttgctgtgaagcaaccccagcctgggccccagaactgttcactgctgggggatctgccaccattgctctaccttgtcagtgggcagagttagatgcaacaggcttaactcacaaatatcttatgaggacatagtcatgcttataaaattgttctgaaacactcctgttttctctcctcgaatatttctgtgacatggttttttttttttattttttgagacggaatcttgctctgtcgcccaggctggagtgcagtggcgtgatctcagcttactgcaacctccgcatcccaggttcaagcgattctcctgcctcagcctcagtcccaagtagctgggactataggcgcacaccaccgtgcctggctaatttttttattttagtagagactgggtttgaccatgttgcccaggctggtcgcaaactcctaagctcaggcaatccacttgccttggcctcccaaa

SEQ ID NO: 667335 - DNA, 1441 bp, Homo sapiens
atgtgagcctccgtgcccagccacccttgcaatttttaatgaagaaactttcatcctgtaaaatttcccataatctagattttgctaattgcaccctcatggtgttgttaaagatgtacttctaacccctatgtttcctgtaattttgtagttagatgtagaggttccaccacatttagatttaactttctggcgagaacgtttcctaggtggtgtgggatgctcgatcactgagaggcyccatctctgcttttcactgcagaagtgaaacctacttcaagtgtgggtgtgtgcaccgtactaccagctggtgatgagataagggacttgtgccaaaatataaatcaattaaatcactaagcacactgctgggttcagctgacattttcccatcgcacaactttctggagtaaggaagaggtgcagctatttgcattctgggaccagaccctcctctcctgggaggccaacacaccatctcagaccagcagaccctagacatgcgctgcacctggagtggcaccgccctggtcatctccttcaccagagcctgcaacaggctgattctagtttgcaaaaatccttttcatgtagtattggctggaatacttctatgcaaaagatcacacactatctgttttgcctgaggtacagtttataaatgaaaggtgggttaaatgcttgagtacttctttttttcaaaacagcattcaaaataatgagatggttcctttgcatcctacaaatatgatgacgaagggttttgttagcacccttgcgaactcagagttagctgttttcatgaatgcttcaagtttctgcccatgaccagctagagacaggctcctaaccctgtctcccagccccagccaccctgcaatagcttcctcgctctccagcatgacagagcactccacacccatcttgcagggtcttccccagacctggagccaagcaccctgccaggactgcttcttttgctgtgaagcaaccccagcctgggccccagaactgttcactgctgggggatctgccaccattgctctaccttgtcagtgggcagagttagatgcaacaggcttaactcacaaatatcttatgaggacatagtcatgcttataaaattgttctgaaacactcctgttttctctcctcgaatatttctgtgacatggttttttttttttattttttgagacggaatcttgctctgtcgcccaggctggagtgcagtggcgtgatctcagcttactgcaacctccgcatcccaggttcaagcgattctcctgcctcagcctcagtcccaagtagctgggactataggcgcacaccaccgtgcctggctaatttttttattttagtagagactgggtttgaccatgttgcccaggctggtcgcaaactcctaagctcaggcaatccacttgccttggcctcccaaa

SEQ ID NO: 667336 - DNA, 1441 bp, Homo sapiens
atgtgagcctccgtgcccagccacccttgcaatttttaatgaagaaactttcatcctgtaaaatttcccataatctagattttgctaattgcaccctcatggtgttgttaaagatgtacttctaacccctatgtttcctgtaattttgtagttagatgtagaggttccaccacatttagatttaactttctggcgagaacgtttcctaggtggtgtgggatgctcgatcactgagaggccccatctctgcttttcactgcagaagtgaaacctacttcaagtgtgggtgtgtgcaccgtactaccagctggtgatgagataagggacttgtgccaaaatataaatcaattaaatcactaagcacactgctgggttcagctgacattttcccatygcacaactttctggagtaaggaagaggtgcagctatttgcattctgggaccagaccctcctctcctgggaggccaacacaccatctcagaccagcagaccctagacatgcgctgcacctggagtggcaccgccctggtcatctccttcaccagagcctgcaacaggctgattctagtttgcaaaaatccttttcatgtagtattggctggaatacttctatgcaaaagatcacacactatctgttttgcctgaggtacagtttataaatgaaaggtgggttaaatgcttgagtacttctttttttcaaaacagcattcaaaataatgagatggttcctttgcatcctacaaatatgatgacgaagggttttgttagcacccttgcgaactcagagttagctgttttcatgaatgcttcaagtttctgcccatgaccagctagagacaggctcctaaccctgtctcccagccccagccaccctgcaatagcttcctcgctctccagcatgacagagcactccacacccatcttgcagggtcttccccagacctggagccaagcaccctgccaggactgcttcttttgctgtgaagcaaccccagcctgggccccagaactgttcactgctgggggatctgccaccattgctctaccttgtcagtgggcagagttagatgcaacaggcttaactcacaaatatcttatgaggacatagtcatgcttataaaattgttctgaaacactcctgttttctctcctcgaatatttctgtgacatggttttttttttttattttttgagacggaatcttgctctgtcgcccaggctggagtgcagtggcgtgatctcagcttactgcaacctccgcatcccaggttcaagcgattctcctgcctcagcctcagtcccaagtagctgggactataggcgcacaccaccgtgcctggctaatttttttattttagtagagactgggtttgaccatgttgcccaggctggtcgcaaactcctaagctcaggcaatccacttgccttggcctcccaaa

SEQ ID NO: 667337 - DNA, 648 bp, Homo sapiens
cagtgtttctgttgctaagctgaggcacttatgggtaaacgataatttcctgtcctaatgattctcaattcccttctgcccaaaacaaacctgtcactaatgaaaaccaaagctggcgtagtcagaagtggctgaaatgcaccaaaaaaaacacaacaaaacatacttaaaatcttgtattttggtttggaaatgaaagaaaagaatttctcaagacagtaaatcattstaggagtcttttgtctctgctttagccacccactgttgatgcaagataactcacttaacctttatgagtttcaccagtcacagcggcagcagtaaaactcccctttcctcacttaagattcaattaaaaaaatgaaaaatttgaagtaataatattgagaaactgacattcccctttcattagtatgaactgttttgtccagatgatttgaacaccagtcccatcataaaggggctgactgtgcctggctgaacaacatatgaatatcttttgctctacatattgcatgaaaaagctcaaaatccagaaatctcaacaagagttttcattatgactgcacacagcaagttagattgcagatgagtgtgtttatattttagatataccaccccaacccaccaaaaattctttcttctaac

SEQ ID NO: 667338 - DNA, 1263 bp, Homo sapiens
tatcctacaacactcagagaagggcatttaaatttttttcawcttttattacagattcagggggtacatatgcatgtctgttacaaaggtatattgggtgatgctgagatgcaaatgtaaaagaatccagttttctttaattttaaagttctattttttaaaagtttcatatatctaagtagattttccatttactcaataaagtgttactttattacctaagtaattcaagctttaaaaaatactacataataaaatgtataaaagaaaatgtgaccccccccagccacctgccagcagcattccagtccccagcagcagctgtggagtgaagccctgttaacctgattcccaggtagtttctgtgcatatacaagttgttttgttgtgttgtgtttttaaagaaacgagaacatactgtacaaaatgttctatagaatatttcaccttcaagtactacataaaagccgaagggaaatcaggagagagaaaggtaacatcatctttatgataaagacgctgccgtggctgccagcctcccctcgagaactgcgaggcaatcaggcaatgatgaggctgctgaagacaaaacccagataaataccactggtttttaagaggcctgaaatcactggttctgggtagaaatttctgctgaattggtcaatgctgaaatcaaaagctgaatgactgttaggagaatgagagtgggtgtatgatcccaagaatgctgatacgtgtcgttcgcctctgtcttttcttgtctcaggctcttgtgtaggactctgctagtgcactggaagactctagcattttaaatctagctgaatttgagttgctcctcatagagaccaatgctgcaaggttgctgacttggggaaaaatctctctcctagcagcttctgacctcctcggagccttccatctctctcccctctgctcactctctgtcacctgctctgagggccctcctgcccagaactgtcacttaccccacaatccttgcagctctgttgccatgacagacacagcctcaaaagggctcttagagaaagaatagtagcattgggggaccctgagactgatgacttagaaggcacaaatccaaattagagatctgcagtttaccagctaggtgaggccaaacagctggctatgttcccttaacctccctttcaccagctgtaagatgggagtaataccaccttctctaagtgcaaggatgtcataaactccaaatgagtaaaatgtactaaaatgtta

SEQ ID NO: 667339 - DNA, 1322 bp, Homo sapiens
gattatttccttctgaaggaagaatgtttttatttcttcaactgaaggtttgttgatgacaaactttcaggtttcgtttggctgaaaatgtatttatttcaatgtattattaacatatatctttttcttggatattgatattttyagtttgatggtttcttattccccagctttccagaatttttagatatttcatcatctggctgggcacggtggctcatgcctgtaatcccagcactttgggaggccaaggcgggaggatcacgaggtcaggagtttgagaccagtctggccaacatagtgaaaccctgtctatactaaaaatacaaaaaaaaaattagccgggcgtggtggtgtgcacctgtaatctcatcaactattcaggaggctgagacaggagaatcgcatgaacccgggaggcagaggttgcagtgagctgagattgtgccagcctgggaaacagaatgagactgtctcagaaaaaaaaaaaagatatttcattatcttctgtcttcattaatcttgcagagaagttagcttcatttcttattgttgctttttggaaggtctcggttttattttattttctctctctcttaaggatcttctcttagtctgaacttttcaactttttaacatggtgttattaggcgtattttttggaatgtattcttcctaaacctctagtactttttaaatctgtggcttgataactttaaacaatcttagaaaattatcaaccattatcccttcgattattatttctttgtcactatcattgtcctcctgggatcccaaatatatgtaatcatttgcactgtatctgacatacatcatttttttctgggtgtctcatccttttgtcttttcatacatcagtctggataatttgttctgactcatcttctagttcactaatttttttttggtcagctacttataatctgcaccttctatttcctttatctatccatctctctattatttatattgtctgtactttcttttattttctgccacatgttcttgtcttttcaaatcactgatcattttttagtgctagatattgtatatgaaatgctatccaagtggtttgaagcattacatgatgctatcttcctgcaggggtacttaggatccctgatcaccttaatccaatcagagatcaaaatgattctaagctgagcttcagtcttgtgaggcatggtctgtttaatgttcactcttactcttggcttgtagctttgtagagcccaagagaaaagctgggagttgatccgtgcccttcctcccttgtggtccttgaactccagtttttttgg

SEQ ID NO: 667340 - DNA, 1322 bp, Homo sapiens
gattatttccttctgaaggaagaatgtttttatttcttcaactgaaggtttgttgatgacaaactttcaggtttcgtttggctgaaaatgtatttatttcaatgtattattaacatatatctttttcttggatattgatatttttagtttgatggtttcttattccccagctttccagaatttttagatatttcatcatctggctgggcacggtggctcatgcctgtaatcccagcactttgggaggccaaggcgggaggatcacgaggtcaggagtttgagaccagtctggccaacatagtgaaaccctgtctatactaaaaatacaaaaaaaaaattagccgggcgtggtggtgtgcacctgtaatctcatcaactattcaggaggctgagacaggagaatcgcatgaacccgggaggcagaggttgcagtgagctgagattgtgccagcctgggmaacagaatgagactgtctcagaaaaaaaaaaaagatatttcattatcttctgtcttcattaatcttgcagagaagttagcttcatttcttattgttgctttttggaaggtctcggttttattttattttctctctctcttaaggatcttctcttagtctgaacttttcaactttttaacatggtgttattaggcgtattttttggaatgtattcttcctaaacctctagtactttttaaatctgtggcttgataactttaaacaatcttagaaaattatcaaccattatcccttcgattattatttctttgtcactatcattgtcctcctgggatcccaaatatatgtaatcatttgcactgtatctgacatacatcatttttttctgggtgtctcatccttttgtcttttcatacatcagtctggataatttgttctgactcatcttctagttcactaatttttttttggtcagctacttataatctgcaccttctatttcctttatctatccatctctctattatttatattgtctgtactttcttttattttctgccacatgttcttgtcttttcaaatcactgatcattttttagtgctagatattgtatatgaaatgctatccaagtggtttgaagcattacatgatgctatcttcctgcaggggtacttaggatccctgatcaccttaatccaatcagagatcaaaatgattctaagctgagcttcagtcttgtgaggcatggtctgtttaatgttcactcttactcttggcttgtagctttgtagagcccaagagaaaagctgggagttgatccgtgcccttcctcccttgtggtccttgaactccagtttttttgg

SEQ ID NO: 667341 - DNA, 1085 bp, Homo sapiens
aaaaaatgcaggatttttaacacatacggccaagagaagttgaaaaacatagctaaaatgcgcttaaaacaaaacaacactaaacattagcataggttttgtacatcctagttcctctccctctccttctctttctctcttttgttcaaatgctggaagtgaacaacaattgttttgatattaaaataactacacagtgtcaacaatgtttccttcattgagttttgaggctacagcaatgacaagaaaaaatggactttcacgttaagaatctcaccaactaaaagggagctatagcatcttttataatattaagttgcatttgctgactgctacctatttacactcaactatacacttacaaagttctacctgcttttttgtattaactattttaacactcacaaccaacattgaaggagttaaatatcttgcctcaaatcaaagaattaataaatggtaaaggcaatatttgaagcagacagtgtatttctggagactattctctcacccactacatgctattaacattcaaccatgctatgagataaacaaagaagttctctcctggtttgacttctgtggcatctgtttcttttcttttttttttttaacctttccccttctcttctctactttttactttcctctcctgattcactttcatctgcctgcctgttgaatatcaatgttccacagtttatttcctcggccttagtttcttcaaattctggaattccatccagaaagaaacatcatttattgccagtttcagtcaccatatgtctttctttctggggaacwcatctacctgcatttccagaggcaatttcaacttatctggtctgtcatttaactctatatctttcttccaaagcttgtttctcctaccacgaaagttggacctttcactcaacttgaagtcttgtcagcacctttgaccagctttacaccctaatcctccacaacaaatgcacagtgacctcctgtctctcatacccttcccctccactcccctaacattaccttggctcagctctcatctcttacctgaattgttgtaacatcccccagtttcacccatc

SEQ ID NO: 667342 - DNA, 1085 bp, Homo sapiens
aaaaaatgcaggatttttaacacatacggccaagagaagttgaaaaacatagctaaaatgcgcttaaaacaaaacaacactaaacattagcataggttttgtacatcctagttcctctccctctccttctctttctctcttttgttcaaatgctggaagtgaacaacaattgttttgatattaaaataactacacagtgtcaacaatgtttccttcattgagttttgaggctacagcaatgacaagaaaaaatggactttcacgttaagaatctcaccaactaaaagggagctatagcatcttttataatattaagttgcatttgctgactgctacctatttacactcaactatacacttacaaagttctacctgcttttttgtattaactattttaacactcacaaccaacattgaaggagttaaatatcttgcctcaaatcaaagaattaataaatggtaaaggcaatatttgaagcagacagtgtatttctggagactattctctcacccactacatgctattaacattcaaccatgctatgagataaacaaagaagttctctcctggtttgacttctgtggcatctgtttcttttcttttttttttttaacctttccccttctcttctctactttttactttcctctcctgattcactttcatctgcctgcctgttgaatatcaatgttccacagtttatttcctcggccttagtttcttcaaattctggaattccatccagaaagaaacatcatttattgccagtttcagtcaccatatgtctttctttctggggaacacatctacctgcatttccagaggcaatttcaacttatctggtctgtcatttaactctatatctttcttccaaagcttgtttctcctaccaygaaagttggacctttcactcaacttgaagtcttgtcagcacctttgaccagctttacaccctaatcctccacaacaaatgcacagtgacctcctgtctctcatacccttcccctccactcccctaacattaccttggctcagctctcatctcttacctgaattgttgtaacatcccccagtttcacccatc

SEQ ID NO: 667343 - DNA, 1085 bp, Homo sapiens
aaaaaatgcaggatttttaacacatacggccaagagaagttgaaaaacatagctaaaatgcgcttaaaacaaaacaacactaaacattagcataggttttgtacatcctagttcctctccctctccttctctttctctcttttgttcaaatgctggaagtgaacaacaattgttttgatattaaaataactacacagtgtcaacaatgtttccttcattgagttttgaggctacagcaatgacaagaaaaaatggactttcacgttaagaatctcaccaactaaaagggagctatagcatcttttataatattaagttgcatttgctgactgctacctatttacactcaactatacacttacaaagttctacctgcttttttgtattaactattttaacactcacaaccaacattgaaggagttaaatatcttgcctcaaatcaaagaattaataaatggtaaaggcaatatttgaagcagacagtgtatttctggagactattctctcacccactacatgctattaacattcaaccatgctatgagataaacaaagaagttctctcctggtttgacttctgtggcatctgtttcttttcttttttttttttaacctttccccttctcttctctactttttactttcctctcctgattcactttcatctgcctgcctgttgaatatcaatgttccacagtttatttcctcggccttagtttcttcaaattctggaattccatccagaaagaaacatcatttattgccagtttcagtcaccatatgtctttctttctggggaacacatctacctgcatttccagaggcaatttcaacttatctggtctgtcatttaactctatatctttcttccaaagcttgtttctcctaccacgaaagttggaccttycactcaacttgaagtcttgtcagcacctttgaccagctttacaccctaatcctccacaacaaatgcacagtgacctcctgtctctcatacccttcccctccactcccctaacattaccttggctcagctctcatctcttacctgaattgttgtaacatcccccagtttcacccatc

SEQ ID NO: 667344 - DNA, 1085 bp, Homo sapiens
aaaaaatgcaggatttttaacacatacggccaagagaagttgaaaaacatagctaaaatgcgcttaaaacaaaacaacactaaacattagcataggttttgtacatcctagttcctctccctctccttctctttctctcttttgttcaaatgctggaagtgaacaacaattgttttgatattaaaataactacacagtgtcaacaatgtttccttcattgagttttgaggctacagcaatgacaagaaaaaatggactttcacgttaagaatctcaccaactaaaagggagctatagcatcttttataatattaagttgcatttgctgactgctacctatttacactcaactatacacttacaaagttctacctgcttttttgtattaactattttaacactcacaaccaacattgaaggagttaaatatcttgcctcaaatcaaagaattaataaatggtaaaggcaatatttgaagcagacagtgtatttctggagactattctctcacccactacatgctattaacattcaaccatgctatgagataaacaaagaagttctctcctggtttgacttctgtggcatctgtttcttttcttttttttttttaacctttccccttctcttctctactttttactttcctctcctgattcactttcatctgcctgcctgttgaatatcaatgttccacagtttatttcctcggccttagtttcttcaaattctggaattccatccagaaagaaacatcatttattgccagtttcagtcaccatatgtctttctttctggggaacacatctacctgcatttccagaggcaatttcaacttatctggtctgtcatttaactctatatctttcttccaaagcttgtttctcctaccacgaaagttggacctttcactcaacttgaagtcttgtcagcacctttgaccagctttacaccctaatcctccacaacaaatgcacagtgacctcctgtctctcatacccttcccctccactccmctaacattaccttggctcagctctcatctcttacctgaattgttgtaacatcccccagtttcacccatc

SEQ ID NO: 667345 - DNA, 639 bp, Homo sapiens
aaacctccatttgtagtttgtaatgtatgtagggagatggcccacaaagcctcaatcttgccaaagtggtgtggagaagctggttagcagaaggtctcaagtacctggacactaactagcccaagtatggatgctgagccaagcaatgcttgaagaccttagatacttttgcaagaaaatctgaaccaagtttaatcaaaagtgacctgggatggcaacagaagggggccaaaatatgatgcataacggaacatctttacatttcttgatttgtccccgacactcagatggagtggcacttgcatcttcctgggaagtcttttccttctcacctcctgctttgatgttggtcacaccctgctatttgcttataygatgccttatttttcacatagcttttccacataacttaccctctttacaaaataatagctaccatttctggtgtgcttactgcgtgccagcatgtgaatgagcctgtgaatgagcaaaatgctgactcttatcctttttcttttagataggtgcgtgatttgagcaatgaatgaaagtttgggttctgagccaggtctgctggctccagtgtagatgccccttagatgccgcacatgcaatctcaccctttgctcttccttcaag

SEQ ID NO: 667346 - DNA, 1175 bp, Homo sapiens
ggaggttgcagtgagccgagatagcaccactgttctccagcctgggagacaagagcaatgtggggtagggggaggggggagggatagcattaggagatatacgtaatgctaaatgacgagttaatgggtgcagcacaccagcatggcacatgtatacatatgtaagtaatctgcacattgtgcacatgtaccctaaaactwaaagtataataataatttttaaaaaatctactttcttcactcgactgtagggtggtggaagaggtcaggggaactgtctgccctgtttgccatcctgtccctagtgcctaacatggagtaaaccctaaacattcatggaatggatagcactgctgttcacagatagatgccttacctactttcatttccttaagagtgttgtggtgtagttaaaaaaagaaagccattttattctacattattctacaacacaaagggttgtgctccagtgaaacttgaagtgccttttgtggagtgtgctttgggtaaagttcatttaaatcaggtacttataaatgtcaggtcgattacaaatatggtgtcccatgttcttttctaatctaaacgagatgttttaaacgagtctcattctatccagtaagaataaggaaagaggcaagtaatcttatttttgggaccaagcggccacgaggtcataagacctaaaaatgtttacactcccaggcagcacctgctcgttaattatctgggagactggtaaggatttaaaagtaattttttccttaagcccaggaatcatttaaaaaatctgtataacatttttttctcatgtagtcttagccccgaagaatattaagtctatcaattaggttataattcaaatcttatcaagaaataaatgcttatataaatcaagattaaaaaaattttcaaagcagcgttttttaaacagtgacgttttaaaatccccatcaaaatggtaaaattcattgtgatgttgacctctcatgctgtcagccacaggaaggggcaaaacgacttgaggcttgaagccgtgtctttccagaagctcaggttcaccaaacatggtctccagatggagtctgttcctcagaacctgggctttacttctcgatgggagaaggaagcagtgttaaaacttgtctattctgaactagccaaccagattaaag

SEQ ID NO: 667347 - DNA, 1175 bp, Homo sapiens
ggaggttgcagtgagccgagatagcaccactgttctccagcctgggagacaagagcaatgtggggtagggggaggggggagggatagcattaggagatatacgtaatgctaaatgacgagttaatgggtgcagcacaccagcatggcacatgtatacatatgtaagtaatctgcacattgtgcacatgtaccctaaaacttaaagtataataataatttttaaaaaatctactttcttcactcgactgtagggtggtggaagaggtcaggggaacygtctgccctgtttgccatcctgtccctagtgcctaacatggagtaaaccctaaacattcatggaatggatagcactgctgttcacagatagatgccttacctactttcatttccttaagagtgttgtggtgtagttaaaaaaagaaagccattttattctacattattctacaacacaaagggttgtgctccagtgaaacttgaagtgccttttgtggagtgtgctttgggtaaagttcatttaaatcaggtacttataaatgtcaggtcgattacaaatatggtgtcccatgttcttttctaatctaaacgagatgttttaaacgagtctcattctatccagtaagaataaggaaagaggcaagtaatcttatttttgggaccaagcggccacgaggtcataagacctaaaaatgtttacactcccaggcagcacctgctcgttaattatctgggagactggtaaggatttaaaagtaattttttccttaagcccaggaatcatttaaaaaatctgtataacatttttttctcatgtagtcttagccccgaagaatattaagtctatcaattaggttataattcaaatcttatcaagaaataaatgcttatataaatcaagattaaaaaaattttcaaagcagcgttttttaaacagtgacgttttaaaatccccatcaaaatggtaaaattcattgtgatgttgacctctcatgctgtcagccacaggaaggggcaaaacgacttgaggcttgaagccgtgtctttccagaagctcaggttcaccaaacatggtctccagatggagtctgttcctcagaacctgggctttacttctcgatgggagaaggaagcagtgttaaaacttgtctattctgaactagccaaccagattaaag

SEQ ID NO: 667348 - DNA, 2538 bp, Homo sapiens
cattatgacaccacaggggtgtgagaaataaggaatattatatgctgggattcaccaaacatatatttaagctgatcaattagggacacttccacagaacacttgagaagtgtacattcagctaaagtgccattgtcattgtgtacctgctcaattgtcagtcaagtttaagagcgtgataaatatttgtagtataatggtataaatccctctgatgacttacatgaaaaacatgcaggagcattaatcacctgctttgacattgattcccaagcgtatgagttgctgctctgattttagaycacatttgtcctcatcacttggcatatccacattgatatagacactgttttattgtagtaatagacatatgaagaataacatcacatatgaaattggaagtgtttgttccgtgaagactatacttctgttttctacagtgtaattctgtcatgttcctgtcccaatacacaaagtagaaaacatcaaagcctatgctaattcaggcaggaggatacagcttgatgctaacactgcatgaaggtatggataactttatcatatttacatatgagtgattatgtatcccttttggttttcagtgtcttctcagaaacaaccggccttgaaggtattacactcttcattcatattttgaattattaactgtatagtctatgaaatatactgtatgtattgattattttgtttgaaatcccattcaggatacaagtgacaagaaagattctgttttgaacatagccacagaaataaaagatgaacaaaaatctgggacaggtaattttgcaatacacatttaatgtcatgttctctcaagatagaggagaacttcccttccccgaataaatcagcagggggctcattgaagctgctctttctgattcagcgggcctgagattctgcatttgtaataagttctggagtgatggtgattctgctgatttttggccatgatctgagtagtaagattatagacttccctacattgaaattgggaagaagaaccactggagagcagttcaagacataacaggctgaggggacagcataattgtgctttaattctacagcatgtttccatcaagaggggaaggagaacaagatgaagtactagaaattataggcgccagatcacattgctaaaaccagagggaggaagtgatcgtaataagccataaacactatagaaggagaagtaacgagaccgctgatgtagtaatcattttcctcagggaagagggattgtgaggcaggaagaagggaaaagaagttatttatttaattttagggtttgtactgaggaaacctgagggaactcacgtcagatgcatttagaatgtttgcataaaggaagatttgattttggctgctccaggaactactggaaggaggatagagtgccagaattgtgataaaccacagtcacctgttacccctctttgttattattgggcatcagagatatatgttttgttgttatcagttagtcaaatgagataaatataaatatgcatacactggctttgttgttcagagagctaacttttggataaaatagcaatttaatgaaaatactttagagaataaaatgatccttcaaaccagacttattttagaaacaaaaataatgttaaattctttaattgactcctaaaatatttatttttaatgaatattggagtgatttccaaatgaacaaccttactcatatctaatgcttgtagcaactttattgcatgtaagtatatcaaatttgataattttttatacattttgattaggtttgtatattataccttgttcccatgagtgactgacaaaactttctgaaggttaaaccagaaaatacaaaagtgtaggctcattattataccacatgggtatgaaaaataatgaataccatataataggattcaccaaacagatatccaagctgaccaattcgggacacttccactgaggagctttgtacattcatctaaagtgttattgtcattgtgcacctgctcaattgtcaggcaagtcaaagagcatgatgaatatttgtagtataatggtttaaacccttctgatgtcttgtatgaaagacatgcgcaatcctggctcacttcaactttcaccttctgggttcaagtgattctcctgtctcagtctcctgagtagctgagtttacaggtgtgcaccaccaacctggtaatttttgtatttttactagagacaggctttcaccatgttggccaggttggtctcaaactcctgacctcaagggatccacccacctcggcctcacaaagtgctgggattacaggcatgacccaccgagccctgcctacatgatttttttaaatttttttagctttttaaaaataaagatagaatgtttctgtgttgcccaaggtggtctgaaatgcctggacttctcaagtgatacttctgcctgaaccttttgagtagctgagattataggaacaagtcactgtgctcttttatgtttttaatattttataagttcctatt

SEQ ID NO: 667349 - DNA, 631 bp, Homo sapiens
ttactcctctgttttttcacgtatcatgctttataaacttaaacagtctattaaaaactggttcagcatacaaaaaattttgatcttcaacactttgtcatattgcaacccccttaaattgttttagaaaattgtgaaatagagcacttgytattgtgtcagaaaacaaaacatgcttagacctcaataaaccacaaaagtccgtgagcatgatcatattttaaaaactttttagctgaataagaaacgttgaacatcttcactatacatactatataatacatggaaaagattcctctttaacaaataaaattaatttccaaagtgttttatgattatatttttcattaatatctgcatttataatgtgacacttggattatattatttgttaatataaaaatgtaaaataaacattgaaatgcctcatatttctacattgttattaaggaaacaaattgagaataagttagatagtttattcactgaagaaaggtaagataaatctctctcaatatgctttatatggatgtcaaactcttcactctaatcttaggggagtcatgactttgaagtgcttaaaggatcatagcttcttctgtttactaatactataattaagatactcaga

SEQ ID NO: 667350 - DNA, 631 bp, Homo sapiens
ttactcctctgttttttcacgtatcatgctttataaacttaaacagtctattaaaaactggttcagcatacaaaaaattttgatcttcaacactttgtcatattgcaacccccttaaattgttttagaaaattgtgaaatagagcacttgctattgtgtcagaaaacaaaacatgcttagacctcaataaaccacaaaagtccgtgagcatgatcatattttaaaaactttttagctgaataagaaacgttgaacatcttcactatacatactatataatacatggaaaagattcctctttaacaaatraaattaatttccaaagtgttttatgattatatttttcattaatatctgcatttataatgtgacacttggattatattatttgttaatataaaaatgtaaaataaacattgaaatgcctcatatttctacattgttattaaggaaacaaattgagaataagttagatagtttattcactgaagaaaggtaagataaatctctctcaatatgctttatatggatgtcaaactcttcactctaatcttaggggagtcatgactttgaagtgcttaaaggatcatagcttcttctgtttactaatactataattaagatactcaga

SEQ ID NO: 667351 - DNA, 631 bp, Homo sapiens
ttactcctctgttttttcacgtatcatgctttataaacttaaacagtctattaaaaactggttcagcatacaaaaaattttgatcttcaacactttgtcatattgcaacccccttaaattgttttagaaaattgtgaaatagagcacttgctattgtgtcagaaaacaaaacatgcttagacctcaataaaccacaaaagtccgtgagcatgatcatattttaaaaactttttagctgaataagaaacgttgaacatcttcactatacatactatataatacatggaaaagattcctctttaacaaataaaattaatttccaaagtgttttatgattatatttttcattaatatctgcatttataatgtgacacttggattatattatttgttaatataaaaatgtaaaataaacattgaaatgcctcatatttctacattgttattaaggaaacaaattgagaataagttagatagtttattcactgaagaaaggtaagataaatctctctcaatatgctttatatggatgtcaaamtcttcactctaatcttaggggagtcatgactttgaagtgcttaaaggatcatagcttcttctgtttactaatactataattaagatactcaga

SEQ ID NO: 667352 - DNA, 570 bp, Homo sapiens
taaattacccagtctcatccaaaaacaccygaacagaaatacccgcaatagtgttagaccaaatatctgggcaccctgttgtctagtcaaggtaacacataaaattcaccattgcagaagtgaaactggttataagaaagcaccctgggagaatggtactttgggaatgccaattttaaagaattgtaaagaactgttcagactgtgtcagattagccagatgtgagcaacaatcccacagtcagaagatgggatgataaagtatccccctcagaactgcatcacatctgtgcttgctaatcaaatttgatgctcacacccgtatttatactgaatggccccttctgttcaagagccaagtttggaattctattgatatccagaagaccaaagaggaagaccaagaagcaccagccattctgtgtcctggtatttgtaaactaggggagacctttcttctttgaaggataaacaggaaaataaaaccccgtagaatattgcaaagaaaatgtctgcactgtaaaaggagggatactttgtaaacatacagaataacactaaaggggttat

SEQ ID NO: 667353 - DNA, 1374 bp, Homo sapiens
tttttccttctggatacgggtgtcttaaggtgtttaactcaatgggataaatataatccactctatttacatctaaccattttagaattcttatgtgtgtttaatctatgtgtggcttatttttataagtgctgctgggtgagcatgtagcttttttacatctccaatagataggcagttgccccaattgtattgaatatcccatccttagcccaagtgatttagcacaagtttcacgctaaattcccaygtagacctgggcatatatatggactcccagtccattccattgatctagactctattctatttatggctagtactgcataggtatatgtgtgtcttgatatttgataactctttgttctttttcaatcttggatcttcctatttttttttttttttgccacatgtattttaggatcaatttagcgattccatgagaatcttgttaggatttgtttattagtaatcagggaaatgcaacttaaaactataggatgctattttaaatctatctaattggcaaaatattcacatttgatggtattgagggttggagagaatttagtaagaaaaggtcttctatattattagagtaactttttcttttaaaaggcaggatgttattcagttgcccaggctggagtacagtggtgcaatcatagcttactgcatcctcgaactcctaggctcaatggatcctcccacttcagcctcctaagtggctggggctataggcgcatgccaccacacctctgtcattgttttgtagagatagggtctatgatgcccaggttagtctcagactcccagcctcaagcaatcctcccgcccaggccttccaaagcactgggattagagaattgagccatcgcactcaacccgtactagcaacttttaaaggtgatatgacaatgtctattaaagctgaaaatgtgcatggcctacaacttggcaattctgcttcctagaatctctcctagaaaaagcctcacacctgcgtgcatggaggcaagaacacatatgttgcctgaaggattcttgtgaaaggaaaaagtactggaatcaaatgtccatcattagaaaaactaaggaaaatatccttacatggaatctatgccatatatcaagagatctgagtgcgtaatatactgacatactgtttttgttgttgttttttcttggagatggagtcttggtctgtcacccaggctggagtgcagtggcacattctcggctcactgcaacctccgcctcccgggttcaagcgattctcctgcctcatcctcaagagtagctgggattacaggcgcataccaccacacccagctaatttttgtatttttttagtagagatggggttttgccatg

SEQ ID NO: 667354 - DNA, 648 bp, Homo sapiens
aaggaaaaaatgggaggtctttctgccaggaatgagactgtctgcagagtgaattagcagtggtagatggattcattaaaaggcatccctctaggccaggygcggtgtttcaatcccagcagtttgggaggccgaggcgggcggatcacctgaggtcaggagttcgagaccaggctggccaacatggtgaaaccctgtctctactaaaaataccaaattagctaggcgtggttggcgcatgcctgtaattccagctattctggaggctgaggaaggagaatcgcttgaacccgggaggagaagttgcggtgagcggagatcgcacccttgcactccgcctgggcaacaagagcgaaactccgtctcaaaaaacagaaacaaaaaacaaaaaacatccctcctcctgtactgccagggcactgcttttcattttccatctttcagctgtgagtgaaatgaagacacccatctgcccaatggtagtcttgaggttgcgggatgcttgaccacaaaatgcaatctacaggttacatgtaccttctgcagcttttgcttttagctaaagctttttctgtaacctcattttggcagtgcaggcaaggagggagtgttgacctgtcagtgtagtagagactcccaggtgtcctg

SEQ ID NO: 667355 - DNA, 648 bp, Homo sapiens
aaggaaaaaatgggaggtctttctgccaggaatgagactgtctgcagagtgaattagcagtggtagatggattcattaaaaggcatccctctaggccaggtgcggtgtttcaatcccagcagtttgggaggccgaggcgggcggatcacctgaggtcaggagttcgagaccaggctggccaacatggtgaaaccctgtctctactaaaaataccaaattagctaggcgtggttggcgcatgcctgtaattccagctattctggaggctgaggaaggagaatcgcttgaacccgggaggagaagttgcggtgagcggagatcgcacccttgcactccrcctgggcaacaagagcgaaactccgtctcaaaaaacagaaacaaaaaacaaaaaacatccctcctcctgtactgccagggcactgcttttcattttccatctttcagctgtgagtgaaatgaagacacccatctgcccaatggtagtcttgaggttgcgggatgcttgaccacaaaatgcaatctacaggttacatgtaccttctgcagcttttgcttttagctaaagctttttctgtaacctcattttggcagtgcaggcaaggagggagtgttgacctgtcagtgtagtagagactcccaggtgtcctg

SEQ ID NO: 667356 - DNA, 616 bp, Homo sapiens
aagcgaatctgaggcttgttcctaagacaggttgtttcccagataggaaaattactgtatgagaaattctgctcccctacgcagattgtgtagttccctcctttgacagtatgttgaggactgctcctttttttttctctctctcccagagtaacatttgaaatcattttgaaatacttaatgactactcctctttgtagcagcttttacacttgacactgtatcctctaggtaggtgtaatgaggaagatgactctttttccccatcaggagtgtaagagctgatgggtccagagcccaaagaagggagctgagttattactacctgacagttttatagagtgcttcctctgcagagtgtgaggcacatcataaactgttaattaatagccggtattcttcaatacacccctagagatcagaactgctgmtgatgatcctaacacccttgcttctacctgagaaaaaataagccccatacacagtaaaaatggagagaaaatacaaaggaccagtaggaataaatgtttatatttagtcagaagaattgtctctctattttaggggatcagaacgctttggagaaatattagaggtttaaaaaaaaaagtgaaga

SEQ ID NO: 667357 - DNA, 737 bp, Homo sapiens
aacatgcccagtgatgtcttaaaaacaaatcaacaaaacttagaaagaaacgaccagaaacagctagacagtttgccaaacattcagatgccaagaattctgtacagcaattcagctcttttactagaataaaatatgcaggagtagggacattagtcttttgaaatrcttttcaccacatgtagttatgctagcaatttttgttaaagttaatgaaaaatctgttacagaccctaggcactatcacagatatgccgttcttggatccctctctcaggccaatagggctgccgtactggctggcacgctcttcggagaagttttgtggaatttgagatggtaattcttcgtgtaggtaatgcaagcaaagcctatgttaccagagaactaggaaatatgaaaatttgtcatttattcttttttttctatttcttcccaaaagtcatgagtaataatgtatactttaatttgctatgcatattactttactacttttatgccttttactttccagtttctacaatatatgaaaatattctaggaccttatatttagagctttcatcttacagattctttcttatccataaagaaatttacattgccctcaggtttaccctaacacaatttgcaagtatgattcgggtagggagaaaggtaacaagttttcaccttaaatttgctcaggttaaaaaaaaaatacacacaatgagggccaagaaaaaaacattgattgat

SEQ ID NO: 667358 - DNA, 1214 bp, Homo sapiens
tgaaaaatagcccaaaactctcaccttcaatataaaacactctccaccttcagccaggtagtttcaggtaatagatgayaatgggatagacagaagcaaagtctcaaaaaattctggatcaagggtttatgttcacaacagaacctagtaatacaggttcatttttgaatgcagagtaagaagttgtggttgaagtttatcaactagagggtccataaaaacatatacattataaaagtagactttcatccaagaaacagaaatatatacatcacatcatttcctgaacattaggaatccatttttgaaaattcagaggttctgcatgaaaatactaactgggggcctatattagtttcatgtggctgctgtaacaaattaccacaaactgggtggcttaaaacagaaatttattctcccacagttctgcaggccagaaatctgaaatcggtatcgctggacctaaaacaaggtgttagcatcgttgcactctccagagtctctacaggataatccatttattgtcttttccagtttctggttgctatcagcattccttggcttgtgaccatataatccaacctctgtctccctgtacgcagccttctcctctctgtgcatgtctaatttacctctgcctcacttttataaagatacatgtaattgcctttagggtccactcagataattcagaataacctcctcatctccagaccattaacttaatcatatctacaaacaccttttttccaaatagcgaaacatttaaaagttacagaaattaggatttattatagtatctagagaatattattcagcctaatacaggatgtattttctgttaagttggaaaaatgataacaggctacatgtataaaccaagactctcaggcgataccatatgactaaaacatggtaaaacactttcgtgtaagaaatacactaccatgtaaatatataaaatatgtacttaaaatgctacttcctgaccattatcttatgaatatagttattaaaatggagttttattgtttgtgtgtgtgtgtttatactctactaggagagtataaaccaggaatatattctgtggggcatgcctgtaatgagaatgttgttttctgagaattgcctatagctgtgtcataatgacaaacatgataaatgggagagaagcagttgttccttagagagaaagaatgaacagatgaccaatg

SEQ ID NO: 667359 - DNA, 1214 bp, Homo sapiens
tgaaaaatagcccaaaactctcaccttcaatataaaacactctccaccttcagccaggtagtttcaggtaatagatgacaatgggatagacagaagcaaagtctcaaaaaattctggatcaagggtttatgttcacaacagaacctagtaatacaggttcatttttgaatgcagagtaagaagttgtggttgaagtttatcaactagagggtccataaaaacatatacattataaaagtagactttcatccaagaaacagaaatatatacatcacatcatttcctgaacattaggamtccatttttgaaaattcagaggttctgcatgaaaatactaactgggggcctatattagtttcatgtggctgctgtaacaaattaccacaaactgggtggcttaaaacagaaatttattctcccacagttctgcaggccagaaatctgaaatcggtatcgctggacctaaaacaaggtgttagcatcgttgcactctccagagtctctacaggataatccatttattgtcttttccagtttctggttgctatcagcattccttggcttgtgaccatataatccaacctctgtctccctgtacgcagccttctcctctctgtgcatgtctaatttacctctgcctcacttttataaagatacatgtaattgcctttagggtccactcagataattcagaataacctcctcatctccagaccattaacttaatcatatctacaaacaccttttttccaaatagcgaaacatttaaaagttacagaaattaggatttattatagtatctagagaatattattcagcctaatacaggatgtattttctgttaagttggaaaaatgataacaggctacatgtataaaccaagactctcaggcgataccatatgactaaaacatggtaaaacactttcgtgtaagaaatacactaccatgtaaatatataaaatatgtacttaaaatgctacttcctgaccattatcttatgaatatagttattaaaatggagttttattgtttgtgtgtgtgtgtttatactctactaggagagtataaaccaggaatatattctgtggggcatgcctgtaatgagaatgttgttttctgagaattgcctatagctgtgtcataatgacaaacatgataaatgggagagaagcagttgttccttagagagaaagaatgaacagatgaccaatg

SEQ ID NO: 667360 - DNA, 1176 bp, Homo sapiens
ctagctactcagaaatctgagatgggaagatcgcttgagtctgggaggtcaaggctgcagtgagctgagatagcatcactgcattgcagcggaggagatacagtgagatgttgtctcaaaacaagcaaacaaacaaacaaaaaaacctaattcttattacatrtaacttttcagagacattaggcaggatttcatcaactcagtcaataatgttattacttctacttttcaaaatgttaagaattcttggtgtagaatgttttaaaccaatgtaaagaaattattataatcctggatgcttctttctgatagattgtctaatcctgcaaatagaaaggcaaatacatcaatgggataaaagtttgactctgttttcctaacatattcaggaactagtcatatagtgcccatctttgtgtcaggacttatgtttttgggcatttttccaaaaatataatgaatcacgtggagctataatttgcaaatcaattctcagaaaaaaaaaacagtgagaaggaagaagaatattaataatcattttagatgattttcatgcaacttaaaggttattatgtatctatttttctaccatttagtcatgaagaaaataatataaacttgtttactccttaaatcttaccacttgataaaatcaagttaaatgattattcacaatttaaaggtataatagcctttgtacagttcccagtccactgattgtccataacctggaaaccagcaatttgaattataatgtactttcctatttgatcagtgttttacattttaaccaaaactttattatatgctttgctttgcagtttaagatacacaaagctttatggataggcagagatttgtctctattcaaaaacaaggaagctgaggctcaaaaagcaagtcgaaggagccagggcttcagcttcctgggttcaggtgttattttgtgactacctgcaactggcacctaaatactccaaagtgcaaaattgagtcacatagcttcattaaaatgcctatactcatacacagagagtattgccttacatttcaaaccaagataattcccaaaacatgcagttgaacagcagggttatttattccaatacttttaaaatactttcctttctttaaaattatttatcagcccaaatagaagcttaaaattcatagggt

SEQ ID NO: 667361 - DNA, 2013 bp, Homo sapiens
tcagaatttgtttacccattcttcatattttgttggtcatataaccagttactacaactgcaaaaacaacctaaggtcatgtttctgtgaagtccatccttttggtctttaaattttattatcctcaaaggtcaattatgatctcaatcttttcttgtaattttactgacaattctccttcacactgattagttctttctctaattcctgtaaatggaaagaaccaaaaaaagttgaaaaaacatgtattgtacatataacaaacaatcatatgtggtatacaatatatatcaaatgagtattaagataaacattcaaagagttttaaagaaaaaagtgttatagatattggagggcagaagatacaattgccattaagaacaggtggaggaggttatgccaaggacattgacctgaccctttaggaattagtgaaaattgaataggagaagaatgaggtacacaatgtgtgaaaaatacctaaattgatataacaggaggagaccttttcatatcaattatcattacttctgtgtatataaccatattagatacccacaaacaaatagaaagtggatagttcttgattgacaagtaggactaataatcccagatcatagtaaggtcttaacttcaagtcaataatctttattacttatggttcattcctctccctcatgttttccaataattttaaaatgcataattaaaacaattctcatttaaaaacatagtagccatgactaatgatcttccagtgggaaggtactaagactttacaacatgtttcttgctggggataagacagcctacagccagcattcaactcatttttctaaagtctatggatcaatttgaaatacagaaaaagcagaacagagataaagttaaaaaaagattaaaaatatgggaagaatgggagaaaggggaaattagaagatatgaacaatgatttaaaaataaaagagcctcaaaggagaagagaaactgctaagcaagactaaggtaggatgaaatacagtagtctctgtttctgagaacacaggttaaaaagaacataaataaaataaatttatcacctttaatacactcattcaaggatgctactgagtttgactctgggaatttctcacctttaacacactcatttggggatgctacggactttgacattgggttgcatttaaagggggagagaaagggcagttgcttctattatctgcccttttggactcacagagtttctttgaaaagcacagatgataataaatggaaatattgccttttatactatacaataatatacacatgcaattcactggaaaaagtatacttgttattatgatttgaggatactaccatatactaatcaagagaaacacatgtacagaacaaagaaggcacatgaaatttttactagtgtgtgttttccttgtgttctaccaccccaggagcagcttctgctactgaaggtcacagtagagttatttccaaaagttgtgggtctgcagggtggacttatcacatagctgtttgccaaaattcaaaagtccagaaaccatttccaaattttcacctcttttatcttcaaatcctaaaactatgaaaattcacaaacttagctccatacattatggtagaaaggttaataatttggactttgaggttgaccaggcctgatttttgaataaattcacaaacttacctccatacattatggtagaaaggtcaataatctggactttgaggtcgaccaggcctgatttttggatccaggctgcaacactcacttgctgtgttaacgtaacaaagttcctagaccatgctgagcttcagtttactwgttattgaattagggatatagcgttcgaaggaagaagttctagtatttgattgcacagcagagaaattatagttattgaactggggatatgtagatagacataataaattttagtattcaattgtacaatggagaaatcatagggaacaataatttattatatattctaa

SEQ ID NO: 667362 - DNA, 2013 bp, Homo sapiens
tcagaatttgtttacccattcttcatattttgttggtcatataaccagttactacaactgcaaaaacaacctaaggtcatgtttctgtgaagtccatccttttggtctttaaattttattatcctcaaaggtcaattatgatctcaatcttttcttgtaattttactgacaattctccttcacactgattagttctttctctaattcctgtaaatggaaagaaccaaaaaaagttgaaaaaacatgtattgtacatataacaaacaatcatatgtggtatacaatatatatcaaatgagtattaagataaacattcaaagagttttaaagaaaaaagtgttatagatattggagggcagaagatacaattgccattaagaacaggtggaggaggttatgccaaggacattgacctgaccctttaggaattagtgaaaattgaataggagaagaatgaggtacacaatgtgtgaaaaatacctaaattgatataacaggaggagaccttttcatatcaattatcattacttctgtgtatataaccatattagatacccacaaacaaatagaaagtggatagttcttgattgacaagtaggactaataatcccagatcatagtaaggtcttaacttcaagtcaataatctttattacttatggttcattcctctccctcatgttttccaataattttaaaatgcataattaaaacaattctcatttaaaaacatagtagccatgactaatgatcttccagtgggaaggtactaagactttacaacatgtttcttgctggggataagacagcctacagccagcattcaactcatttttctaaagtctatggatcaatttgaaatacagaaaaagcagaacagagataaagttaaaaaaagattaaaaatatgggaagaatgggagaaaggggaaattagaagatatgaacaatgatttaaaaataaaagagcctcaaaggagaagagaaactgctaagcaagactaaggtaggatgaaatacagtagtctctgtttctgagaacacaggttaaaaagaacataaataaaataaatttatcacctttaatacactcattcaaggatgctactgagtttgactctgggaatttctcacctttaacacactcatttggggatgctacggactttgacattgggttgcatttaaagggggagagaaagggcagttgcttctattatctgcccttttggactcacagagtttctttgaaaagcacagatgataataaatggaaatattgccttttatactatacaataatatacacatgcaattcactggaaaaagtatacttgttattatgatttgaggatactaccatatactaatcaagagaaacacatgtacagaacaaagaaggcacatgaaatttttactagtgtgtgttttccttgtgttctaccaccccaggagcagcttctgctactgaaggtcacagtagagttatttccaaaagttgtgggtctgcagggtggacttatcacatagctgtttgccaaaattcaaaagtccagaaaccatttccaaattttcacctcttttatcttcaaatcctaaaactatgaaaattcacaaacttagctccatacattatggtagaaaggttaataatttggactttgaggttgaccaggcctgatttttgaataaattcacaaacttacctccatacattatggtagaaaggtcaataatctggactttgaggtcgaccaggcctgatttttggatccaggctgcaacactcacttgctgtgttaacgtaacaaagttcctagaccatgctgagcttcagtttacttgttattgaattagggatatagcgttcgaaggaagaagttctagtatttgattgcacagcagagaaattatagttattgaactggggatatgtagatagacataataaattttagtattcaattrtacaatggagaaatcatagggaacaataatttattatatattctaa

SEQ ID NO: 667363 - DNA, 2013 bp, Homo sapiens
tcagaatttgtttacccattcttcatattttgttggtcatataaccagttactacaactgcaaaaacaacctaaggtcatgtttctgtgaagtccatccttttggtctttaaattttattatcctcaaaggtcaattatgatctcaatcttttcttgtaattttactgacaattctccttcacactgattagttctttctctaattcctgtaaatggaaagaaccaaaaaaagttgaaaaaacatgtattgtacatataacaaacaatcatatgtggtatacaatatatatcaaatgagtattaagataaacattcaaagagttttaaagaaaaaagtgttatagatattggagggcagaagatacaattgccattaagaacaggtggaggaggttatgccaaggacattgacctgaccctttaggaattagtgaaaattgaataggagaagaatgaggtacacaatgtgtgaaaaatacctaaattgatataacaggaggagaccttttcatatcaattatcattacttctgtgtatataaccatattagatacccacaaacaaatagaaagtggatagttcttgattgacaagtaggactaataatcccagatcatagtaaggtcttaacttcaagtcaataatctttattacttatggttcattcctctccctcatgttttccaataattttaaaatgcataattaaaacaattctcatttaaaaacatagtagccatgactaatgatcttccagtgggaaggtactaagactttacaacatgtttcttgctggggataagacagcctacagccagcattcaactcatttttctaaagtctatggatcaatttgaaatacagaaaaagcagaacagagataaagttaaaaaaagattaaaaatatgggaagaatgggagaaaggggaaattagaagatatgaacaatgatttaaaaataaaagagcctcaaaggagaagagaaactgctaagcaagactaaggtaggatgaaatacagtagtctctgtttctgagaacacaggttaaaaagaacataaataaaataaatttatcacctttaatacactcattcaaggatgctactgagtttgactctgggaatttctcacctttaacacactcatttggggatgctacggactttgacattgggttgcatttaaagggggagagaaagggcagttgcttctattatctgcccttttggactcacagagtttctttgaaaagcacagatgataataaatggaaatattgccttttatactatacaataatatacacatgcaattcactggaaaaagtatacttgttattatgatttgaggatactaccatatactaatcaagagaaacacatgtacagaacaaagaaggcacatgaaatttttactagtgtgtgttttccttgtgttctaccaccccaggagcagcttctgctactgaaggtcacagtagagttatttccaaaagttgtgggtctgcagggtggacttatcacatagctgtttgccaaaattcaaaagtccagaaaccatttccaaattttcacctcttttatcttcaaatcctaaaactatgaaaattcacaaacttagctccatacattatggtagaaaggttaataatttggactttgaggttgaccaggcctgatttttgaataaattcacaaacttacctccatacattatggtagaaaggtcaataatctggactttgaggtcgaccaggcctgatttttggatccaggctgcaacactcacttgctgtgttaaygtaacaaagttcctagaccatgctgagcttcagtttacttgttattgaattagggatatagcgttcgaaggaagaagttctagtatttgattgcacagcagagaaattatagttattgaactggggatatgtagatagacataataaattttagtattcaattgtacaatggagaaatcatagggaacaataatttattatatattctaa

SEQ ID NO: 667364 - DNA, 890 bp, Homo sapiens
tctgtctaagccccgatagctcaaagggctggagtagcccccgtacacccggagttgcacttgcaataggcagagagtagggatggagctcacatcttctaagtcctcactcaacgttctctgtctaccacacacacgatgcctctctgtccatgggttggaaagatcaggatactgggagactctatctagggacataaaaatggcccttacggccgggaacggtggttcacgcctgtaatcccaacactttgggaggctgaggtgggtggctcacgaggtcaggagttggagaccagcctggccaatgtggtgaaaccctgcctctaccaaaaatacaaaaattagctgggcatggtggtgcacacctgtagtcccagctcctcaggagtctgagacaggagaatygcttgaacccaggaggcagagcttgcagtgagccaagatcacgccactgcactccagcctgggtgacagagcaagattccatatcaaaaaaaaaaaaaaaaaaaaaagccctgactaaaaacttgccaaccagaggaacccaactgtatttccatctgcaaatcctgctcaaatatattccagagcttgtcttttctctttctctctccttgaaggccgagacttgcctggcatgtgtcctaatttctttctgcctcaaagaagccccccgaccgaagggggctggttctccttctattcaaaggagtacaacctccttgcctcagcaaatgacatgacatttgcagaaagcctgaatagagatgctctggagtgggtgatgcattgagaaagccccttgcaccgttcctgtccatgagcctcactggagatcatctgtcccgtgtctctgtttctgcatagccagccctcagagccagtca

SEQ ID NO: 667365 - DNA, 890 bp, Homo sapiens
tctgtctaagccccgatagctcaaagggctggagtagcccccgtacacccggagttgcacttgcaataggcagagagtagggatggagctcacatcttctaagtcctcactcaacgttctctgtctaccacacacacgatgcctctctgtccatgggttggaaagatcaggatactgggagactctatctagggacataaaaatggcccttacggccgggaacggtggttcacgcctgtaatcccaacactttgggaggctgaggtgggtggctcacgaggtcaggagttggagaccagcctggccaatgtggtgaaaccctgcctctaccaaaaatacaaaaattagctgggcatggtggtgcacacctgtagtcccagctcctcaggagtctgagacaggagaattgcttgaacccaggaggcagagcttgcagtgagccaagatcacgccactgcactccagcctgggtgacagagcaagattccatatcaaaaaaaaaaaaaaaaaaaaaagccctgactaaaaacttgccaaccagaggaacccaactgtatttccatctgcaaatcctgctcaaatatattccagagcttgtcttttctctttctctctccttgaaggccragacttgcctggcatgtgtcctaatttctttctgcctcaaagaagccccccgaccgaagggggctggttctccttctattcaaaggagtacaacctccttgcctcagcaaatgacatgacatttgcagaaagcctgaatagagatgctctggagtgggtgatgcattgagaaagccccttgcaccgttcctgtccatgagcctcactggagatcatctgtcccgtgtctctgtttctgcatagccagccctcagagccagtca

SEQ ID NO: 667366 - DNA, 890 bp, Homo sapiens
tctgtctaagccccgatagctcaaagggctggagtagcccccgtacacccggagttgcacttgcaataggcagagagtagggatggagctcacatcttctaagtcctcactcaacgttctctgtctaccacacacacgatgcctctctgtccatgggttggaaagatcaggatactgggagactctatctagggacataaaaatggcccttacggccgggaacggtggttcacgcctgtaatcccaacactttgggaggctgaggtgggtggctcacgaggtcaggagttggagaccagcctggccaatgtggtgaaaccctgcctctaccaaaaatacaaaaattagctgggcatggtggtgcacacctgtagtcccagctcctcaggagtctgagacaggagaattgcttgaacccaggaggcagagcttgcagtgagccaagatcacgccactgcactccagcctgggtgacagagcaagattccatatcaaaaaaaaaaaaaaaaaaaaaagccctgactaaaaacttgccaaccagaggaacccaactgtatttccatctgcaaatcctgctcaaatatattccagagcttgtcttttctctttctctctccttgaaggccgagacttgcctggcatgtgtcctaatttctttctgcctcaaagaagcccccygaccgaagggggctggttctccttctattcaaaggagtacaacctccttgcctcagcaaatgacatgacatttgcagaaagcctgaatagagatgctctggagtgggtgatgcattgagaaagccccttgcaccgttcctgtccatgagcctcactggagatcatctgtcccgtgtctctgtttctgcatagccagccctcagagccagtca

SEQ ID NO: 667367 - DNA, 2497 bp, Homo sapiens
ccatgtattgggacaacctgatatgttaatagtgcttcataaagaaagcctgctacttcttccttaaatcccactggaagaagccaaggaagacccatttcacgtggaacccttttcaataggaaaccttgctccactgaggtttctgtgctttaaagtaattctattttcaaaggcactttactcaaaattagggaatgaaggaagtaccaagagactgtgacttattattctatggcgaccacctattgcaatcctcaaaaacattgtgctcatttggtttaaatgatctctcagtagcactcactagggccctctgtggaatatttcgcctttcacttatgcctatttattatgtgttgatttttctactttttttgtattcatatcagttttaagatatctgcactttattagcggtattatatttatccttttattgtttctgtgacttaatgttactttatactctgtctgaagtttatgactgctcatttgggggttattttcatttatgtacttaaaacaaacctctaagtttgatgaattgattttgtagtaagagaacatttattataaaatactttatgaatatctcatctttaaattcctctccctaatatgtaaaatgcacaagttgacatgacttttctttatatgtttgaaaagtgaatcatgaacagtatttcagaaataacattactagcaacttccaaaaataaaggaagaaagacaaaggattcaaggacagctgaaaatacaaagggcaaacagaaatgctccacattcaatgagatgctgtttacatttttcagaattaaagaaaaaaatagacaaggtaaaattttccttttcctatacctgctggaaaaagttcatgtttcttctatttttttttaattagtagatcatttgatgtgttttgaagtcaagggaagcaacgaagagcaatatgagacagagttgaggctaaaatacctggaccagctttctgcctaagaaaaaaaaaatgataaagaataatagaggcaagggtttgtcactttcctgacatatgcatattgtcactttcttatggaatgcatttttgcatgtattaaaggttactgtatgttaagtctaattgtatggaattttgattaagactgctggagcagggtgtttactgataaaacaagagcctgtcctgagagatccaggcatctaaataacactccagaggagacatcatggcaaggaggagacaaatttggtttagtttgatctgatgtacagtttcacaagagtattctaacaggaaatttttgtcagaaagcatttattctcataaaagctattgccaggacagctgttaacagcattagcaaaaacaataaaattaagatactctcctccttatgtttaaaagctgaaaatcctgcctacttaagttggactcataagtatacaacataaatgcagtaagctactcttgttcaataagcaaaaatgatatgatacaaatcattttcagaggttgtactgctaagtacctattatagctagaaatcgagcactaacattaagaagcaatggaccatgttgtactggcccatttatactgtatatacactgtatacttattktaggtatcaggagtaatccaccagaatgcatctagcttgaactgtcacataaaggaatggattattgtcaggggtttttgcatgtaaatggagctagtcatagagcaataaatgcaggcttgaaaccagaaatcaaaataaaacagaatgttctccccgcccttccctaccttattcctaaaaaccattaaagcaacttcaggcagtgtagaaagccacctcatgggagagactatcccctgaggttcccccagtccataacagcttcccaaattggcaatgagtcacctctatctgatactggcagagaacccaggttggtcagggacatctgccatcattttggctactgctttaaatgtcctttcttttttatttcttgttcctatttggaaaaagaacaaaggtaatgagataaaggaaaagtttgaccatgaatcctcttagataacttactagttcttctctttcactgcttctctatttagatatggatagtcaaagtgtgatagtcaaagtatgatagcacatcctgcagctggcccacttcatcttacaactataagtctgctcactacagctgctcctcctctaggattaggaatgctagtgtggatggcaatgtattaaggaaatggtatctgagagagccaaagtgggccctctctgtgtgtatacattatgcttccaactttgcatcataaatcaaaagcaaaatgcaaaataaaaacacaggttgttgaccatatttttaaaagtcctatcttcaggctgaactataattatgagcatctgtcatcagtaataatgcttaaaatgttgctgggagaggaagacgttagatttccaggcaatctaccaagtttgaaata

SEQ ID NO: 667368 - DNA, 1660 bp, Homo sapiens
aacaaacatacaaacaaaggaggagaacggctcctgctggacaagcctcttgggctccagtagggaggacgctgtggttcggagccctgaggtgggcacagcccctggtgccagccttgcctacaggggtgagcaccacggtactggacgttaccctggagcccatacgccattttctagtgcttgagtgtttgctacaagctatctatccttggaaatgctgctaaaacttgatgtcctcattaagcacaacttcttagatctcataatggtgaataaacagctggtaaatgctggaaatattttaagaaagataaaggcaatccaggggctcatggccagatctgttttatatactgtttattatttttattttatttttattacctgtaagaaacctgtacatatacagatctgttttaaataacactgaaccacagatttattatgaaatctttttttgtaaacagaaaagccccaaaaagtttagtatgattccatcacagaaaatgattgactcttatcatgatggtcagtcaatattacttaaaaacatgaaaagaacatgttataggacaaatacagactaacgtatgattgtgagaatttctgataattcccgggaattctgatttctccttccccaatcctgagggtggagctgtgaggaatctgggctgactgcagggtcccacctgccaggaacaagaacagctccttcccgaggcccggtcgtcactgtttcctgatcacccgaaagtgaacacccaaagcatgcaaggaacaccttttgttcccaacaggcctggaaagagccctgcccggcctgctggggaggcgagctgttcctgcaacagcttgtaagcaaagcgtctcagtaaaacaaaagctcacttcatatagcttcccgtgtggacagctacatctttgtttggttcgtttgtttgtttggttgattggttttgagatagggtcttgctgtgttgcccaggctggaatgcagtggtgtgatcagagttcactgtagcctccaactcctgggctcaagtgatcctcccacctcagctttccgagttagctggggccacaggcacatgccaccaagcccagctaatttttataatttttagtagagatgggagtctcactacattgcccaggctggtttcaaattcctggcctcaagcaatcctcccacctygctgggcctcccgaagtgctgggattacaggcaggagccaccacaccgggcctgtagctgcatctttgaagaacaagcattcctgcctttcatcagcctctgcctcgagccctgccttggtgggacctgcagggaacccccgcccagagacaccagcctgcagagctgcacaccaggagtctccaggtgttttgcaccagacactccatttatttatttatttatttatttatttatttatttatttatttatgacagagttttgctcttgtcacccaggctggagtgcagtggcacaatttcggctcactgcaacttccacctcccaggttcaagtgattctcctgcctcagcctcctgagtagctgggaccacaggcacctgccagcatacccggctagttttttgtatttttaatagagacatggtttcaccatgttggccaggctggtttctttt

SEQ ID NO: 667369 - DNA, 1660 bp, Homo sapiens
aacaaacatacaaacaaaggaggagaacggctcctgctggacaagcctcttgggctccagtagggaggacgctgtggttcggagccctgaggtgggcacagcccctggtgccagccttgcctacaggggtgagcaccacggtactggacgttaccctggagcccatacgccattttctagtgcttgagtgtttgctacaagctatctatccttggaaatgctgctaaaacttgatgtcctcattaagcacaacttcttagatctcataatggtgaataaacagctggtaaatgctggaaatattttaagaaagataaaggcaatccaggggctcatggccagatctgttttatatactgtttattatttttattttatttttattacctgtaagaaacctgtacatatacagatctgttttaaataacactgaaccacagatttattatgaaatctttttttgtaaacagaaaagccccaaaaagtttagtatgattccatcacagaaaatgattgactcttatcatgatggtcagtcaatattacttaaaaacatgaaaagaacatgttataggacaaatacagactaacgtatgattgtgagaatttctgataattcccgggaattctgatttctccttccccaatcctgagggtggagctgtgaggaatctgggctgactgcagggtcccacctgccaggaacaagaacagctccttcccgaggcccggtcgtcactgtttcctgatcacccgaaagtgaacacccaaagcatgcaaggaacaccttttgttcccaacaggcctggaaagagccctgcccggcctgctggggaggcgagctgttcctgcaacagcttgtaagcaaagcgtctcagtaaaacaaaagctcacttcatatagcttcccgtgtggacagctacatctttgtttggttcgtttgtttgtttggttgattggttttgagatagggtcttgctgtgttgcccaggctggaatgcagtggtgtgatcagagttcactgtagcctccaactcctgggctcaagtgatcctcccacctcagctttccgagttagctggggccacaggcacatgccaccaagcccagctaatttttataatttttagtagagatgggagtctcactacattgcccaggctggtttcaaattcctggcctcaagcaatcctcccacctcgctgggcctcccgaagtgctgggattacaggcaggagccaccacaccgggcctgtagctgcatctttgaagaacaagcattcctgcctttcatcagcctctgcctcgagccctgccttggtgggacctgcagggaacccccgcccagagacaccagcctgcagagctgcacaccaggagtctccaggtgttttgcaccagacactccattyatttatttatttatttatttatttatttatttatttatttatgacagagttttgctcttgtcacccaggctggagtgcagtggcacaatttcggctcactgcaacttccacctcccaggttcaagtgattctcctgcctcagcctcctgagtagctgggaccacaggcacctgccagcatacccggctagttttttgtatttttaatagagacatggtttcaccatgttggccaggctggtttctttt

SEQ ID NO: 667370 - DNA, 1660 bp, Homo sapiens
aacaaacatacaaacaaaggaggagaacggctcctgctggacaagcctcttgggctccagtagggaggacgctgtggttcggagccctgaggtgggcacagcccctggtgccagccttgcctacaggggtgagcaccacggtactggacgttaccctggagcccatacgccattttctagtgcttgagtgtttgctacaagctatctatccttggaaatgctgctaaaacttgatgtcctcattaagcacaacttcttagatctcataatggtgaataaacagctggtaaatgctggaaatattttaagaaagataaaggcaatccaggggctcatggccagatctgttttatatactgtttattatttttattttatttttattacctgtaagaaacctgtacatatacagatctgttttaaataacactgaaccacagatttattatgaaatctttttttgtaaacagaaaagccccaaaaagtttagtatgattccatcacagaaaatgattgactcttatcatgatggtcagtcaatattacttaaaaacatgaaaagaacatgttataggacaaatacagactaacgtatgattgtgagaatttctgataattcccgggaattctgatttctccttccccaatcctgagggtggagctgtgaggaatctgggctgactgcagggtcccacctgccaggaacaagaacagctccttcccgaggcccggtcgtcactgtttcctgatcacccgaaagtgaacacccaaagcatgcaaggaacaccttttgttcccaacaggcctggaaagagccctgcccggcctgctggggaggcgagctgttcctgcaacagcttgtaagcaaagcgtctcagtaaaacaaaagctcacttcatatagcttcccgtgtggacagctacatctttgtttggttcgtttgtttgtttggttgattggttttgagatagggtcttgctgtgttgcccaggctggaatgcagtggtgtgatcagagttcactgtagcctccaactcctgggctcaagtgatcctcccacctcagctttccgagttagctggggccacaggcacatgccaccaagcccagctaatttttataatttttagtagagatgggagtctcactacattgcccaggctggtttcaaattcctggcctcaagcaatcctcccacctcgctgggcctcccgaagtgctgggattacaggcaggagccaccacaccgggcctgtagctgcatctttgaagaacaagcattcctgcctttcatcagcctctgcctcgagccctgccttggtgggacctgcagggaacccccgcccagagacaccagcctgcagagctgcacaccaggagtctccaggtgttttgcaccagacactccatttatttatttatttatttatttatttatttatttatttatttatgacagagttttgctcttgtcacccaggctggagtgcagtggcacaatttcggctcactgcaacttccacctcccaggttcaagtgattctcctgcctcagcctcctgagtagctgggaccacaggcrcctgccagcatacccggctagttttttgtatttttaatagagacatggtttcaccatgttggccaggctggtttctttt

SEQ ID NO: 667371 - DNA, 601 bp, Homo sapiens
gccagcccagctgacttccatcgtgggagctgggaatggggagtggcctcccagccaagcccttcattatcagtggcaagcctgagcctagaatggggaagggcctgcgtaagggccctcagcaaggcagaaatcaaaccaggactggaaaccagcaccccacccaccaccctgctgagcctgggctggccccaggaaagcctcttcctcccgcagggcccacccacatctccaggggctgctgcagggtggtggcagagggtacctacctgagaggttggtgagggtcatgatggtgtggcagtactgctccagaagtgcccacaggggctggtctttgggcatctggctctgcccggctgcctaggggwcagcaaggatgagggtcaaagatcaggcccaggctagccattgacagtgcctgtctgcccccatcctatcctatcactcatcccttactcctcttagtacagagagggagaacaaggagggagatgcccatggccacatggagcagcagcagtctggcctgggctggaccgaagaaaggcctcagaagtggcccaatgcagtgttgcctcctaggcaggggtctgctctg

SEQ ID NO: 667372 - DNA, 615 bp, Homo sapiens
ctctcccccccttttatagctgtcagacctacattgctctctgaatactctgctcacttcttctggctcccacccacctaacatctcttgcacatctaatcttttttaagcctctgcctcttggcagacctctcatataagtaatctctgtattaaaaagctagtgcagatgataaagatactcactaaaagacatataagtgtatgtgcatatgtgtgtgtgtgtgtgttctaagtgcaccagaattctagaaatcattccagattctgccttcttctacagcctcaatatccwtttagttgccagatccctttggttgtacttcaaaacatttccctcaaatgttccctggtctccatctccactcttttcagcccatcagagtgattacaacaggattctaactagtttcctgcttccagctccatccccttccagcaaagcctttccttattacttggattgtgttcttcatacagtgaaaatatgaaagtaatgctaccctcttgaaagtcttgcaatggctctccattgctttgggtaaagtccaaactacttagtttacagcataaagtcagtcttcatttggtctctgttttcttctttttagtttc

SEQ ID NO: 667373 - DNA, 615 bp, Homo sapiens
ctctcccccccttttatagctgtcagacctacattgctctctgaatactctgctcacttcttctggctcccacccacctaacatctcttgcacatctaatcttttttaagcctctgcctcttggcagacctctcatataagtaatctctgtattaaaaagctagtgcagatgataaagatactcactaaaagacatataagtgtatgtgcatatgtgtgtgtgtgtgtgttctaagtgcaccagaattctagaaatcattccagattctgccttcttctacagcctcaatatccatttagttgccagatccctttggttgtacttcaaaacatttccctcaaatgttccctggtctccatctccactcttttcagcccatcagagtgattrcaacaggattctaactagtttcctgcttccagctccatccccttccagcaaagcctttccttattacttggattgtgttcttcatacagtgaaaatatgaaagtaatgctaccctcttgaaagtcttgcaatggctctccattgctttgggtaaagtccaaactacttagtttacagcataaagtcagtcttcatttggtctctgttttcttctttttagtttc

SEQ ID NO: 667374 - DNA, 997 bp, Homo sapiens
tgttgagaggtagggcctttaagaggtgattcggtcatgagggctttgccctcatgaatggattaatgcaggagtgggtttgttattgcgggagtttggcccccttttcctgtcttgttctcatgtacacattcttgccctctgccatgttatgaagtactaagtaggccctcattagatgctgagttgatgccagcaccatgctcttggacttcccagctttcagaactgtgagccaactagacttcttttctttataaattacccaatatgtggtattctgttatagcagcagaaaatgggctaaggcatttgctctggtattaggcagtcacttattttccctgatcttcattttcctcactcataaatagggataaccatatactcctcctaggatgcctgatgcactgctgggaacatagcaagcatttaaaaaaccacaagtaatggaagttttcttctttctcttaagtgccatctatacttttttgaaaaaaattttttttttcttattttaaatttaatcaccttccatctggaaactgagaaggagatgtttagctactatttcatataaattaatattgacagaagactgaatttctttgaagataatttaaaaaaataaaagtaacaaatctgaaaatgtttacattactttcttaaaacttctgaaatattagctaataaaagaatcttcatgccaattttgattttagattatcaataacttttaacrtagggtctccttaaaaagtctcatttatagaaatcattgctacaaaaagcttaaggtagggtgtatgtttttttgccccaacttttttttttattatactttaagttttagggtacatgtgcacaacgtgcaggtttgttacatatgtatacatgtgccatgttggtgtgctgcacccattaactcatcatttaacattaggtatatctcctaatgctatctctcccccctgcccccaacccacaacaggcccca

SEQ ID NO: 667375 - DNA, 1813 bp, Homo sapiens
cattcaatatttcctactttttctaaattttccaacttgcattgaatatggtagtataaaagaaatcagatggctgcctcagaatagagtggctcattttaaaagaactaagcatttttatttagtcacacttaatcttctaatgtgaattataatgctgatttgataatgcaagtgtttggagtaattcgtagtaatcaaagcatgtggtgcttaccttcttttcaaataagatatcctacaagggaaaaaagaatgaagcattaactcgattgatagttctgcctccagctacttattagtcataactattccctatgggatatgaagtttccacaaagaatagcaattcagcctttttaaacttgtaaaagcaataaaaccaaccagccaaccacccaaggagcagtccgagccatgtaataataagagatataactaccattaaaaattaacctatattttctaggaacttcatcttactgcattctatgttttatcttttgtttcctttatcagctctgtaatctccataatttgactataaagttaatcagtcataatgacaaagctctcacttttacatacaaagactgaggcagaatatataattgtatattttcaattttttccatccctatgcacatatacatgcatctatttttcatgatttatttttcaagattaaaacaatatagtcataacttcatgaaatattaatgggtgttagatcatattaaaactcaaaaagagaaaattacaaagtccagtgacattttttgagatgatctgaattatgagaagacaaagatttccattattatgatcactaggggaggagttttctatttcaaatttgaaaagcctccaatatgatactttatttacagaatttcaacagaagccaaaaaagatactcagcttttaaatttaaacagtattaggaataatattttggtaaaaattttgaactgttcatagcaatatgcattacttatgtaaaagaggacttacatttataactggctaacttagggraaaaactaagtgatagaaaagtaatacatatttcataataaaaaatgatcattatgaaaaacaaaaaaacaaatttaatgagtcttagtcaatcagactcaacctcttgctttgcaataaggaaacatggttccaccataatgtgactcaactgaggtaacacacttgggctgcacctcctgaccgtcttcagtgcatgtcatatgtaccatacaggaatgaattagccagaatatttttcaaaactattttaaatttataattttgcagaaatgtcatgatcttgtttttgtctaacacctaggcctcactaccatacttgaattcagtgggatattacctgacaagtgcactgaaggctgtgttggaagacaaacgctggaaagaaactaatctatgtttatatatagaattagtactttcttaacctagaaattatgtgtcaaaccagtgccttgtgatttcatctgaaggggtaatttacatacgataaaatagaaagatgaaggagcaagcactggaatatttgttgcaagatattaaaaatgcagaagctaacaaggaagttaaataagagtatgtagctttatgaaggatgctgcatccctttagttttatttttactttatttccgtacaaactaatactatagagggacgagataacaaaatgctttaatgatttaatagggaaaaaattaggctgggaattaagtgtcattctgggtttccatcccgtttcaacaattaactagctatgtggccttggacaagtc

SEQ ID NO: 667376 - DNA, 3257 bp, Homo sapiens
tgccttcaaatattctgtttactcaacagcaagagttctcatgatttaagccactattattcaagatttctgttactcaaagccagagcattttgaaataataatagcctatgatgtggcaagcccataatagaattcaggcattttagaactagatgtgaccattgcactcaaacccctacatttcacaggtgagaaacccaagtcccagagagattacctggccagcccaaactcacacctgaataccactcacacagttacagctctttaggtctctccggctttaagccctgtggcatgatgataggggaaggggagtggctattgaccccaattacccatttcataatattatttttttctgtttatcaaaataatatgtctcattgtagaaaattgtcatatattaaaaagcatgcatgcaaagaaaattttaaattacctatctgtaactattaatactataaaatttcggtgtatttccttccagttttttacattcacacgtgtacctttaatttatgctaaggaagattgctgaacactctttatgtttcagctaatgaatatttgctattaaaaatttcattcaacccaaaggtttctctcttcatgctttcactaaccaacagtaaaatgaaacaggaaagtgaaacaagccttctctgagatgaagggagataaaggagttttcagaaatattaaagtctcaatttaccccagaagcttgtgattttggaagggacacctaatgaccagagcaatgttctgtggatatagtaaagacattgctttactataagaagtctgtaaccgatgtggtggctcatgcctgtaatcccagcactttgggaggccgaggcaggtgaatcacttgaggtcaggagttcaagaccagcctggccaacatggtgaaacactgtctactaaaaatactaaaaaaaaaaaaaaaaattagctgggcctggtggcatgtgcctatagtcccagctactcgggaggctgaggcaggagaattgcttgaacctgggaggtagaggttgcagtgagccaaggtcacgccaccacactccagctttggcaacagagtgagactccgtctgttaaaaaaaaaaaaaaaaaaaaaaaaaggtctgttgactttgaccaattgcgaaagagaaccagaagggctaagaagggtcagagtcaaaccagctccccagaagatatgcccaggctcagggtgatttaaaacaaaggaatcctgcctcaaaatgagtcatccacatttatgatcctttgatatttaagtggattgaattcaaaagtacttactgtgcatgctgttgagtacaagtcagtctggcaaatattttttcccttaaactcctaaggttgtacttgtttttctatattgattaagttttctgagcagccagttgactgacattctcattttacatgtttttagccatggaatttatatatatatgttacataatataygtaacattatatatacctgttatataatatatatacatatataacaggtatatataatgttatataatatatataacattaatatataatatatatatatataccattaaaaatacaataataatatctacccactgctgaatttgtctggctaaaaaaaatacaataataacaatacaaggccctaaattcacttattctattcattttttatcccttctatatgtagcattggttctgtaatgggtcagaaggcatctaaattatatatttggtagagaatttgaggattttttgagtagtggaagttctgccctacttggtacttatctgatgtttgatcagaaacaaaccaagagcccaggttggtgacaagaaattggtttggtcattaccttgaaatgtatggatcaggagaatcaagagtagaagcagctctcttaccttgagcccatgaaatccctttagccttagtcaagtaccaagagcagctgagcaatatcttaatattgctttacaaggcagttgcagggatctgaagattacagagggattgctctcctttacctgaacacagccccttagcaatgtagcttcacatttcacttgcttaaatttatttctcgggagcctggtatctcaaggtaggatccacaaaacagtattggcctatagctcatgtttattcccttcccatttcccctttttctttcctacagagattcctgaggtagtaaagaaagtggtcctgactctaaaatatgctgtctgggtaaaaacaaaacagggagggaagagtcagcactctagtcagaatagccctggtaagacggcaggcatgattcctttcctgttaatattcctaccccagcccttagcaacacacacacacacacacaaagacagagagatggcatgcccaaaaaattgcatgcccacagtaattatttctctactttactttcatttgccatcagagccatttaccaacaggcaagtataacaaagaggtctgggttaaaatcagtagccccagaaagaatatgtttctcattacctccatgtgagtgtgaatgtgtgtgaatgtgagtgtgagcgtgtgtggaggcagcaaaaagtttaggtaaaccacctttgtccttttcagaaattaagaacacccatactatgggcttcaagaggacaggaagccaatgtttaataaaacctgctatttatcagcactgcccagacatgttacatacattatctcatttaatcttctaacaatcataggaaatagattttggggtttgggtttttttttcgaactcctttcctcaaatgattgttctgtcttggcctcccaaaatgctgggattacaggtgtaagccaccacacctagcccttcatgcatggagtcacagggaaaaaaccatggctttgaatcatttggtcttgtagaaccttggttctatcatttactaacaattttagcttttgcaagatctccatatgcaaaatgaggataattatatctgccttgtagcattgttgagaggattcaagatattgtctgcaaaacatctaagtcataaccagtcacacaacacctgtttaatatgtatagatttaattgttattcaccagaccttttttgagcaccaaactaataataggtaaataacaatttatgtctataattgaatatcaggttacctaatcacagacataaatcagattgcacctgcactttgcagaagcttacaatctggctggagagaca

SEQ ID NO: 667377 - DNA, 937 bp, Homo sapiens
cctcagttcaggtcagtaaaatcccaggcttatttctaaggatagaatgtgtccctttagaaataaaagaaagaagtagcatttccatttttcctcccatttccaaacaattgcttttcagcagtgcaaaatagccccgatgttttcaagagcgagtagagctatcattgctaggactttctgacttaagttcaaagtggaagtatactcacaggaggccctggatcacctggatctcccttctcacattcacaaatcttgcgttcacactgaatcaataatgaaatatgatattaacacacagtgaaattcaaattgtatgcagcatttcaaattgtatttcaaatacatttcaaagtgtatttcaaataaatttcaaatagcatttcaaattgtattcagtatataaccaactggagcactctcaaagaaattttaccttgcacatttatggatgttttgctctctctattaaattattccaggcaaatttatacctaccaagagctagctaacaaaatattattaaatttcagcatagttaaataaaagacatcccatcaaaaatacatgtataatatatagatgccagttaaaaggagaaaataaatattttcagtggacttttagaatttctgatccttctcttctatataacacatcaaagctcaataatataataatattaaatgctcctttactaggcaaaggaaaacatttgacttatagcatattttactaattgtaagataattgtaagatgcaccttcttcctcattttaacaactctgaaatcagaatgagtcttataacagctgttraccaggttcagtcatgacaaagtagttgctttttgcacatgcacttcaaaacttacagaatgaaatgggagaaaattccagaacatacttaagaaatgcttcatcaccaatggttt

SEQ ID NO: 667378 - DNA, 622 bp, Homo sapiens
cttgaggtcaggggtycgagaccagcctggccaatatggcggaaccctgtctctactaaaactacaaaaactggccagggatggtggcgcacacctgtcatcccggcttctcaggaggctgaggcaggagaatcgcttgaaccggggacgcaaatgttgcagtgagccaagattgtaccactgcgctccagcctggacaacagagcgagactccatctcaaaaaaaaaaaaaaaagaacgcaaacacttttttttcagcacgcaactattgtgggacaaagtttataaacattatactgtttggccaagagttagtgtacctttgccatctatccagtagacattgtttttcccttgaactgagctgtgtgctgtgttttcgcgtctgcaggacaaggtttatagctcggtgctgcggcagtgctacagcatgtacaaggtaagcgtggcgttctttctcaactcagagtccagccacttacccctatctctaggctccagggttgtttaaagagaaatctgtaaatgactgcaaagtgactctgtatttgtcttagagaagaaaataatgaggcctttgaaacaggtagtgaggtttatgcctacatttattcagtaagta

SEQ ID NO: 667379 - DNA, 622 bp, Homo sapiens
cttgaggtcaggggtccgagaccagcctggccaatatggcggaaccctgtctctactaaaactacaaaaactggccagggatggtggcgcacacctgtcatcccggcttctcaggaggctgaggcaggagaatcgcttgaaccggggacgcaaatgttgcagtgagccaagattgtaccactgcgctccagcctggacaacagagcgagactccatctcaaaaaaaaaaaaaaaagaacgcaaacacttttttttcagcacgcaactattgtgggacaaagtttataaacattatactgtttggccaagagtyagtgtacctttgccatctatccagtagacattgtttttcccttgaactgagctgtgtgctgtgttttcgcgtctgcaggacaaggtttatagctcggtgctgcggcagtgctacagcatgtacaaggtaagcgtggcgttctttctcaactcagagtccagccacttacccctatctctaggctccagggttgtttaaagagaaatctgtaaatgactgcaaagtgactctgtatttgtcttagagaagaaaataatgaggcctttgaaacaggtagtgaggtttatgcctacatttattcagtaagta

SEQ ID NO: 667380 - DNA, 1462 bp, Homo sapiens
tgcagcacatgtgtgccgatgggaatgatccactggaggaggagtaacgggaaacgacaggcactgtagagggggatacacaggggaggcctttgagaggacaagggcccgggatggaacctttaaaagtccaccattgagtgggcggccggccatagagagacaccgtcagaaaagggggagggccaggcgcggtggctcacacctgtaatcccagtgctttgggacaccaaggcgggaagatcacttgggsccgggagttcaagaccagcctgggcaacatagcaagaccccatctctttaacaaacaaagaccaggcgcggttgggctcatacctgtaacctcagcactttgggagtcaaggcgttcagatccaggagttcttggatccaggagttcaagaccagcctgggcaacagagcaagaacccacctcttaaaaaaaaaaaaaaaaatgcccaggggcgggtgggctcacacctgtaatctcagtactttaggaggctgaggcaggcagatcacctgaggtcaggagtttgagaccaccctggccaacatcatgaaaccccatctactaaaaatacaaggtgcagtgatgggtgcctgtaatcccagctactagggaggctgaggcaggagaatcacttgaacccaggaggcagaggttgcagtgagctatgatggcaccactgcactccagcctgggcaagaaagtaaaaccctgtctcaaaaaaagaaaaagaaaagaaaagaaaaggggaaacaccagggcttgtttaatcatgaaaacaaggccacgtgcaactggcaaggccagcagagtaacagcgggaaattcccatgacattgatcatcactggatgaccctgaggaaagcagaggcatgaggttggaagttcacacggacacggctgaggaatcagaccagagggaggaagcgcagtcagcagacagagaggcctcaagagcgatcttcccaggataaaggaaaacataataaaacaggaggatgaggaagtgaataagggttgtgtgttgtttttaatttgagcacctttaaaaatccgagagaatgagacccttgagagagaaaagttgcctgtaagaaaacaatgtagtcaacggcatcagactctgagatgggcgtgcagggcccaggggaggcccagctgtcccatactggcatctgccctaacagactgagtcagcacagcaaggtcacgccttgaacttgaactccaaaccagggaggagaaacagaagcagctgtaccagcctcattatttaaaaagatggttgtgctgggtgtggtgatgcctgcttgtaatcccagttactcgggaggccgaggtgggaggatcgcttgagcccaggagttcaagaccagcctggacaacatagcgagactctgcctctaagaaactaaaaattaaaaaaagatggttgtaaaacagtatagaca

SEQ ID NO: 667381 - DNA, 1462 bp, Homo sapiens
tgcagcacatgtgtgccgatgggaatgatccactggaggaggagtaacgggaaacgacaggcactgtagagggggatacacaggggaggcctttgagaggacaagggcccgggatggaacctttaaaagtccaccattgagtgggcggccggccatagagagacaccgtcagaaaagggggagggccaggcgcggtggctcacacctgtaatcccagtgctttgggacaccaaggcgggaagatcacttgggcccgggagttcaagaccagcctgggcaacatagcaagaccccatctctttaacaaacaaagaccaggcgcggttgggctcatacctgtaacctcagcactttgggagtcaaggcgttcagatccaggagttcttggatccaggagttcaagaccagcctgggcaacagagcaagaacccacctcttaaaaaaaaaaaaaaaaatgcccaggggcgggtgggctcacacctgtaatctcagtactttaggaggctgaggcaggcagatcacctgaggtcaggagtttgagaccaccctggccaacatcatgaaaccccatctactaaaaatacaaggtgcagtgatgggtgcctgtaatcccagctactagggaggctgaggcaggagaatcacttgaacccaggaggcagaggttgcagtgagctatgatggcaccactgcactccagcctgggcaagaaagtaaaaccctgtctcaaaaaaagaaaaagaaaagaaaagaaaaggggaaacaccagggcttgtttaatcatgaaaacaaggccacgtgcaactggcaaggccagcagagtaacagcgggaaattcccatgacattgatcatcactggatgaccctgaggaaagcagaggcatgaggttggaagttcacacggacacggctgaggaatcaraccagagggaggaagcgcagtcagcagacagagaggcctcaagagcgatcttcccaggataaaggaaaacataataaaacaggaggatgaggaagtgaataagggttgtgtgttgtttttaatttgagcacctttaaaaatccgagagaatgagacccttgagagagaaaagttgcctgtaagaaaacaatgtagtcaacggcatcagactctgagatgggcgtgcagggcccaggggaggcccagctgtcccatactggcatctgccctaacagactgagtcagcacagcaaggtcacgccttgaacttgaactccaaaccagggaggagaaacagaagcagctgtaccagcctcattatttaaaaagatggttgtgctgggtgtggtgatgcctgcttgtaatcccagttactcgggaggccgaggtgggaggatcgcttgagcccaggagttcaagaccagcctggacaacatagcgagactctgcctctaagaaactaaaaattaaaaaaagatggttgtaaaacagtatagaca

SEQ ID NO: 667382 - DNA, 1462 bp, Homo sapiens
tgcagcacatgtgtgccgatgggaatgatccactggaggaggagtaacgggaaacgacaggcactgtagagggggatacacaggggaggcctttgagaggacaagggcccgggatggaacctttaaaagtccaccattgagtgggcggccggccatagagagacaccgtcagaaaagggggagggccaggcgcggtggctcacacctgtaatcccagtgctttgggacaccaaggcgggaagatcacttgggcccgggagttcaagaccagcctgggcaacatagcaagaccccatctctttaacaaacaaagaccaggcgcggttgggctcatacctgtaacctcagcactttgggagtcaaggcgttcagatccaggagttcttggatccaggagttcaagaccagcctgggcaacagagcaagaacccacctcttaaaaaaaaaaaaaaaaatgcccaggggcgggtgggctcacacctgtaatctcagtactttaggaggctgaggcaggcagatcacctgaggtcaggagtttgagaccaccctggccaacatcatgaaaccccatctactaaaaatacaaggtgcagtgatgggtgcctgtaatcccagctactagggaggctgaggcaggagaatcacttgaacccaggaggcagaggttgcagtgagctatgatggcaccactgcactccagcctgggcaagaaagtaaaaccctgtctcaaaaaaagaaaaagaaaagaaaagaaaaggggaaacaccagggcttgtttaatcatgaaaacaaggccacgtgcaactggcaaggccagcagagtaacagcgggaaattcccatgacattgatcatcactggatgaccctgaggaaagcagaggcatgaggttggaagttcacacggacacggctgaggaatcagaccagagggaggaagcgcagtcagcagacagagaggcctcaagagcgatcttcccaggataaaggaaaacataataaaacaggaggatgaggaagtgaataagggttgtrtgttgtttttaatttgagcacctttaaaaatccgagagaatgagacccttgagagagaaaagttgcctgtaagaaaacaatgtagtcaacggcatcagactctgagatgggcgtgcagggcccaggggaggcccagctgtcccatactggcatctgccctaacagactgagtcagcacagcaaggtcacgccttgaacttgaactccaaaccagggaggagaaacagaagcagctgtaccagcctcattatttaaaaagatggttgtgctgggtgtggtgatgcctgcttgtaatcccagttactcgggaggccgaggtgggaggatcgcttgagcccaggagttcaagaccagcctggacaacatagcgagactctgcctctaagaaactaaaaattaaaaaaagatggttgtaaaacagtatagaca

SEQ ID NO: 667383 - DNA, 541 bp, Homo sapiens
atcaggctcctgggtctcatgcactgtataagtcctctctctcgtcctccttttcctattcctccccctcccctctctctctccccracaatctttctccaactttaagcacctatggccacagaatgtgtcttattaaactacgctagtgaccagcagaacgcccatcacacaatacagactccctgattttttttttgagacggagtctcgctctgtgcccaggctggagtgcagtggcacgatctcggctcaccgcaagttctgcctcctgggttcacaccattctcctgcctcagcctcctgagtagctgggactacaggcgcccgccaccacacacagctaattttttgtatttttagtagagacagggtttcaccatgttagccaggatggtctcgatctcctgacctcgtgatccatccgcctcagcctccaaaagtgttgggattacaggcgtgagccatcgtgccccacaatttttttttttttttgaggtggagcctcgctgtcactcaggctggagtgcagtagcacagt

SEQ ID NO: 667384 - DNA, 541 bp, Homo sapiens
atcaggctcctgggtctcatgcactgtataagtcctctctctcgtcctccttttcctattcctccccctcccctctctctctccccgacaatctttctccaactttaagcacctatggccacagaatgtgtcttattaaactacgctagtgaccagcagaacgcccatcacacaatacagactccctgattttttttttgagacggagtctcgctctgtgcccaggctggagtgcagtggcacgatctcggctcaccgcaagttctgcctcctgggttcacaccattctcctgcctcagcctcctgagtagctgggactacaggcgcccgccaccacacmcagctaattttttgtatttttagtagagacagggtttcaccatgttagccaggatggtctcgatctcctgacctcgtgatccatccgcctcagcctccaaaagtgttgggattacaggcgtgagccatcgtgccccacaatttttttttttttttgaggtggagcctcgctgtcactcaggctggagtgcagtagcacagt

SEQ ID NO: 667385 - DNA, 1180 bp, Homo sapiens
gagtaccctttgtttgatctacatagaaaagcctcaaaaggctttttcacaggtttatctgtgtgtgtgagagagaatttttctatcttctttctcatgatcaggcaaactcattccttcttgcagccatgcagatgctgctgtctagaagtcaccacccccaatccctccaatatgtctcaagcaatctgctgtaaaacacacacacacacacacacacacacacacacacaacaacaacaacaacacaactcaataaatagcctattaaagcatgcatacggccaggcacagtgtggctcacgcctgtaatcccagcactttgggaggctgaggtgggtggatcacttgggatcaggagttcaagaccaccctggccaacatggcgaaaccccatctctactaaaaatacaaaaattagctgggcgtggtggtgcacacctgtagtcccagcaacctgggaggctgaggcaggagatttgcttgaacccgggaggcagaggttgcagtgagctgagatggcaccattgcactcccgcctgggcgacagagcaagactccatctcaaaaaaaaaaaaaattaataaaatggttaatttatgtgatgtgaatttcgcctcaataaacaaaaagtgaatatgccctggacagcgccgctagcccctacccccttctctccctccatgtggccacccagcccctcccctgccctccacatggccaccccaccccctttctgcccccccgacctccccgaccttgccccctcatggctgccccccccatgtccrcccacccccttcactcctgccccacctgccctccacgtggccacctcgcccaccttcccgtgccgcttgccattgcaccagtggccgatgtaggacacaggctgggtgctgcacttgaacatcccgaatccgttcctcatgccgttgaccacttcgccttcatacatgctgccgtccggccacgtgtacacgccgtggttcatcgggacattcttcacaaagtcgccctgaagcagaacggccatggggtgacagaaggaagtgttggggggtgggggcgggaatccctagtcctgcgggcggttccaggagctgcttgacctctgattctgttcttgcctctcctgtggacacactgaacatccccctcacactctctctcttccttc

SEQ ID NO: 667386 - DNA, 436 bp, Homo sapiens
aataaaagtgcttcgcattgcctagagcttcacaaggccactttatacacattttacaatgggtaccgtctcagagaggccagcaactcgtccaacacagcactgcaagtaagaagtaggaaagttattgttttgcttaataataaggccttacgcttcagggctaaagaaaagccttttcttacagaaattaaactccaattacagaaaggtgtgaagttcagtaaggccctggggcaggttatcctrcagcttttggcaccgcaggcaccgcccggcgagttccggcctccaggcacctgggcaggtgggcgttgggcgggctgcgggctgacctgggccgccccgcccccaccccgccccagctgtccccgggctgctccgagaggaccccgggcccaccttaccccacctcaccccacctccacccctggag

SEQ ID NO: 667387 - DNA, 2968 bp, Homo sapiens
tgtgagttcctcttgagcatatgcttcattttaaagacttaaagcaaggttttaagcctataggattaaaaacaagttgtattaaagtatactatacaggccaggtgcagtggctcatgcctgttatcccagcactttgggaggccgagataggcagatcacttgaggccaggagtttgagactagcctgaccaatgtgatgaaaccccgtctctactaaaaatacaaaaattagctgggagggatggtgggcgcctgtagtcttagctactcgggaggttgaggcaggagaatcgctcgaacctgggaggtggaggtttctgtgagccgggatcataccactgcactccagcctgggcgacagagcaagactgtctttaaaaaaaaaaaaaaaaattatactatacattcagaaaagtactccaattaatagcttgagaaatattcacaaacatgaacttacctatgtaagccagaaaccagatcgagaagctgaagaaaacccatgcccccaaaggtcccttccagttacttcacctctcatctgtcattatctggacttctaaaaggatagattagctttgcctggtttatactttatgtagtcacacgatataatttatttatcttactcaactctgaagattctacttcatagctcattctatttttgtctcactccatcactcaagccggagtacagtggtggccatcatagctcactgcagccttgacctcctggcctcaagggattctcctgtctcagcctcccaagtagctaggactacaggtgtgagccactgcacccgactaattttttaaaaaactttttgtagagacaggggtcttgctattgtgcccaggctggtcttgaactcctgaactcaagtgatcctcctgcgttttcctcccaaattgctgtggttacagatatgaaccaccccacctggcttgaaaatggttttaatggccttacttggagttctccaacaatgggctcataacagttattcctgggctcaccatggtggtagggcctggcctatcctctgtccctgtgttccgtgtgagcccagtactcccagagtcagagcttatctcatccttaggtcacttcctgcccaatgtgaagtatagtggagacgttggctcatggagctgagccctcagtggccccccatgtttgctgttttgtgtctttgcctggagccctgctgcttcctcttccacctgccccacaatctgctgatggctgcagaacatcaggctctctccgaaccctagtcagtggtttccttagtttggtaaccctcagtctttggctactttgtgcatccttgacctcatccacctattaaatccacatcagagctatttcccacccctaaccaagcaaggccctattttctctgggtctggaggttactcctgactccagcttaaaactactctcagaaccaccctaaccctatctctggcatctttagactttcccattcttttctctaaccattttctctcctcacagggcattttgggttccttggaaaatttgttctgatggcttttcctcacttgaataatgtaatctttggactgcttggcattgtggttgatgtgtgtggatcttgtgccttctctgatcttctcatgcttcctggaccccattttctttttctctttcctgcttttcacatgtccatctcccagagatatcatcaaagaagacggtttgaaatgttaggtttatctacctgattacatggaaatcatgagaaaacataaatctgaaaatatccgaatcttgattcataagctcttaaaaatataaattttggggccgggcaaggtggctcacgcctgtaatcccarcgctctgtgaggccaaggcaggtggatcacaaggtcaggagatcgagaccatcctggctaacacggtgaaaccctgtctctactaaaaatacaaaaaaattagctgggtgtggtggcgggcgcctgtagtcccacctactcaggaggctgaggcaggagaatggcatgaatccgggaggcagagcttgcactgagctgagatcgcgccactgcgctccagtctgggcaacacagcaagactccatctcaaaaaaaaaaaaaaaatatatatatatatatatatatatatgtatatatatatatatttatatatataaattttggaacctaggtgttactttttcttggatcaaagtcaaaatagtcaaaacatgcactgagaagtcttgctccctccttcctaagcctcctgttcgctcctttatattgtgtgcttgcaagcaaatctagagttttaggtctttgttcatacataaatatctgactagcactacattaaacacattttgtaattaagatgttaatgttgatggacatttcatgatgtttggagactttggacaaataacagttcacttgtaagtcacaactcttccccactgtctctccccccgcacctcacctctgtgtatttgtgctctgatgtacatttcaattttaagtgattacaaaaattccttatgctggaataaaaataacattgacaggtgctgaatttttaaatagtcaaggaatttctgtcaacttacattttaaatagtttctaaaatcaaaggttaatctatgtaagttttatggttattcatgttttattttcccaaagtttagaaaattctataaagatatatcctagagcaaatctgtgtcttgtgtgtagctattactaccttgtgatgtattttttgctggcaaaacattacatttacataggaaaaactgaaaccaataatagcactaaaacatcagccaccatattgtcacttgacgttttttgttgttgtttggtgttttttttttttgagacagggtcttgctctgatgcccacgctggaatgcagtggtgcaatcacagctcactgcagccttgacctcccag

SEQ ID NO: 667388 - DNA, 2968 bp, Homo sapiens
tgtgagttcctcttgagcatatgcttcattttaaagacttaaagcaaggttttaagcctataggattaaaaacaagttgtattaaagtatactatacaggccaggtgcagtggctcatgcctgttatcccagcactttgggaggccgagataggcagatcacttgaggccaggagtttgagactagcctgaccaatgtgatgaaaccccgtctctactaaaaatacaaaaattagctgggagggatggtgggcgcctgtagtcttagctactcgggaggttgaggcaggagaatcgctcgaacctgggaggtggaggtttctgtgagccgggatcataccactgcactccagcctgggcgacagagcaagactgtctttaaaaaaaaaaaaaaaaattatactatacattcagaaaagtactccaattaatagcttgagaaatattcacaaacatgaacttacctatgtaagccagaaaccagatcgagaagctgaagaaaacccatgcccccaaaggtcccttccagttacttcacctctcatctgtcattatctggacttctaaaaggatagattagctttgcctggtttatactttatgtagtcacacgatataatttatttatcttactcaactctgaagattctacttcatagctcattctatttttgtctcactccatcactcaagccggagtacagtggtggccatcatagctcactgcagccttgacctcctggcctcaagggattctcctgtctcagcctcccaagtagctaggactacaggtgtgagccactgcacccgactaattttttaaaaaactttttgtagagacaggggtcttgctattgtgcccaggctggtcttgaactcctgaactcaagtgatcctcctgcgttttcctcccaaattgctgtggttacagatatgaaccaccccacctggcttgaaaatggttttaatggccttacttggagttctccaacaatgggctcataacagttattcctgggctcaccatggtggtagggcctggcctatcctctgtccctgtgttccgtgtgagcccagtactcccagagtcagagcttatctcatccttaggtcacttcctgcccaatgtgaagtatagtggagacgttggctcatggagctgagccctcagtggccccccatgtttgctgttttgtgtctttgcctggagccctgctgcttcctcttccacctgccccacaatctgctgatggctgcagaacatcaggctctctccgaaccctagtcagtggtttccttagtttggtaaccctcagtctttggctactttgtgcatccttgacctcatccacctattaaatccacatcagagctatttcccacccctaaccaagcaaggccctattttctctgggtctggaggttactcctgactccagcttaaaactactctcagaaccaccctaaccctatctctggcatctttagactttcccattcttttctctaaccattttctctcctcacagggcattttgggttccttggaaaatttgttctgatggcttttcctcacttgaataatgtaatctttggactgcttggcattgtggttgatgtgtgtggatcttgtgccttctctgatcttctcatgcttcctggaccccattttctttttctctttcctgcttttcacatgtccatctcccagagatatcatcaaagaagacggtttgaaatgttaggtttatctacctgattacatggaaatcatgagaaaacataaatctgaaaatatccgaatcttgattcataagctcttaaaaatataaattttggggccgggcaaggtggctcacgcctgtaatcccaacgctctgtgaggccaaggcaggtggatcacaaggtcaggagatcgagaccatcctggctaacayggtgaaaccctgtctctactaaaaatacaaaaaaattagctgggtgtggtggcgggcgcctgtagtcccacctactcaggaggctgaggcaggagaatggcatgaatccgggaggcagagcttgcactgagctgagatcgcgccactgcgctccagtctgggcaacacagcaagactccatctcaaaaaaaaaaaaaaaatatatatatatatatatatatatatgtatatatatatatatttatatatataaattttggaacctaggtgttactttttcttggatcaaagtcaaaatagtcaaaacatgcactgagaagtcttgctccctccttcctaagcctcctgttcgctcctttatattgtgtgcttgcaagcaaatctagagttttaggtctttgttcatacataaatatctgactagcactacattaaacacattttgtaattaagatgttaatgttgatggacatttcatgatgtttggagactttggacaaataacagttcacttgtaagtcacaactcttccccactgtctctccccccgcacctcacctctgtgtatttgtgctctgatgtacatttcaattttaagtgattacaaaaattccttatgctggaataaaaataacattgacaggtgctgaatttttaaatagtcaaggaatttctgtcaacttacattttaaatagtttctaaaatcaaaggttaatctatgtaagttttatggttattcatgttttattttcccaaagtttagaaaattctataaagatatatcctagagcaaatctgtgtcttgtgtgtagctattactaccttgtgatgtattttttgctggcaaaacattacatttacataggaaaaactgaaaccaataatagcactaaaacatcagccaccatattgtcacttgacgttttttgttgttgtttggtgttttttttttttgagacagggtcttgctctgatgcccacgctggaatgcagtggtgcaatcacagctcactgcagccttgacctcccag

SEQ ID NO: 667389 - DNA, 1041 bp, Homo sapiens
gtggtgcatgcctgtagtcccagctgctcaggaggttgaggcaggagaatcatttgaacccaggaggtcgaggttgcagtgagccaagatcacaccactgcactctagcctggtgacagagcgagactctgtctcaaaaaacaaaacaaaaaacaaaaaacaaaaacaaacaacagaacaaaacaaaamacacacacacacacaaactgctattttgaatactttgtcatgcacttcactgatctctatctcttcaaggtcagtccccagcaccttattttgtccgtttggtgatgtcatgtttccctgattgttcctgatccttgtggttgtgttttgatgcctgtgaattgaaggagatatttgttacagtcctcaccatctggttatgcctagtaatgttcctcaacagtaaacctgtccagaaatcttgagcagacccactgtagtggtcccaaagcctatgatcactatagctattgcagcactagaaggagctctaagcccaggacaaccatggccagtgccacccaggcttgagttccttgacttatacagctggtacagaagctgtctggaatcaatctgaggaagactcaatgagagcaccagctttgtgtggaggctgttcgtgggttcaagcctggaagacctgtggtctgtgtttcctgcagcataatgtttttggctagtttctcttgtgtggtaccttcactggccagaatgcagagcaaccaccagggtttgtatatttgttgctatgagctccaaccctgtgctttgtttctaactgagcctaggtggtctagccctgctggtactctcaaaatttctcatgagatctcggaatggtggggaacctgaatgtctgctttgagttccacttttcccactgcagaaattgtgaatgtagggcaattcacagtgtgtggtgctgttttggcttgggagagaagtgacagggccagagaattgttcttcttaccatttcattacagtttttctcagttttttggtgcaataggatgtctcagcctctca

SEQ ID NO: 667390 - DNA, 1041 bp, Homo sapiens
gtggtgcatgcctgtagtcccagctgctcaggaggttgaggcaggagaatcatttgaacccaggaggtcgaggttgcagtgagccaagatcacaccactgcactctagcctggtgacagagcgagactctgtctcaaaaaacaaaacaaaaaacaaaaaacaaaaacaaacaacagaacaaaacaaaaaacacacacacacacaaactgctattttgaatactttgtcatgcacttcactgatctctatctcttcaaggtcagtccccagcaccttattttgtccgtttggtgatgtcatgtttccctgattgttcctgatccttgtggttgtgttttgatgcctgtgaattgaaggagatatttgttacagtcctcaccatctggttatgcctagtaatgttcctcaacagtaaacctgtccagaaatcttgagcagacccwctgtagtggtcccaaagcctatgatcactatagctattgcagcactagaaggagctctaagcccaggacaaccatggccagtgccacccaggcttgagttccttgacttatacagctggtacagaagctgtctggaatcaatctgaggaagactcaatgagagcaccagctttgtgtggaggctgttcgtgggttcaagcctggaagacctgtggtctgtgtttcctgcagcataatgtttttggctagtttctcttgtgtggtaccttcactggccagaatgcagagcaaccaccagggtttgtatatttgttgctatgagctccaaccctgtgctttgtttctaactgagcctaggtggtctagccctgctggtactctcaaaatttctcatgagatctcggaatggtggggaacctgaatgtctgctttgagttccacttttcccactgcagaaattgtgaatgtagggcaattcacagtgtgtggtgctgttttggcttgggagagaagtgacagggccagagaattgttcttcttaccatttcattacagtttttctcagttttttggtgcaataggatgtctcagcctctca

SEQ ID NO: 667391 - DNA, 1041 bp, Homo sapiens
gtggtgcatgcctgtagtcccagctgctcaggaggttgaggcaggagaatcatttgaacccaggaggtcgaggttgcagtgagccaagatcacaccactgcactctagcctggtgacagagcgagactctgtctcaaaaaacaaaacaaaaaacaaaaaacaaaaacaaacaacagaacaaaacaaaaaacacacacacacacaaactgctattttgaatactttgtcatgcacttcactgatctctatctcttcaaggtcagtccccagcaccttattttgtccgtttggtgatgtcatgtttccctgattgttcctgatccttgtggttgtgttttgatgcctgtgaattgaaggagatatttgttacagtcctcaccatctggttatgcctagtaatgttcctcaacagtaaacctgtccagaaatcttgagcagacccactgtagtggtcccaaagcctatgatcactatagctattgcagcactagaaggagctctaagcccaggacaaccatgrccagtgccacccaggcttgagttccttgacttatacagctggtacagaagctgtctggaatcaatctgaggaagactcaatgagagcaccagctttgtgtggaggctgttcgtgggttcaagcctggaagacctgtggtctgtgtttcctgcagcataatgtttttggctagtttctcttgtgtggtaccttcactggccagaatgcagagcaaccaccagggtttgtatatttgttgctatgagctccaaccctgtgctttgtttctaactgagcctaggtggtctagccctgctggtactctcaaaatttctcatgagatctcggaatggtggggaacctgaatgtctgctttgagttccacttttcccactgcagaaattgtgaatgtagggcaattcacagtgtgtggtgctgttttggcttgggagagaagtgacagggccagagaattgttcttcttaccatttcattacagtttttctcagttttttggtgcaataggatgtctcagcctctca

SEQ ID NO: 667392 - DNA, 487 bp, Homo sapiens
ggatgagagggtgagggcctgagatagtgtgaaggaagttggaatggaaagaaagtgacatttagaagaatctgaacataataactttacgatccggtgatttcttggatgagagagagagaaaatatgaatacttaacaagcataagggttttaagcctgggttactgaaaaagaagtgatagagttatagaactaaataaagggatcaaaaagaagtgcttgatactgattttctggtttagctgtcatttaaatacttagacacaatcatgttttatattttgaactcttttatgctttctgtgcactgacatcaagratatccattaattacataagggagcagaggtgcagaagacggtgtttgcgttatgtgctggtcagacttggggacaatctggctgcactatctgccatccatcttgtctccaaggctattaagtgcatctgcctcgctggactcactccagctcccaagaatggaa

SEQ ID NO: 667393 - DNA, 1154 bp, Homo sapiens
acaaaaacagtagataaatccactcttgcttaaaaaaaaaaagactagaataagaaaatacagtcattcctgggtatccacgtgagattggtagatatccggcccttctataaataccaaaatccaaggattctcaaatctcacagtcagccctgtggaacctgatgacacataagtcagccctcgccctccatttctccaaaactgtgggttctgcatctcaggaatattgtattttctatctgcagatgtggaatgcatggatatgggaggccaatggtattgccattaataacatcaattaaagtcagttaatgttcaccgtgcagaccgtatgaacttagactacttagactactctctctgcctacctgagttgtgaacttcatataaaatttaagagaaaatagatacaacctttgtatgcaaagtaatatctgagctgaaatatgaaatcaaataaattttgatgtgaaggtattttgttactgaataaaagctaatatattttgtaatgttttgctgtctcactatcttttgagggtgtatttgttgttttagcaaaaagtatcartatatgggttctgatagtatcctttgagttggaaagagtacataaattgtattaatgtcaaagaatatcttgatttcaggacgcccctaaatcgggtactagttgcagctctcgctgttcaagttccagacaggattctgagagtgcaaggccagaatctgaaacagaagatgtgttatgggaagacttgttacattgtgcagaatgccattcatcttgtaccagtgagacagatgtggaaaatcatcagattaatccatgtgtgaaaaaagaatatagagatgacccttttcatcaggttggtttatggttttggcttatgtggagctatgagtcaagctcctttgaatttatgttcaaatgttacagaggtgaagaaaaagcttacattcaagcttatatttctataattttttttctttttatgtgagctgtggtctggcttcatcaaaacatagaatctcagtacttatattgtggttatgtatgttcctgaaaagttattggtaactggagtttcgtaagtcaaatcgtgtgttaggtgcaatagtactttcttactgaacatactttgtggcca

SEQ ID NO: 667394 - DNA, 587 bp, Homo sapiens
cataccagctatataccagatcaacataatccaccaatttgaaaatgaaaccaaagttcacttctcacatttttcctccctacaagatgctctagctaacacaccatatttggaaaatttataaattttcaaaccctctgcaaaatggaagtaaacttgaatctttcttatggcctactaaataaacaatcaaaaactggcaatagattctgatgtattcaaaatcaatggaaaacagtgagaaagccctcccctgaagataaactttcttcttagattggagaaatgatttagacagtacagcaaacaatacagtatagatatgactcaaagaaaagctctatcatcaattttagcaataccagcagagaacaattaamaacaaatctctatatttacatagaaacaggtgctatttataaatacattttaagaaaccagagaaaaacacttttctctctattcaaataagaaatctacatttttattttgtttctcaacagatctgtttctaagaaaaattgcatttcaaaatgtggcttggctcacacacatacacacaaaggcaacttaaaataaagggaatg

SEQ ID NO: 667395 - DNA, 601 bp, Homo sapiens
agagttttgaggatgagagaatcagccttttcaagtacctacagagaatccaaggacaaaaacggtcattaagtttgaagactagtatgttactggtaaagtggcgagagtatattcagtagaataacacagatagaaacaagatagtgagaaaaagaaaagtggctcattctttctctttttagatacrtaataaatgccaaacagtaatcaccactggtcatactaaacacagacacacagacacacagacacacacacacacacatgcaaacatgaatgaaaaacatttcaaccataattatattatctgtccctgtccttggaatccttaatatttggaaagatatagaaacaaaatcaggttcagattatagccaccgtacatgaaatgtatatatatatatatatatattttttttttttttttgagacagaatctcgctctgttgccctgttgcccaggctggagtgcagtggtgcaatctcggctcactgcaaccgccgcctcccggttcaagtgattctcctgcctcagcctcccaagtagctgggactacaggcgtgtgccaccatgtctggctaattttttgtattttta

SEQ ID NO: 667396 - DNA, 2139 bp, Homo sapiens
gctctaaacgatgatgtagtattgtttgccaattagctgtccgaagaattagcaacttttatttaccatactatatagggtttacttgatatagctatctatgtgtgaaaggttgataactttttaaaagaaggtgttgaaaaacatggtaacgaataacctgtattcatttcaaagaataatagctacaaattcaacatgtgatatgtgaattctaatgctgtaattcctcacacttgaattctcttatgattctctcactattcaactaccacttgagaatcattctggaggccgtttgaaaaaacactggatttttcctactcactttcttagaaactgtggtgagaaaacaagatagtattctttctatagggtatctgctcaagtgtcaaaaaagtttgacattttcctatgtgtttttgagagcaaattttcctttcttaaaagacaactgaatcccaacactttgggaggccaaggctggcagatcacttgagtccaggagtttgagaccagcctgggcaacatggagaaaccccatgtctgcaaaaaatacaaaaattagcccggcatggtggcacacatctgtgatcccagatactcaggacgctgaggcagaaggatcacttgagcccgtggggcagaggttgcagtgagctaagatcatgccactgcactccagcctaggcaacagagtgagacactgtctcaaaaaaaaaaaaaaaaaaaaaaagatagctgtaagaaaccagttgaaataactgygaataattgcctgtcccttaaactctttccatctctttcagtcattgaacctgaatgggtttaaggcaactagactactttgtccccactctagtcaggtcttgtgggcagcctcagaattgattgtgctccttcaagaattttcacgccaaaggtgttgcatacatggacgatgcttccccaggatgcacacccctccttgtgagatagctgagtatagaagaatcaactgacccaagatagagaaactatctcctcctccctgccaggcatacagaaataaaggacacccattttgctgatgtaaaggacatgagtggagtgaggcaaagggaagaaatcaggaccagtagcccaaattgcaaataaatcctcttaattaggcccttattagtggaaaactagaaaagtgtaatctgttaccaaaaggaagaacttgttctaacataacaagaacaccagcataaacatattgttctgctctcagcaatgcctatcagtccccacctcagatgagctgcagaaaatccttcctccctgctctcccatcctctgccaccctcctctataatctaacctctttcagccactggctcaagttcatagtgaatcatccacccactttccccttaacacttgatgtcctttactcctcaagtaggagaaaagcatcgaagggaacaacctttgctgatctggcctcggaaagacacagcaacaatgccaacaattgatgtcttgataagtctgaccaccttatcactagcataattccagtgaattatgacgcacagtcacttcatagcttctccattttaccagaccctttttttttaattattaggagacaaggtctcaggaaaggagtgggtaaaacacttatctccagaaagccagcaagagggaagaaggaagaaaaccccatcctgcatggtatgatgctgagattcctcacatatcttcaaagcatcctaagaaagtaagtttgagtatctgtgggcacttgggcttcaaagaacaaacaagagaggcagaatcaagggagttcacaactctctttcattcttacattataacatttatacattcatagacagcaaatgaagagtctcacacacatcatgtttaggatacaggtcagaaagctgagacacaaagatgtcaaccacttgcgtatttctgactcttagttctgattctcaggacttaatttttgtcttttgttaatgccccatcccagagtaaggtcaactgtttcttcagggccaagggactgtgggtgtccagagaatgctcaattggaatatttttttcagctcttttattacacaaatgaaatactcttcaacaattgttggggggtggtttttt

SEQ ID NO: 667397 - DNA, 611 bp, Homo sapiens
acttctatgttacactgtagtgaatttcctttttagtttaaaaaatctgcttttcaaaaggtaatcgaccacaatggatgtggtataattccaatcatcaacagaaacgttccctctgtttcattctttgtatttatcttgagcagcataaactcttctttcccacatatgaaaatctttgaaatgtttatggaaatgcttactaaatgaagaagtttgctaaatgtcccaaatattattaaacctgtactatytacgtgtgcttggctatcaaaactgactccttgttacatagatgtctgggagagtcatcctatgggcagatctccaaaactctccaaaacaaatctccaaaactctatgactcgtgtattgtagacttttggtggttgctcattacagcagttttcatctgttaggtggtttgaagcatttaaaagtcagatagttatatgctgttatcaaaacacagatctagaactgttcaactgtcatgcattaagagttgctatgcaggcattaaagatgttataatccagagctcttttgaggcacatggacatgataagactatctaatattggctaacatttgttgagtgcttgctaaat

SEQ ID NO: 667398 - DNA, 607 bp, Homo sapiens
tttgggattctattcagtcactggaagtctgtaaagaaaatataaaatagaaatctaagctattagattaggaaggccattggctgggattttacaaacatctcaaagagtaaaatattattttccattgaatctaagatgccatcaattgtggcacaaaataaatgtaaccattattttatataccactatgaaaattaaaaaaacagcctcaatctcatgatgaaacaccatcaagtgtgagagacattccaatttcasatatgtcaaaatatgaaaaagtatatcttagtattaatggaatacagtacacattagctgcagttggcatcttcctctggggcaaactctgcttacatattttcttttcataagcaatgttgaaatggcctgttatggtacagttatagtaactgtgttcttcaaagttaagcagcagtcatcctagcctaaggattgtttcatgacatcagtaactaaacagtgcaggtggaaaatattcttctacaatttggtatctgagttatcatgtggtatgaggaaataggcaattgagcaaggaagtgaatgcagagtaagagcgaacatggagcactcattcacttga

SEQ ID NO: 667399 - DNA, 1259 bp, Homo sapiens
cagtattacaatacataattatgctatagattatttttgtcacttcccctattgataaacaatactgctgtgaacatttaacatgtccttaaatacaatatatatgtgagaatttctttctttttttgtttttgagacggactcactctgttccccaggctggagtgcagtggtgtgatctcagctcactgcaaccttcgccttccaggttcaagtgattctcctgcctcagcctcctgagtagctgggattacaggcgcccaccaccatgcctggctaatttttgtatttttagtagagatggggtttcaccatgttggcaaggctggtcttgaactcctggcctcaagcaatctgcccayctcagcctccgaaagtgctgggattacaggtgtgagccatcacgcccaactgatgattttgttttctttttttctttttgacagggtcttgctctgttgcccaggctggagtacattggcacaatatttcccaggctcaagcaatcttcccatctcagcctcctgaatagctgagactacaggcacgccccaccacacccgactagtttttgtattttttgtagagatgggtttcatcacgtttcccaagcttgtctctataactcctgagctcaagggatccacccaccttggcctcccaaagttctgggattacaggagtgagccactgcaccaggccatgtgagaatttctttaggtatatgtctaagagtgaaattgtaaggcatgcacattattaaccttaccattatgttattgcttaattgctttttaaaatgagtgccagtttagacttccaggagaaaaaggtaagagtttgtatttctcccaattcttgtcaacacctgatattcctagaccttagcattttatgttttaactagtataggtagagcttttttgttgatgcattttacatgccatttttttgtttataattttaaaaattatttttgattaaagtaaaggtatgtgataaaaaaatctaagtagaaaagcacattcaatgaaaagtgagtccactccccatttctgaccctatcccttagttttccttcccagggggaaggaacctattttttatgtatcccttcagagatattccatgcatctacaacatacgtgtatgtgtgcatacacacctacatggctccataccttgtttttctgatttaacacaagatcttggagccttttttcaattcattattatttatgtttacttcattttaaaat

SEQ ID NO: 667400 - DNA, 1259 bp, Homo sapiens
cagtattacaatacataattatgctatagattatttttgtcacttcccctattgataaacaatactgctgtgaacatttaacatgtccttaaatacaatatatatgtgagaatttctttctttttttgtttttgagacggactcactctgttccccaggctggagtgcagtggtgtgatctcagctcactgcaaccttcgccttccaggttcaagtgattctcctgcctcagcctcctgagtagctgggattacaggcgcccaccaccatgcctggctaatttttgtatttttagtagagatggggtttcaccatgttggcaaggctggtcttgaactcctggcctcaagcaatctgcccatctcagcctccgaaagtgctgggattacaggtgtgagccatcacgcccaactgatgattttgttttctttttttctttttgacagggtcttgytctgttgcccaggctggagtacattggcacaatatttcccaggctcaagcaatcttcccatctcagcctcctgaatagctgagactacaggcacgccccaccacacccgactagtttttgtattttttgtagagatgggtttcatcacgtttcccaagcttgtctctataactcctgagctcaagggatccacccaccttggcctcccaaagttctgggattacaggagtgagccactgcaccaggccatgtgagaatttctttaggtatatgtctaagagtgaaattgtaaggcatgcacattattaaccttaccattatgttattgcttaattgctttttaaaatgagtgccagtttagacttccaggagaaaaaggtaagagtttgtatttctcccaattcttgtcaacacctgatattcctagaccttagcattttatgttttaactagtataggtagagcttttttgttgatgcattttacatgccatttttttgtttataattttaaaaattatttttgattaaagtaaaggtatgtgataaaaaaatctaagtagaaaagcacattcaatgaaaagtgagtccactccccatttctgaccctatcccttagttttccttcccagggggaaggaacctattttttatgtatcccttcagagatattccatgcatctacaacatacgtgtatgtgtgcatacacacctacatggctccataccttgtttttctgatttaacacaagatcttggagccttttttcaattcattattatttatgtttacttcattttaaaat

SEQ ID NO: 667401 - DNA, 639 bp, Homo sapiens
ttcaatttatttcaaagtaacttctggtttttattacatttggaagataaagcaacttatcacatgtaggttacaacttaaaattcgtgtatgagccattgcttatattttctaaatctgacatgacccagggggtttctactgctcctaccaccacccaggacatgcgatgaagattgtgcacgttaccgtgagggcrgaagcaggttagtagctgtaggagctgtcacatggatttactataatgcacttgaaattgtgtatgtgaccttatcaggcatttaaggaccataatctctccttgacctaagaaatcagcttgaagtaattcacttagatttcaaattttaatgtggatacccaaggctgcaaatctgttattcagtacctgctacacttttggggttgcctcttttatgcactgttagaattgctagaaatttagaagtccaattggaaagaagcatatcttgttagaaagtattcccagaaaatgaggaaggctacattttaactgtgtcttgattttacagggagaaaaataaagttaatattttgaggaaaaaataaggcttttaagatgacatgctatatagtagacaaatagtttaactcggtgcctacttcatgtacactgga

SEQ ID NO: 667402 - DNA, 1235 bp, Homo sapiens
gctcagcccagggcccagagccgaggagcccgggtgctcattgatattctggccaccagcatccttaccgggcctgagtaaacctaacccgcgtctatcgccagatctggtaattaatacccttgacggtttttattggaatgaagcaggatctgtgcatgacttggtttttaattaataaccagcctccctccacacgtccctcccgtcccccaagtgcccttgaggacaggatgaggtgtgggcaggggcgggggggcaagtcaccagggcctggttcagttgtctctgaagggraggtgcagggcagggcacagggaggcagccctggggtcatttgccatcagatgccccagacattgggcaggatggaggagctggttctcagctgggctaggtccagtgatgttctgaacacagcttctgacctcagggaacacgtagtctaagacatccaaacccacagacacctaaatcccaagagcatgtgctacaggagaagcctctggaaggtgctggagaaacagcaaacccagggcaggcgcagtggctcacatctgtaatccccacatcttgggaggccgaggtgggtgaatcacttgaggtcgggtgttcgacaccagcttggccaacatggtgaaaacctgtttctactaaaaatacaaaatatatatgtatataaaataaaaaataattagctgggcatggtggtgcatgcctgtgatcccagctactcggcaggctgaggcaggagagtcacttgaacccgggaggcagaagttgcagtgagccgagatagcgccactgcactctagcctgggtgacagagtgagactctgtctcaaaataaataaataaataaatatatatatatatatatatatatatatatatatatataaattagccaggtatggtggtgcatgcctgtaattccagccacttgggaggctgaggcaggagaattgcttgaacccgggaggtggaggttgcagtgagccaagactgcaccactgcactccagactgggtgacagagcgagactccatctaaaaaacaacagaaaaaaaaaaaaaaaaccaaagccaggcaaccagcttggcctggagacatcagaaagtgcctttgagccggggcttgaaagatgatgtcgctgttctggtgacaaagaggagctgatgttctaggcggcaggaatggcctgtgctaaggctcagagtcagggtgaggctggg

SEQ ID NO: 667403 - DNA, 1235 bp, Homo sapiens
gctcagcccagggcccagagccgaggagcccgggtgctcattgatattctggccaccagcatccttaccgggcctgagtaaacctaacccgcgtctatcgccagatctggtaattaatacccttgacggtttttattggaatgaagcaggatctgtgcatgacttggtttttaattaataaccagcctccctccacacgtccctcccgtcccccaagtgcccttgaggacaggatgaggtgtgggcaggggcgggggggcaagtcaccagggcctggttcagttgtctctgaaggggaggtgcagggcagggcacagggaggcagccctggggtcatttgccatcagatgccccagacattgggcaggatggaggagctggttctcagctgggctaggtccrgtgatgttctgaacacagcttctgacctcagggaacacgtagtctaagacatccaaacccacagacacctaaatcccaagagcatgtgctacaggagaagcctctggaaggtgctggagaaacagcaaacccagggcaggcgcagtggctcacatctgtaatccccacatcttgggaggccgaggtgggtgaatcacttgaggtcgggtgttcgacaccagcttggccaacatggtgaaaacctgtttctactaaaaatacaaaatatatatgtatataaaataaaaaataattagctgggcatggtggtgcatgcctgtgatcccagctactcggcaggctgaggcaggagagtcacttgaacccgggaggcagaagttgcagtgagccgagatagcgccactgcactctagcctgggtgacagagtgagactctgtctcaaaataaataaataaataaatatatatatatatatatatatatatatatatatatataaattagccaggtatggtggtgcatgcctgtaattccagccacttgggaggctgaggcaggagaattgcttgaacccgggaggtggaggttgcagtgagccaagactgcaccactgcactccagactgggtgacagagcgagactccatctaaaaaacaacagaaaaaaaaaaaaaaaaccaaagccaggcaaccagcttggcctggagacatcagaaagtgcctttgagccggggcttgaaagatgatgtcgctgttctggtgacaaagaggagctgatgttctaggcggcaggaatggcctgtgctaaggctcagagtcagggtgaggctggg

SEQ ID NO: 667404 - DNA, 1326 bp, Homo sapiens
ttctctcctctccctccctcccccgcctccctcctggcagtgtgttccagtgccaacaagaagtcagcatgtctsttccagaaaatcacaagctccatcccagccacccctatccccgtcggtgggcacaacagccctgtctggaaccctcatagatggtgcatgatcctacacactgaactggtagcccgcacaggcaagaaaaagcctccagcttcgcaatttcaagggcaacttcattcggtcccactccaaaggactcctcccctcaacctttttttttttttttttttttttgaggcatagtttccctctttcacccaggctggagcgcagtggcgcgatctcggctcactgcaacctccacctcccaggttcaagcaattctccagcctcagcctcccgagtaactgggattacaggtgcctaccatcatgcccagctaacttttgtatttttgagtagagacggggtttcaccatgtttgctggtcttgaacctctgacctcaggtgatctgcccacctcagcctcccaaagtgctgggattacatgtgtgagccaccacgcctggcccctcaacgggtttatattctggggggtggggaggcagatgcaaaccataaaagaatagtgaagatcattccagactgtgatttgcactatgaacagagcactggggagagagtaactggaatgaacgtgaaatagaggaaacatgtaatttacagtgagttctgaaggataagaaggactccttgtacaaggcaggcacaagaggaagaggcgcaagtgtttcaggccggggaactagcgtgtacaaaagctcagaggcaggacacagcttgtggtgttccagaaagagaaaagcctggtgtatgataacttaggggcaggggtgtgagacagggctgggacaaggcaggggggtggtggtgggggggagggttgggccctgggggtcttctctggcccactctacagagcctagatgatatctagtgtctcagtgctagatgtgtgagcaggaaaggggcaggatctgatttacatttttatttttaaattagttttttttttttttttgagacggagtctcgctctgttgcccaggctggagtgcagtggcgcgatcttggctcactgcaacctctgcttccttggttcacaccattctcctgcctcagcctcccgagtagctgggactgcaggcgcccgccaccacgcccggctaattttttgtatttttagtagagacagggtttcaccatggtagccaggatggtttcgatcccctgacctcgtgatccgcccacctcggcctccc

SEQ ID NO: 667405 - DNA, 697 bp, Homo sapiens
attgtttggttaagcaatgtccagtgctaggattatttgcaggtttggttttttctcatttgtctgtggcattggagaatattctcggtttaaacagactaatgacttccttattgtccctgatattttgactatcttactattgagtgcttctggaaattctttggaataattgatgacatctattttcatctgggtttagtctcaattttggttatctttgtgttcctcaagctctttaaagaaaaagatgtaatcgttgtaacctttgtctcattccttaaatgatgcttccaaacatckccttagtgtctgcaggtgttagtggtgtgctaaaagcaaggaaagcgagttagtcttttcagtgtcttttgcaattcaattcttttgtcatgtataactgagacacacaaacacagcaggagaaatctaaaccgttgtgccttgaccttcctctgctggtcttgttccagggttatgaatatgaaaaaatagagatgagactttttgtgtcaactctgtccacaagagtgagttatctagtatgattagtatagctttctccagcatggcagcaggaagtaactacagggcctcttttatgcctgacatttcttcccttcctttttccctgcctccctttttcatcaattgcgatgctcccacaactctttacagacttgtgaaatcttcaaga

SEQ ID NO: 667406 - DNA, 1285 bp, Homo sapiens
caacctccacttctgtgcattacaagtgatttgaatttaaaacatttcttgaaggacatcagaaaaatcttttagtgctgacaaattcaagtaaagtcctttggagagaaagttagttattattatcttagacaaaggtttgggatggaggttgattgtattttcaaataataatcttcaagggctaaaggttttgttttccaagcaggtggacttactttgctctttctttgtttttttcttttttctttttttttttttaagtttctstctcccctcccctctccctttgccgcttgactgtatcatactgtgttactggttgaggaggtgctgcgtcaccttctgtattgttgcttgatctttgatttcctgtgaagcacaatgaatcttacattagactcttctgagtcaggtggtgcaccatctgttcccaggcctggaaaacatgagtaacacagagcaacagaaagcaacagctaccccagtttttagcagaatattcatatttacatagcaagagagagggagacaattctgattttaggcagggtagaagtttatttttctcacactcatcgaatacatttgacataaaacctttataaaaattattttacacattagtacactcataggatgggataggtttgaacctacttgcctttgttgttctggggtgatgttagatttaagtggttgggaatggttgtgtaattgtacataagagctgcattgcatgaggctacccagaatacacgagagcagctggcaaacctaggtattgaagctgatagcaggtagcctataacaaattgaaagaatgaaggccaaccagatctggctgccaacctgtgatagcatttaaaaggttgaactaaacttctgttaagaacatgagaagcccattaccgcacagctttaaatccccgagctaaataattaactatagatgaaactcttttaactatacattgccctggtagtactttattcaaattaaaagcaaatcactttcataatacactcatcagtttaaacgcatggtatacgctaacattattaaaacatatgtctgtcatgaattaaagcattaaaggcccacctcattagggtcacacaggtcctcaatatgccataatgacttccctaaatatattatgttgattacagaaaaaaaatagcatacttttagaaagtatttaaaataattcattgatcatcctgcactgctttagttcttactagatatttttaagaactggcattcagtaggaatctaaaa

SEQ ID NO: 667407 - DNA, 1532 bp, Homo sapiens
tggctgaaatttgatagatgttttttaccctcttaatttcttagtgaccatttttctttatttcagatttgatacactttatatttactttgttttggaaagcttcttgaaggatacacccttattccacttttgttcctaactctagtttcaataccctcagaattacaagcaacagtcaaaaagccatagagattttaggataaattttttctttcatttctttttgattctgaagtttgcgatttcttagttggtgtcccaatctcaccttgtaaacttctaattgtcctgcgttcctaaagtgcaaagggatgccaaatatgtgtgtttttagatgtatcagccgttcatctacaaaattttgcctgggattggggatgaaatacagctttcaaggaatttagaggttgtccaaagtaatgtgccaaattatttaagcccccgaggtagtttggatgtttatcccctccaaatctcaggctgaaatctgataccaatgttgaaggtggggcctcatgggagatgtttggatcatgggggtgggcagacccctcatgaatggcttggtgcccttctccctggaatgactgagttcttgctctgttacttcatgcaagaagcaattgttgaagagcctggcaactccttttttctttcttcctctctcgccatgtgacatgttggttcccctttcccttctgccataagtggaagcttcctgaagcctttaccaaaagcagatgccatatccatgtttcctgtgcagcctgcagaactgtgagtcaaataaacctctgttctttataaattactcagcctcaggtattctcttacggcaatgcaaaacagatcaagacagcccctgcggcacctgtgctagctcacacacccccccaaatgggtgccttgtccctgtatatttaccaatatcaaaccttgtctccaatcctcttaactcttctgctctccctgtttgatagtctatttgccctacttggcacgtctctttacttacctcatggtggtcactgttttttttttccacaattataaaaataggtaaattgtcacttccttggagacatctcctatgactgaccttgaagagcagcagcccctcaaaccaccattcttgagattttgcttccaacatcaccaccatgaatgctgtttagctgttccttaatttttgcttccttccctctaagtctgaagtctctagaatgagcttttgattggggagccttggtcacttgctctcagcttacctgctaaggcacagagggcggctatctgtcagatttaacctttcggatggcttcctattaaatagggtttggatgctgaaaagcagcaactgttttctacaatgcaaaagcaaatgtcttcatgakagtattcaaatgtatatgtttggagcatatgtgtatggatatagaatattataaatacatttattgctatttaaactctctcaagtctgtctctttaggactaaaataagtgtttcgattagtttgtgcatttca

SEQ ID NO: 667408 - DNA, 667 bp, Homo sapiens
tgattccaacaacagacaaaaatgtagtgttgaggagaatggttaacttcctgaattcaaccacttttcttcagcatcctggtttaaacttcttattctagataatctcatttatccctcggttactaatgagggaggtaccactagatatctatggcactaattcgatattcaaacaagtgaaggaaattttgagctgaatgatactttatttctgtttatctctagttaactaattacaaaagartaataattatagcataatagcaaacgttattgagcacatcctctgtgtcagggatggtactgaggatgggttcaaatctcagctttggacattttccaagtgagtgactttaagcggggtacttaacatccaggtgactcaataacactacctataaaatgacaataatagcacatcaatatgtaccagtttgttaagaggattacatgtgttcatataaacaaatcacttagatcattgcctagaacacagtaagaaccaggtaagtgtgagctaccattagtatcatctcaattaatctccacaacagctccatgaggtaggtattattataacaggttttacagatgagaaaaatgaagcacagggagaaaaaaccactccccaggttagctaggtagcaaatgtcaagcaaagcca

SEQ ID NO: 667409 - DNA, 593 bp, Homo sapiens
ggctgatcttcaaggaaaggctctttttctgtgtatatggtaggctacttcccttcaagacccctatgtgaatctagaatctaaaccatggatggcgggatggcgacacctgtgctaatgtttgagaaaaagtagtaaaagaaggagagagatagagagataaagatacagatctatttatctgtatctatctacmtctatcagaaagagataaagatacagatatagatacagatctgtctaactatctatgagagagagagagagagagagataatttgcctctattgcccaaaatggaactgtattaagttgtatgctccaaaagtctagtcctagctcccaggaaggagaagagaagagagaaagaaacagccagtgtttttttgagaaaacaaattctgggcttttctagcagacttgtggatagaagaggaaaaaggtaggaaaaaagaagatcatatagacttactttatagtgggaacctcagagtctttaccatctaggcttcatgagagttgctaaatgtgaccagacttgttaacccatagctcctccccaagaaatttaatgtagtgtatgctcttccttg

SEQ ID NO: 667410 - DNA, 964 bp, Homo sapiens
tgcattggctgatgtgccaattgaccccagcaatacaaggatctgttctatgaagaattgagtggaaagtgtgggatgtttggggaaacgtccagcagcttgggttttggtaaaatgttgtggaagagatcagcagcattgttgtggcaaagtccagtctgagcatggagaagggagaagtgcatcagagctttatagtttagatttggaagggaccttgggtgtttatatagccctacatttcataaaatatttcttagaactctagtcctacaagatgcctgatgatattaaacaattctctaattaattatatttgggaaatacagaaaactacatttccatagggaaatacatatgaccaaattggagctcaaagcatttgggaaattctatggtaaagacagctgttacttatctttttccaaatagaatttgactattaaacactatttgtcatctcccagaactaatgttctggagaattcattttggggatcaatgatctaattttatcacaaagagtaaactgaggctcctaagggctcaggacttattcaagaaaagaaacagagctaaagacctgaccctttgatttcaatgtactttataaagtggctcttaccactttataaattaaaaaawatatatatatatataattattaggtatattacagaatttaaaactatgtatctattactattaatgcaccaaagcattaaacccatacacttgagaagagtattcaaaagcaaaaagatttttataaactaactttcagttatgcagcaatcatgcctgtgtggttctggatactggagactgaagtttagaagagtttactttttctctcaaccttgaattttagcacatatagttctatatttgtggacttgtcatacaataattaacaataagtaagcctgttatcccaggcactatgtgaagggcttcatatgca

SEQ ID NO: 667411 - DNA, 661 bp, Homo sapiens
cccatccaccattggttgggaacctctcttatgagcattagctccccaacactttaggctcactatttacatatgcagagtaggcttctgaagaaaattgaagccctcagacagagaactgttagtgcttgaagtcagaaaccattgacatactcagaatgttgagtgccaagagggcatacaagcagggcactaacagtatctgctgtaggaggaagcttaggaggcagagtgaataaagggttggttgtaggagatacagragaggcaatagtctagaataatttccaactttctgataggtgtgatcaaataaatatcaatacattctgattgagagtatggagaaggaagactgaagatttaaacaaatgaatttggaaagtttcgagttccaatttcactttttgaaatataagaacaccttatgttgaagtgtaggtgtaaggattaagtaagccaatatttgtaaaaaaatctttttcagtatctagcttgaaattaatgtttaattatacataatacttcttgagtgaagtattatttaaatggttcttgtggcaacccattacattttgcatggacaatgactaatagaaagttctaaaattatgttaattttctcatccatctatcaatccatttattcatttactaactg

SEQ ID NO: 667412 - DNA, 1305 bp, Homo sapiens
ttccttcctkcctgcctgcctgccttcctgccttcctgccttcctgccttccttctttctccttccttccatcctttctcccccttttcctgagggaattgaaaacaataaaaattcgaagaaaaaaatgtggacacctataatcatgcaaccattctctttcctcttccttctctcattttctatgaatgtacaggcaaataccatcatctgcagtggttatgttctataaagtcactgcaaacactgaattagcaaatattgagccattgctcctgggagaaatacagagttagggattgtgaacctcaggtcacaacattttcaccaacagatcaatccataactttattttaagtatatttctgtttaatggcatctcatctaacatatactgttgatgcattagcattgaactcatgacctatagcactgtgactcattcccaaatgaagcttatttaacacctgtattttctccagaaggtacttcacagctttgttgtgtttaggatcaccaaacagcactttagtcctatgcttgggggacattttaaacagtgaaatcatgaggaaaaagcacaaaaatgcaaaaaatgtgtcatgaaattgatagccaaaaggacacgtgtttaaaatataagaactgaaataagaaggtaaagcattgccttgtccaatctcagaaatcatgcccatccggctatttgaatttttgccactctgtccacatctgtaaatgaccatgaatgcacagagtattgacttgggagttagaaatacatttcacagagtagatggatttgaaaatatggaattcattaaaaatgagaatcaatggtacaaacacacacatatagtctgttgcctttcacttgtctttgtcaaattacttttacatatattttgaggagattttaggaaactataatacatcccatttagatagaaactagttgttagcagacatacttccaagagatgtagactttaagtttagttgagatgtgctgatttttgctgtgccaaaacaatttaagaaatttagaaaaacagacccagcaggcccacctacatgtgtttttagttgttatcaaggcagggacacacacagggcttttgaagactactggcaaaaaggcccttccccctacataaacagagatgaggaataaagtatattccactctaaagagttaacatgtttcctggttgaaaggtggaagataaatttctatatgacagagaaagaggcaaagcaaacctttgggcagcctgagttggtgctgaagcagcatccaggccc

SEQ ID NO: 667413 - DNA, 1778 bp, Homo sapiens
tggaaaaaaaaaccctcttctctacttttgactaaacttacttctttattttttctcccaattataatttccatgaacatttttcatcctcttaagtcaaaagagaacgacacttaatgtctcctttttgacagtgactcaaaatgaaataaaataaaaatgcataagtgcctttatgtaatctagcataaggtcttgttagctgaatgtatttcacctgaaatgaaaaataaaaggtaagcaaacccgaaagacggagggtggtctgcgcagtgtaaattacttgacatcttggttctggtttcctggtgtgaacagcgatgataagtgttgacttctcctgatttaccaggaaggcacgacattcactcgtgctattgtgaagacgctgcagagctgaggggagccccctgcctccttcacctagagcgcattgttgctggcctgtgtgctgggaggacaggtctcactgaattgatctcaaccagagttttcctagatctcactagcttttgtttgcaaatactttcccattaattcctaattcagttttctgtggtttgcccaatgcagacttattagtcccatttcaaagttttgcctcgttgtttcggggaagtgcttggagatgtcttttgtgaactagccacagttttcacacagttttccagtctgggcccttgagttgatttctcctgcttctctctcyagagagcttattattgacccctgaccaccagaacacctgctgtgcccatgcagaaatccagggcaggcccctttctccctcttcttggctcctgggttctggagagtcattgcttctcagatatatgctttccccattccccttaagaatagaagcccgaggaagatcatttcctcctctgtttctgtaggtgaacttatcatagttccttttcctagaatagagattccaagggttatcaaccctgacagttgcctggacatgtgtgcatctgttttaggtttaaaattaatcttggtgagatagagaatttccctgctctactctgtaaggctgaccatggaaggggacatcaggaactctgtttctcatgttttgagacatgagaatcatgtctcaagtgggtatcaatgggaaattagtatgaagtgcccaagtggcttaccagtaactgcagaacattagaagtagagttattacacatgatattaaataccacaaaaacattccccaccaaaaacaaaagcaggaacatatctgactgtcatgcatacagagtttacacatgtgatcattatgagttcataacagcatattaacaaatgtgaaaccaagacacttggagagattttgtgaaataaaagtagtaaagtttaaacttgattactatgtaatcaatatatcatttgtgatttctgtagactttcctaagtcagagagtaaatagcagagatgatctgttgctttatttaaaaattttttgatattttggtgaaaagaataaatccttagcttctctctcaggccctgtcagaacactggtgtgatgactttggttaggatgacaattctatctacccacagcaaacagagtagcagcaactatctgtttaattagtcaatactttcatcactcctttcatctcaccagctatgagagatggactaaataagcaggaaaaataagttgaaattatgtaactgtccttactgcatctggctagatctaactttctaggagaggatgtatacaaacgaaaaaaaaaaaagcaatcttagtaaaattaaa

SEQ ID NO: 667414 - DNA, 1193 bp, Homo sapiens
cattgagtgtgtaattacagaacagatttggacaatgtcggtggaaacattatcactatcaagtgtgatgctgttttttgtttgtttgtttgttttttggtatcgtgcagccttcctctcctgtaagattgtacttctcccactaagttaggtccctgaaatctgttaggaaacgaaatgcaggcctgtatccctccagaagtggctgccaaacataaaatttctgctgtctgtttggtgatatgctaatcaacctttgttcttctaaatgaatacatctcagcagagactcaagggaacattttcaaagaacaaagtgtatgtgttcaccatttttacgtggacaggctgtctattcaagtaataaccyttgatgttctcttgggtgtatgttttaactagaagctaaaacctacttggatgcttttgcagaaccctaaccctggcttcagtctggaacttgatacaattgcaagttgaaattgcaaattgtatcagggctttaaaaagcatgagttctgggcttgttcctttctagtgaggagcagtttgtgattcatttattcaatggcattgtaaatggacatttatggagcacctggttggggcttgggattgtatcagcgttgagctttcattacaaaaaagacaagtcctcagcgcagtgcaggagatagacatcaaaacaaataatgaaaatgctggtgatggaaatgacacgacttgagtgcctggaaaatgcactaaatgatcaggaagaagggaaccactaggtgttggggagtaaatgtgggggaaaaaaatctcagaagaagttaaatttgagtgcagtgttgatgacagcagttttacctggaagataaggagaagtgtgtttgaaggctgaagggtaaaagcctgcaagttttgggacatatgaagttcaggacaattgtgaattacacagaaagggaattttaaaagggccaaaaatagaccaccatagtatgaatagtgctgtatatcatccaaaagtatttggattatgttaacagggaactgttgaaggttttcactagaaagtgatacaatcagatctgtatcttagaaagatcactctgtggacagaaggattagggcaaatagggaaaagcagcccttctggatagtaaaattagggttttggtaaaaattcatacaagagtgggaagacc

SEQ ID NO: 667415 - DNA, 1193 bp, Homo sapiens
cattgagtgtgtaattacagaacagatttggacaatgtcggtggaaacattatcactatcaagtgtgatgctgttttttgtttgtttgtttgttttttggtatcgtgcagccttcctctcctgtaagattgtacttctcccactaagttaggtccctgaaatctgttaggaaacgaaatgcaggcctgtatccctccagaagtggctgccaaacataaaatttctgctgtctgtttggtgatatgctaatcaacctttgttcttctaaatgaatacatctcagcagagactcaagggaacattttcaaagaacaaagtgtatgtgttcaccatttttacgtggacaggctgtctattcaagtaataacccttgatgttctcttgggtgtatgttttaactagaagctaaaacctacttggatgcttttgcagaaccctaaccctggcttcagtctggaacttgatacaattgcaagttgaaattgcaaattgtatcagggctttaaaaagcatgagttctgggcttgttcctttctagtgaggagcagtttgtgattcatttattcaatggcattgtaaatggacatttatggagcacctggttggggcttgggattgtatcagcgttgagctttcattacaaaaaagacaagtcctcagcgcagtgcaggagatagacatcaaaacaaataatgaaaatgctggtgatggaaatgacacgacttgagtgcctggaaaatgcactaaatgatcaggaagaagggaaccactaggtgttggggagtaaatgtgggggaaaaaaatctcagaagaagttaaatttgagtgcagtgttgatgacagcagttttacctggaagataaggagaagtgtgtttgaaggctgaagggtaaaagcctgcaagttttgggacatatgaagttcaggacaattgtgaattacacagaaagggaattttaaaagggccaaaaatagaccaccatagtatgaatagtgctgtayatcatccaaaagtatttggattatgttaacagggaactgttgaaggttttcactagaaagtgatacaatcagatctgtatcttagaaagatcactctgtggacagaaggattagggcaaatagggaaaagcagcccttctggatagtaaaattagggttttggtaaaaattcatacaagagtgggaagacc

SEQ ID NO: 667416 - DNA, 610 bp, Homo sapiens
caatttaattcctatccacataccatgagtagatttgttcaaggccagctatatttatttcaattaagatcagataaaacttgacttcatctagactacgggaatgctgttctgacctcagaacctatgatccaaagaatattttttcttttgaaattataatgtttccagattataaggatacaaattgttaatagtgactaaccaattttcattttattattattattatttttttacttccatttccctttcctgctttcctggtaccaattttctttccttccttttcttttcctttctttcgtttctttcttctctccctccctccttcctttcttccttccttcacttctctttctctcttctttttttctcccctcaaattcctgtgttcaaaygaccctcccacctcagcccactgagtagttgggaatataggtgcatgccaccatgcctggctagtttttaaaattttttgtagggacggggtctcgccatcttagccaagctggtcttgaactcctaggctcaagtgatcctccagcctcgctcggcctcccaagtgtgggaattacaggcatgagccactgcacctggaaatattttt

SEQ ID NO: 667417 - DNA, 590 bp, Homo sapiens
ttttcacttccagttttaagttacagtttatgtgcatcttattttctctgagattacatgcttcttgaaggcagaattaggctggtatcccttttctccctttcatttcttacagctatcctcctttgtaatcacagttccaagggctaaaacttaatggtgctcataatatgaatatgatatgcctccttgcttttcaaccacctctgtcattctactccgggcattctccagtctgtcaatttctccttaatttcctaaagctcaacctaaaattggtttactcataaaactgcatgaatctacaatctcatcaacaaacaataaaaaaaaatgctacaatgaaagagtgagaagattctcagcaacatcactctaaaaagttccycaatatgtcttatgttcactgaattcaattctagatcattgtaagattaagatctgttttactgaactttgaatccttaaagagactactattatttggtagactacaaataactagttaatacaataagtgtcagtctaattttgaaaccattgttcaagcaaagccacaatgccactggatttttgccaaaagaacaaag

SEQ ID NO: 667418 - DNA, 637 bp, Homo sapiens
aaaacatgtttaccatttattaagtggatcaccataaagattttcatctgtattgtcttcatgttgagtaggccagggaggaagaacaagaggagttggttttgctgtctcaggggtggcagatgtggaggaggtagaagaggttaggagggaaagcaggagaggaaagcacgtttggtgtaacttgtattgraaaaacccacttataaatggacccacacagttcaaacacatgttgttcaagggtaaactgcagtggagtcatggttttttatacaatctaccaatccatatatatacgtcacaaatgaatccccagctctgtcactcacccaggctgaagtgcagtggcgtgatcttggctcactgccacctccatctcctgggttcaagcgattctcctgcctcagcctcccgagtacctgggattacaggtgcccaccagcatgaccagcaagtttttgtatttttagtagagactgagtttcactatgttggccaagctggtctcaaactcctgacctcaggtgattctcccaccttggcctctcaaagtgctgagattagaggtgtgagccccgtacctggccccagtccctatattttaatagtaaaactagattatttatacttaagg

SEQ ID NO: 667419 - DNA, 406 bp, Homo sapiens
gaattccggctgaagtcactgagcttcagtctcctcaactgtaaaatagaaaaagttacagtttctacctcgtaatgccttgtaaaatgttaagaaattcatataaacaaagtacatgacacataacaagtgttcaatgaagttaagctattattttcaggacactattttgctaagaatttttktttaagtaagaggaggaagaaaggaagaaaaaattcttgtgatttcaaatataattttttttaaatataaggaagttgcctctggatttattttacaatcctttactctgctttgatcagacactgcactttaagttttgttcttagaaaatatattaatcttttgaaatatgtcacagttattcttcagatcttaatacaaatacttcatagcaattaga

SEQ ID NO: 667420 - DNA, 1145 bp, Homo sapiens
aagcctgatttatggtataatagtgtccccaaaaaagttccaagcagacccagtctcacatcctgacccttttattgactcaattgcacttcatttcctctattaggttgaagtaccttctacttgagttacgttaagtcaaaatataatttttataaagttaaagacataatttccaaaaagatatttagtgagcacttgtcaaaaatttatttacctaattaataaagaaaccaccaggatgacaaagctcatacaaagataggggaaactactatatatagccaaagaaagtgctgaaataagattgctcagtaagatgctaaaatcacagcctttgctgtgatctcatctataagacagaaacgtttgcatatttaccaaacaaaatcatttgcaacttttcaatctttaccaaggtaacatctaattttactgagtctgaatcccaatcaaytgtaagtcaggcaatgttagattgcctaccagtgcctcacacatgagtgtgcatcagaatcacctggagggcttgataagaaagggtgttagatctaacccacagtagtacacctagggtgaggcccaagaatgggcatttctaacaagtgctagatggtgcctctgctgctagtccagggaccaactttgagaaccactaccctagcctgatgttaaaaaggcttgcagtaatatttctgccttattttcaagtgtcacatatagcagaataaattgttaaaggcttttaaatagaccaataagatcattagatatccctgatagaaaaccaggcattgtctaatttcagatttttctgactcattggggttttcatctttcattgtttttgagctatttagaactctgtgatttgtagataactagtggcaatgcaaatgattcttgtctatagacatgcaaattaattttgtccaggtgaaaggataattgatttctctctcctaccctctactctcatccctctgtaaaacatcacttgtgcatttatttgttaattcatttcctgcatttcttttctgtatatatgtatatatgcaaatacatacatggtaacatgtatacacagatatatttctctgaattttcctttgaactgtttgtcacaacttattgtttcccttaat

SEQ ID NO: 667421 - DNA, 628 bp, Homo sapiens
cctcagtttcccctgaggggtctacctgccagtggatccatatggtggaggtgtgcatttctgaaaaacagctcagggatgtatgttaacatattctctttggtttctacaggaaaccaaacattcttgtggctttcttggctattgttttaagctactattaacttcttgcttattaagttgctaatttacttctcaaggctacctctgtgcctggagtttcccttgaagaaactcaasattttcatttacttccatgcttaagggagcttgcaagcccctaagaggggtccctgctccatccaatagtatctgaaataagaacgtggcagtgtgacacaaacagaaagaaacagatgagttcattctaagaaatgaattaataggatttggctaaataaaacaggaatttttcaaaagatgcttattgaaattaaatgtcaaggttaagaaatgaggttttcaatcccagatgttttgtctctcccatctgcctcccttctcacagactgttgataaagaaggaattaatttagacaaataaagaaaatactgctctttgttacttgggggtgttggtgaggagttttgagctctgcctgcacagagatgcagttccattaatgca

SEQ ID NO: 667422 - DNA, 595 bp, Homo sapiens
ttaagaaagcattaattaatttctggtatatattaagtattgttatatttaataatacatctgaattttcttctttttcataatttagactaaattccctgtaatccccaattatacccccccaaaaagttaaacccatgttattctacagtgggacagtatttgacatctttgaaattcggccaaagtgttacagaaaatgtagcaacatcattattgtttcctcrttatcatttacagttaaactgatattaaagaaggacattgttttatcataatgtttaactttcataattacataaaaagaaaattatgttaaaactcatctagaatagatgcactgaaaacagtgctctgaaatagtgcgatgaagtttatccgcatagttacataactcttgaatctcccaagaccgttgcattaaattctttaactttaaatatcattaaataattcttaatgtaccagtttcattatctggatagtagccttgttttgaaaatgtgaaaataatattattttctagttaaaagttgcacagcgattgtagcaacacttgctgacttggtagacacaccgtttttaaagaatctta

SEQ ID NO: 667423 - DNA, 595 bp, Homo sapiens
ttaagaaagcattaattaatttctggtatatattaagtattgttatatttaataatacatctgaattttcttctttttcataatttagactaaattccctgtaatccccaattatacccccccaaaaagttaaacccatgttattctacagtgggacagtatttgacatctttgaaattcggccaaagtgttacagaaaatgtagcaacatcattattgtttcctcattatcatttacagttaaactgatattaaagaaggacattgttttatcataatgtttaactttcataattacataaaaagaaaatyatgttaaaactcatctagaatagatgcactgaaaacagtgctctgaaatagtgcgatgaagtttatccgcatagttacataactcttgaatctcccaagaccgttgcattaaattctttaactttaaatatcattaaataattcttaatgtaccagtttcattatctggatagtagccttgttttgaaaatgtgaaaataatattattttctagttaaaagttgcacagcgattgtagcaacacttgctgacttggtagacacaccgtttttaaagaatctta

SEQ ID NO: 667424 - DNA, 962 bp, Homo sapiens
tcaataataaagaccaatacctagaggaaatggcacaagaggagggaaaatccccagatattgaaactagaaagagcactgaaaaccagagccagaagcttgagctacctctgtaggagatgtgagaacagttgtcaaacctcaaagtaagcactagaggtggattttatacccatagaggagctaaagaatgaagttttgtgtgtgctcaagatggtatgtttgaacttaacatcactgcactaagccatgtcctttaaaggaccccatgattagcaaaccccaggcttctatcatatgtgggtttggagcccaaatgtaactatccacattgctcaggagtccccagtgagaaaatggcaccactaaagatgagctcacagtgagatagtataaaacacaaatttatgartgacatcagcaagatgacagaataggacttgtcagtgcccatcctctcacagaaacttcaatttgaacaaccattcacacacacaaataccttcactagagctaaggaatccagacgagagattacagcacctgaatgtagcacagaaataagaaaagatgtattgaagagggtaggaaggacagtttcacactgtgctttgttcgtcatgtatttccaaattagttctgattttgtaaaaaaaaaaaaaaagcattgaattacatatcataaaaaaacttgaccatgagtgagagaatcagtgagcaaaagagtagggtttcacagtccaagaactggataccattggaggaagtctgacaggtgtgcacagtaaaacagatacaaagcatgctcattgcagcaccatttgcaaaagtaaaaaattacaaagaacatacttattccttagaatggaaatggaaaataaactgttaataggtacactctaaagcagttaaaatgaaactctagagcagttaaaatgaaataactagatctacatgtatca

SEQ ID NO: 667425 - DNA, 962 bp, Homo sapiens
tcaataataaagaccaatacctagaggaaatggcacaagaggagggaaaatccccagatattgaaactagaaagagcactgaaaaccagagccagaagcttgagctacctctgtaggagatgtgagaacagttgtcaaacctcaaagtaagcactagaggtggattttatacccatagaggagctaaagaatgaagttttgtgtgtgctcaagatggtatgtttgaacttaacatcactgcactaagccatgtcctttaaaggaccccatgattagcaaaccccaggcttctatcatatgtgggtttggagcccaaatgtaactatccacattgctcaggagtccccagtgagaaaatggcaccactaaagatgagctcacagtgagatagtataaaacacaaatttatgaatgacatcagcaagatgacagaataggacttgtcagtgcccatcctctcacagaaacttcaatttgaacaaccattcacacacacaaataccttcactagagctaaggaatccagacgagagattacagcacctgaatgtagcacagaaataagaaaagatgtattgaagagggtaggaaggacagtttcacactgtgctttgttcgtcatgtatttccraattagttctgattttgtaaaaaaaaaaaaaaagcattgaattacatatcataaaaaaacttgaccatgagtgagagaatcagtgagcaaaagagtagggtttcacagtccaagaactggataccattggaggaagtctgacaggtgtgcacagtaaaacagatacaaagcatgctcattgcagcaccatttgcaaaagtaaaaaattacaaagaacatacttattccttagaatggaaatggaaaataaactgttaataggtacactctaaagcagttaaaatgaaactctagagcagttaaaatgaaataactagatctacatgtatca

SEQ ID NO: 667426 - DNA, 962 bp, Homo sapiens
tcaataataaagaccaatacctagaggaaatggcacaagaggagggaaaatccccagatattgaaactagaaagagcactgaaaaccagagccagaagcttgagctacctctgtaggagatgtgagaacagttgtcaaacctcaaagtaagcactagaggtggattttatacccatagaggagctaaagaatgaagttttgtgtgtgctcaagatggtatgtttgaacttaacatcactgcactaagccatgtcctttaaaggaccccatgattagcaaaccccaggcttctatcatatgtgggtttggagcccaaatgtaactatccacattgctcaggagtccccagtgagaaaatggcaccactaaagatgagctcacagtgagatagtataaaacacaaatttatgaatgacatcagcaagatgacagaataggacttgtcagtgcccatcctctcacagaaacttcaatttgaacaaccattcacacacacaaataccttcactagagctaaggaatccagacgagagattacagcacctgaatgtagcacagaaataagaaaagatgtattgaagagggtaggaaggacagtttcacactgtgctttgttcgtcatgtatttccaaattagttctgattttgtaaaaaaaaaaaaaaagcattgaattacatatcataaaaaaacttgaccatgagtgagagaatcagtgagcaaaagagtagggtttcacagtccaagaactggataccattggaggaagtctgacaggtgtgcacagtaaaacagatacaaagcatgctcattgcagcaycatttgcaaaagtaaaaaattacaaagaacatacttattccttagaatggaaatggaaaataaactgttaataggtacactctaaagcagttaaaatgaaactctagagcagttaaaatgaaataactagatctacatgtatca

SEQ ID NO: 667427 - DNA, 642 bp, Homo sapiens
ctggggcttccatacaaggccttttccaccaggactcaagcaagctgygtgttcaggaagatcattaggaagtggtcaaagagattttttttctttctttcaaagaaacaggaaaacatgtaagaaatgctcttaaaccactgggtctcttagcaagtgtaacttctggtcagagaggtgtaccacacaggggtattagttggagaaaggatatttatttccctttagctgaagaaatttctgtattgctttcatactagaattttttttttctgcaattaatctgccacctcgtggcctaatgagaaatttcaatttccatagcttggagagggaggattgaagaagcagaagtcaacactctttcacttaatagaaacatcgacatactactgactgccagcacaggagtgctttcctctaactatataatgccctttttacctgctattcaaagggtgttttgtgatttcccaaaaactcaaaaaataacgaggaagtgcttgactcatagacacttcatacacgtgtatgtttttgactccacaaaatgaaaactagaatatggttcttgtattttaatgggaaaagaaaatgtcctaaaagctatacaactttataagattaatttcaacttctaaa

SEQ ID NO: 667428 - DNA, 686 bp, Homo sapiens
caactttaaaagaatatttaaaccatctaggtactaatagatttccctaagtttccatttccatatctttctgtaatgattttcctaagtttccatttccgtaattctgactacacaactgtcattaattctttaaaaaagtcaatcattttgttttctagatccaaacgtattgttcgtacatagtgttaatttagtgtcctcctttctaatagtaatacttagaatttgttatatatcttaagtaattggcaggtaaacttctttctgaayagaaaactatttcttataggatttacttggtaacagtttgttagcaacaagtctcaatgactctttcacataagaaagaaatgcaatgtctttgaaacattgtatgcttctgactttttaaaactaatttaaaatactggcttatcccagtccagattttattattattgttattgttatcatttattttattggcaatgtatcaaggaaagtgagagccagaagaaaactgaaaagtaattgagtatacccagctgctatttgagtcaactcatgtcctgaatacctagtttgattttgatccacattgatggaaaggtaaaggaaaccaactaatctatgaaggatcatgtggagagtgagtgttacacaaatcatacggaaacaaaagtgatcactcttggatacttcca

SEQ ID NO: 667429 - DNA, 686 bp, Homo sapiens
caactttaaaagaatatttaaaccatctaggtactaatagatttccctaagtttccatttccatatctttctgtaatgattttcctaagtttccatttccgtaattctgactacacaactgtcattaattctttaaaaaagtcaatcattttgttttctagatccaaacgtattgttcgtacatagtgttaatttagtgtcctcctttctaatagtaatacttagaatttgttatatatcttaagtaattggcaggtaaacttctttctgaacagaaaactatttcttataggatttacttggtaacagtttgttagcaacaagtctcaatgactctttcacataagaaagaaatgcaatgtctttgaaacattgtatgcttctgactttttaaaactaatttaaaatactggctyatcccagtccagattttattattattgttattgttatcatttattttattggcaatgtatcaaggaaagtgagagccagaagaaaactgaaaagtaattgagtatacccagctgctatttgagtcaactcatgtcctgaatacctagtttgattttgatccacattgatggaaaggtaaaggaaaccaactaatctatgaaggatcatgtggagagtgagtgttacacaaatcatacggaaacaaaagtgatcactcttggatacttcca

SEQ ID NO: 667430 - DNA, 565 bp, Homo sapiens
actgtgacatcttggtctattgaatggtgcctctagagttgtgctcactgagcctcagcagctgtatatggtagctccaaatttgattccaggattattccgtctgcataagaattttatcgagtctattttctatgtctattcggaaaacataatatatcctcaaccagttatcacaatcttcattaaaatttgaatttatcatgatcccttcccttcccatcactaactagtcctcctggcagkatttgcctcctaactcgctccatcacctgggctggagtgtggtggcatgatcttggctcgatgcaacctccacctcccaggttgaagcaattctcccacctcagcctcctgattagctgggactacaggtgtgtgccaccatgcccagctaattttttgtattttcagtagagatagatttttaccatgttagccaggctggtcttgaactcctgacctcaagtgattcacccatctcgacctcccaaagtgctgggattacaggcaggggccactgcccctggcctaggactcaattttttaacctctgctgctggta

SEQ ID NO: 667431 - DNA, 565 bp, Homo sapiens
actgtgacatcttggtctattgaatggtgcctctagagttgtgctcactgagcctcagcagctgtatatggtagctccaaatttgattccaggattattccgtctgcataagaattttatcgagtctattttctatgtctattcggaaaacataatatatcctcaaccagttatcacaatcttcattaaaatttgaatttatcatgatcccttcccttcccatcactaactagtcctcctggcaggatttgcctcctaactcgctccatcacctgggctggagtgtggtggcatgatcttggctcgatgcaacctccacctcccaggttgaagcaattctcccacctcagcctcctgattagctgggactacaggtgtgtgccaccatgcccagctaattttttgtattttcagtagagatagatttttaccatgttagccaggctggtcttgaactcctgacctcaagtgattcacccatctcracctcccaaagtgctgggattacaggcaggggccactgcccctggcctaggactcaattttttaacctctgctgctggta

SEQ ID NO: 667432 - DNA, 607 bp, Homo sapiens
tttaaaaagtacagttaactcacatgtaattgttaagggtcacaaaagaaatggcaggtgtatttttctttactcttgttaaactggatggaatattgtactacaggataagaaaaaaatctaggcagaagctaagaaaagaaaatgtggaaggtaaaagtttcattacgatctcaaacttgaaagttggaaagtttcaagatgtatttacaaaaacattttcctaataccttggcttgttttggagttcttatttacaagcaaaatattgcaatatccgagcacattatttaaactcaccaagactgtctcctcatttttccaaggggagtggtatcagttcctatcttgtaggattgtttatacaattaagctttattcagtacatttgcaactcactgtatttgcaaacaataaacacccaataaatgctagcagtcattgctgtttctgatgttattacagaggaaggattatrttacacaaaatttcaggttttatacagagaaagcacaatgcaagtagtcattctgggtctgccagcccttcctaggagacgtggaaggtgacaaggggaggtagtggtcacagtggtcagaggataaat

SEQ ID NO: 667433 - DNA, 607 bp, Homo sapiens
tttaaaaagtacagttaactcacatgtaattgttaagggtcacaaaagaaatggcaggtgtatttttctttactcttgttaaactggatggaatattgtactacaggataagaaaaaaatctaggcagaagctaagaaaagaaaatgtggaaggtaaaagtttcattacgatctcaaacttgaaagttggaaagtttcaagatgtatttacaaaaacattttcctaataccttggcttgttttggagttcttatttacaagcaaaatattgcaatatccgagcacattatttaaactcaccaagactgtctcctcatttttccaaggggagtggtatcagttcctatcttgtaggattgtttatacaattaagctttattcagtacatttgcaactcactgtatttgcaaacaataaacacccaataaatgctagcagtcattgctgtttctgatgttattacagaggaaggattatgttacacaaaatttcaggttttatacagagaaagsacaatgcaagtagtcattctgggtctgccagcccttcctaggagacgtggaaggtgacaaggggaggtagtggtcacagtggtcagaggataaat

SEQ ID NO: 667434 - DNA, 1510 bp, Homo sapiens
ttgttaaattgtttttattccactggtatcctcattggtgtttcaattattttaagactcactgagcagccttccctcttacaaagaaagggcagtttaacagataagatttgattgctgagagctactgtaacagcagtccctaacctttttggcaccagggaccagtttcctggaagacagtttttccacggaccggggaagtggggcagtggttttgggatgattcaagtgcatttttacatttattgagtactttatttctattatgattacattgtagcatataataaaataattatacaaatcaccataatgtaggatcagtgggagacctgagcttgttttcctgcaactagatggtcccatctggggatgatgggagacagtgacagatcatcaggcattagattctcataaaaagcacgcaacccagctctctcgcatgtgcagttcacaattgggttcgcgctcttctgagaatctaatgccaccgctgatctgacaggaggcagagcttaggcagtaatgctagccatggagagcggctgcagctgtaaatacagatgaagcttcacttgcttacccactgctcacctcctaccgtgcttcacttgcctacccactgctcacctcctgctctgcagcccggttcctaacaggccatggattggtactggtccgtggtctggggattggggacccctgctgtaacacactaacatttacagatgactctgatggatcttgatctctctggacagctgccttcattgtatttaggattttctaggccaggtgttttttcttttttttcctttccttttctttctttcttttttttttttttttttgaggtagagtgttcctgcgatgcccaggctggagtgcggtggcrcaatcttggctcactgcaacctccgcctcccgggttcaaatgattctcctgcctcagcttcccaagtaactgggattacaggcatgcaccatcatgcccgggtgatttttgtatttttagtagagacagggtttcaccatgttggtcaggctggtcttgaactcccgacctcaggtgatccgcccacctcggcctcccaaagtgctgggattacaggtgtgagccaccacgtccggccttgttatgttgttttaaactggtgtttcattctttcttctagtctcttgttttataactataagcaagcccagaggtagaggagaagcaaagggcaaggacgctcagacagtttggattgaggtcaatccaagtaaggagtaggctatgagtcatgactggcagagatcagtgtttaccttagaccagaagtccttgaaactagggaatatgccttaatctagacaaaagccttgtgggaaattagactcacaatgttctaaaataaatcaggcgatgtatgctcaaataccaaattatttcaaaattaaataaattaaaccaacacataaactatgataaaaggctaaaattaattaaaataaaattaaaaat

SEQ ID NO: 667435 - DNA, 639 bp, Homo sapiens
gtcactcacagttccttgctatgtggccctctccccaacatggcactttcttcaaagccacatagggagagactgcagctttctgctgagtaacctaatcaaggaagtgacgtcacgcaccttccccatacaagggaacctaatgagggcacgcatagcctttgccatcttccactggtgagacgcaagtcatgggttccacctgaactcaagggaaggagattcacaagggggtgacccattgggtcacattatggtgtgtstgccacactcagccacttgttttgacattgactgtaagatttcctctttgatccctcttgccaggcctgaacttgatctaaacttttattattgatccctgatggcttcctattaatgcccccacccaactctttccccctccagatggtcttgaatgatgtagttcaatctcttggtgacatccagcctgacaaatacatattatctaaccactgaggaaacagattctgagaaaggttaagtgtcttgtccaaggtcacacaaatcataaatctgcttagcctgtatagcagtgatagtcttacctagctattaggactgatactaaaataacgcatgaaagtactctgcaaatggaagcgtattacgcaaata

SEQ ID NO: 667436 - DNA, 718 bp, Homo sapiens
aagcttagctttccctgtggcataagtttcgggggttctgagatttcacattttccctttacaggtgcatcgtagggtttagaaggtgatatctcactttgcacagctgagacagctctgggaccagtgccaggcatcccacttagccagttctcgggtggttcctggattgacccccaacctccactgcacatctgcagacaccttgggaaggcacggaatgactgcagggatggaatggttgagggttgggtgggacctggacctcatccaccacctgggcatcccaggggagcaggacatcaggtccctccagcccccaaccccgggtggtcccagcttctcaggcccgtgccccagggagcagtgcggctccttgttcaacaggaggctgtcatcggtagaacgcaggggttggttgccagctgcrgactccggctcatttaactgctctgcagcccccacgccgggtcctcactgccccgtggtagatggacagctgggtttggcttcctctggtctgatggagaaatggcctcatcccaaagcagaatactgtcctctgctggctggcctgtgacatggctcacttacagacgatggctttaaacaggcaccccaatgccccaatttccccaggtccatcgtaccttcgggcaatcccccaaagttatgaaactgcagcctgccttccctagcattcatgtgccatgctctc

SEQ ID NO: 667437 - DNA, 950 bp, Homo sapiens
gacttaaattgtcatatatattttaaacaaattaagcgtaaaaagattgtctttcatatttactcacatttattgtttatcatgtcctttcttctttcctgaagatctgggtcttcttttttttgagacagggtctcactctgtcacccaggctggagtagggtgacacaatcatagcttactgcagccttgacctccccagctcaagccatcctcccacctcagcctcccaagtagctgggattacaggcacacaccaccacacccagctaattttttaaattttttgtagagatggagtctgacgatgttgcccagactggcttcaaacttctaggctcaagtgatcctccttcctcagcctcccaaagtgttgggattataggcatgagccaccacgccyagtcctcagcgaagttcttgacatgacaatgctgtccagccagaacacagggtggggatcactatgcccatcttacagatggacaaaccaaggcctagagagaattagccacttcccctctcagctagtaagcagcagaactggaatcaaaatctaggtctatcagctgggtgtggtggctccatcccgtaatcgcagcactttgtgaggccgaggtgggcagattgcttgagctcaggagttcaagacaagcctaggcaacatggtgaaacctgatctctactaaaaatacaaacaattagccaggtatggtggtgtgtgtctgtattcccatgtactcaggaggttgaggtgggaggatagcttgagcccaggagattgaggctgcagtgagccaagacagcaccactacactcgagcctgggcgatggaggaagaccttgtatcaaaaaaaaacaaaagaaagaaagaaagaaaaaagaatctaggaatctacatctatcaactctcagtccagcatctccccatgtatctcaagaactacaaa

SEQ ID NO: 667438 - DNA, 950 bp, Homo sapiens
gacttaaattgtcatatatattttaaacaaattaagcgtaaaaagattgtctttcatatttactcacatttattgtttatcatgtcctttcttctttcctgaagatctgggtcttcttttttttgagacagggtctcactctgtcacccaggctggagtagggtgacacaatcatagcttactgcagccttgacctccccagctcaagccatcctcccacctcagcctcccaagtagctgggattacaggcacacaccaccacacccagctaattttttaaattttttgtagagatggagtctgacgatgttgcccagactggcttcaaacttctaggctcaagtgatcctccttcctcagcctcccaaagtgttgggattataggcatgagccaccacgcccagtcctcagcgaagttcttgacatgacaatgctgtccagccagaacacagggtggggatcactatgcccatcttacagatggacaaaccaaggcctagagagaattagccacttcccctctcagctagtaagcagcagaactggaatcaaaatctaggtctatcagctgggtgyggtggctccatcccgtaatcgcagcactttgtgaggccgaggtgggcagattgcttgagctcaggagttcaagacaagcctaggcaacatggtgaaacctgatctctactaaaaatacaaacaattagccaggtatggtggtgtgtgtctgtattcccatgtactcaggaggttgaggtgggaggatagcttgagcccaggagattgaggctgcagtgagccaagacagcaccactacactcgagcctgggcgatggaggaagaccttgtatcaaaaaaaaacaaaagaaagaaagaaagaaaaaagaatctaggaatctacatctatcaactctcagtccagcatctccccatgtatctcaagaactacaaa

SEQ ID NO: 667439 - DNA, 950 bp, Homo sapiens
gacttaaattgtcatatatattttaaacaaattaagcgtaaaaagattgtctttcatatttactcacatttattgtttatcatgtcctttcttctttcctgaagatctgggtcttcttttttttgagacagggtctcactctgtcacccaggctggagtagggtgacacaatcatagcttactgcagccttgacctccccagctcaagccatcctcccacctcagcctcccaagtagctgggattacaggcacacaccaccacacccagctaattttttaaattttttgtagagatggagtctgacgatgttgcccagactggcttcaaacttctaggctcaagtgatcctccttcctcagcctcccaaagtgttgggattataggcatgagccaccacgcccagtcctcagcgaagttcttgacatgacaatgctgtccagccagaacacagggtggggatcactatgcccatcttacagatggacaaaccaaggcctagagagaattagccacttcccctctcagctagtaagcagcagaactggaatcaaaatctaggtctatcagctgggtgtggtggctccatcccgtaatcgcagcactttgtgaggccgaggtgggcagattgcttkagctcaggagttcaagacaagcctaggcaacatggtgaaacctgatctctactaaaaatacaaacaattagccaggtatggtggtgtgtgtctgtattcccatgtactcaggaggttgaggtgggaggatagcttgagcccaggagattgaggctgcagtgagccaagacagcaccactacactcgagcctgggcgatggaggaagaccttgtatcaaaaaaaaacaaaagaaagaaagaaagaaaaaagaatctaggaatctacatctatcaactctcagtccagcatctccccatgtatctcaagaactacaaa

SEQ ID NO: 667440 - DNA, 1805 bp, Homo sapiens
tattagaatgagcaagggaatataacgttcattaagtatttttctattatgaaggagaataaaatctaagggggaagctaagatatgcatacaaatgtctatatataatgcaaagcaaaaataaaaaacatgctccaaaaattacaatagaaatttaggagaggaagaaattcttcatattgaatatatcacagaagacagaaggatttatttttctacaataaaaattatgcaacttcttttgtttttattgtctttacacgcttgctagattacgatcagaaatttgggcagtgattttacaaatgcaaattcaaattagaatggaagtttgagaagcaatagaaacaaaaccacccagagccaagtgatttggccataaagaaggagccagctacaaagaatgaggatgaactcggaagagatcactgtgtttggaaatagccggattaccatcagaataatttatacaaataagaatgcctaggcaagcaagctttgctgacatcaatgacccatggaagcatcagtgtactccaatattagaaaatagccattgttaatgaaaaacattcttagcaaatacaaaaaagactttttcaataagctttgtttactaaaaacagaaataggtatctttaacatcctttcttacttcctaatgtgtgaaaataacagatatatacttttttaatttagaaagactaaataaaacatatgccaatgaaatgcaatgctacctctaaagacaccagccagtaaatgagagaagttagaaacagtttgcaatcaccaccgtatcagtccacttactgtagctttgttgtattacttcataatcagagggaaatcagagatgatgggtcttctcaaactggtctccatcatcacatctcaagctgmttggggtaccttcatctggatctacaaataaaagtgaatggaatgttttcttttcttttttcttgttttgtttccgtttgtcttctgatacaagcagggataaattttcctcatgaacacataccacttttatgtttaactgaagtagagaatatggttttaaaaatagccggcagttccccacaggcatacttctttcaattctgtggtgattaaatcaattgttacttagtatactctgaaaggaaatagttcaggaagtgagctttatgcaaataattgatagtgctccttaaggaaactactaaataaattgctctataaaatgatacacagtctctatgaacctgagtgtgaaatcagagaacagtttccattgtatttgtaatttctgtgctgggcttcaatttcaacagtcctcactaatggacttagtaattttgtgtgtgacaaatggtcttacccccacagattacatagaaaataaaagaagtcgtctctctaccatacatccctctatgtatgttacagaaaatgacaactcagatttttggctcaatggacaggacccttttgcttttgagggagggatgtctgagagcaaacttctcattctcaggtggtcagagagaagtaccccctgcaagattctatgtgaaagctgtgtgtaaactgtccccttttattatggtttgctcaaggtattacgtccaaactggaataaacctgatgtataatctgacacctagacacctgatttattcattccctcaccgaggtagcgtgtccagaattggtgggttcttggtctcactgacttcaagaatgaagctgcggaccctcgcggtgagtgttacagctcttaaggtggcgcatctggagttttctccttctgatgttcg

SEQ ID NO: 667441 - DNA, 990 bp, Homo sapiens
gtctcgtttaccaaaggcagttccttaatgctggcaagcacgtccttgtggaataccccatgacactgtcattggcggccgctcaggaactgtgggagctggctgagcagaaaggtaatgtatcttaccaagagtttctgcctccaggatttctgtgatatcatctttatgcctttaaaacttaaccccatttcagatatctcctcctcctggctacactggcactgtgggctcccaactgcctcctcacccccacactgtaaacacagatagtggagggcagaaggatgggtgggaatttgcaaacttttggtcaaagcttatcagcttattttactcactctaaggaaaaaatatgaattagttttcacctatgcttatgtcatgatattattttggctttattcatgtgatacttatattgctaaatgctgggatatcctaaaaatgctcaaatcagagaaactgattgtcttatttgcatagtttgtagtttttgttgtttctaaacaggaataaccatttattaaatatttagtatatgctaggaacttggaaactctgctaagcacttcatatgttattttgcttaattcttctagaatcccttggaggtatatattttctctagatgctgtatagaaaaatatggctcaaagaagttaatttgtgccaggtcacaaagctaataacatgactactaagtgggaggtagagattttaatcaaatcctacagggctcttaagttcacatttgttcccctaagccataccaccctccagaagggagaaattaagactttcccaggccagacgcagtggctcatgccctgtcagcccagcactttgggaggccaaggagctygggacaaccctgggcaacataatgagaccctgtttctacaaaaatcttttacaacttttttttttttttttttggtggggtacagagtcttgctgtgtcacccaggctggagttcaatggcacca

SEQ ID NO: 667442 - DNA, 993 bp, Homo sapiens
tattatacaaatattgatttgttagaaatactgctcttgatatggaaatacttacaatgagaatttttgtgagaaagtgaagcaatcttaacttttattttttattacaattagttaatgaagagtaacaatgatctgaagtcatccactaaaatattttgtttgccatttattgcatagtaaattctgtatttccttggttcagaacacatattactaatgaagtcaaacgtgtattttcagagagactatcaaacaaaagccagaggtgagcacaagaaaagtgtatttttaaaggtaaaatatgttcagtgttctgtgaataaaagaaaactgcactgcttaagacaaaaagctgttaagattgtttacagatcaagaaattattttacaaaaatggttatttattcatcatttttttcaacatccatggaagaatgcctcttgaagaaataggatgtttactatttaagttgggaaaaaaattggcagttttcctatccaagaaacgattagtacattcatgttgaggatgactgggcttctgaaggtccttataaacttcrttttagtgtttggcatttccttttacgtaattgcagcttttaaactaaagatcagatcatacactggcatatttttgttattcttgttttgtgcattgttggtacaatttctgatttgattcctgatgaaaataacaaacaacatttgtggtagtactttggaagttaagccttttacatcaattgtcacattttattatttatttatttatttcaagacagagtctcactctgtcacccaggctggagtgcaatggtgcaatctcagctcactgcaagctccacctcccgggttcaagatattctcctgcctcagccccccgagtagctgggattacaggcacctgccaccacacctagctacttttttttttttttgtatttttagtagagacagggtttctccatgttggtcaggctggttttg

SEQ ID NO: 667443 - DNA, 1011 bp, Homo sapiens
acagaatgaaaatgaaaacaggtcagctaaaattaagaagtcaatgcaatgagcaaaggcacagacagtaccaaaacatgggtcaggatgatctgtcctgttggcatgacaaatatggctcacaatttttttwaaaaaaaaattagaagactcaagtcttttgactttactgagaagatgaagtctgacactgtttatttccaatcttcttggaaagactttcaccactgtttatctcataaaattggagtgctatttaccagttaataagaaaatggcataacataaaacctttaaatactaatgttaaaagagaacttcagagttttctagttcaaccacctagcaaactcatgaagctcttccttaaattcttcaagttgattatccaaattcagagttaacactcagtagattgcttctgttgtaaggtactaacaataaaaacattcttcatgatacagacattaaatctacatccctgtaaaattcataagcagattctagccccgccctttgtagcaccatagagcagggcccctgtctctactgcatgaatacagagtattcgtaactgcattcaagggtgtgaaccaattgcagccagggccatgttttgactatctcagcatacctagatcacagtacagggaacatagctggtgttcaataaaagctttgaatatgcgagtatatatcacctttaatagtttcttctctgttttttctttttcctgatttcagacatccacattccaccctgggccttgcccgtctggtgagcccaatctctgctggtcagtcacgcagttgaggtcagggaaggtatgttgggatgggctgacatgaggggtaatgagggtcaagatgaaagttaaggctagggacattcttttgtgtgtgcatagtttaaaagacaaatcagtcattttgcatgttgatatctataaatgaccacatcaacatatctgctttaaagtggccgtgtcccagtggcttcttctaccactg

SEQ ID NO: 667444 - DNA, 305 bp, Homo sapiens
atatawatatatatataaatatatatatataaatatatatatatatattccccttgtctgcctaaaactttagaaagctcatgagcaatcttgggatatttgcaatagttactcaacaatcaaatttcatgttttaataatttctagtattcaagaaaaaaagaaaagtgactctctagccatctatggtttatgaaactgaattgtgtcattctgacaaagcaaaatatattgctttcataagggaatggaaacatttgttttcaaagaatataggtaagacatcaatgaaatcttgtctccct

SEQ ID NO: 667445 - DNA, 2263 bp, Homo sapiens
tgatatgggcctttataattgaaccactgatttctctatcaacttcttggttctttctcttagaacctaatatttataattatttatttctttggagtaggtaataagtgaacatggmctaaaatttcagtgtaagaagggataggaagcaaaaagtaaatcccgctctccagctgtccccagccatccagttgcctgcctggaagtaatcattgttaccagtttcttgtaaccacttccagatacattctatgtctacataaacatatacatatatagtcttttaaaatagttccatacttctgtgccttacttttttttttttccacttaaaaatacatcagtctgggccaggcatggtggctcacacctgtaatcgcagcactttgggagcccaaggtgggcggatcacttgagggcaggactttgagaacagcctggccaacatggcaaaaccccatctctactaaaataatatggtattttagttaacttatatttcctggtaaagaataaaatttttaaatgtatttcctttctcaaagtttcccactaagcatggtatgtttcaacatcctcacccacccttcttttatttggaaaatcacaggtttggaaggcatctaggttttcatacagattcgggttcacgtataccttcaaacacacttacctgtattttatgtctctccctggtgccaattctcagtgcaaaggtggacccaggtaacaacggccaacaaagacactctccataatgcctggcgatgtcacactcaagacacataggacagaatagaccacagaaacctgtcaataaccacatccaaaaagccaaggttctcagatttcttggagcaacttcacatctcaaagaatatttacaacattatgccaccagtttaatgctgcactgtctccctgctatcagactgagaataaataaccaattcccaaaactcattgtatgaaaattgccataactgagccacatcaaaattgccttcttttgttaaacactggcaaagatgaacctgatacaattctgttagcattgactatggtaattgttttgttcctgttaagagaaaaagcatcaaataatttttttacatttgaatcataactgttgctttcattatgttcatctatctaatttcaatatttaaaataaacatggtatacaggatatttttgaataacagacatctatttctataagtgtaattgaaaggtctttttttttttttttttttttttgagacggagtctcgctctgtcgcccaggctggagtgcagtggcgggatctcggctcactgcaagctccgcctcccgggttcatgccattctcctgcgtcagcctcccaagtagctgggactacaggcgcccgccactacgcccggctaattttttgtatttttagtagagacggggtttcaccgttttagccgggatggtctcgatctcctgacctcgtgatccgcccgcctcggcctcccaaagtgctgggattacaggcgtgagccaccgcgcccggccgaaaggtcttttatagtacactaattctgcctcctattcttatcagggctttattctatttctcagaccaagttattcaaatttatgttagtgtcttggagccactgacatctgccagttttaatctgcagattattaggggcttggttccttgaacatcaactgtaaacaatttgtcattagttcactcatctttactgatattgttttctacatattctgcatgaaccttccaacacagaggttctattctaaatatgttttgggtcacagaccattttgagagtacaatgatagctatgaactcagtccacaagggaaaagaaaactacatgcacatagacatgcaaaattgtgcattcaatttcacggagttcatgtatccactgaaaattattaacagaccacaggttaagaacccctgatatacagttaagatgttatgtcatctagcatcataaaagatgacaactctgatgaatgcaaataattaggactgtgaaacagcaaaaattccaagctaaccataatctctgaaaattttttaaataaatattttatggaggcataatttatatataagaaaatgcacaggccatcagtgttctgtgggatgagtgtcaacaatcacatacacccaagtaaccaaatgtgtggaacattgctctcaccccagagctcctgtgtccttttccaatcaatcccagccctcccgttgccca

SEQ ID NO: 667446 - DNA, 2263 bp, Homo sapiens
tgatatgggcctttataattgaaccactgatttctctatcaacttcttggttctttctcttagaacctaatatttataattatttatttctttggagtaggtaataagtgaacatggcctaaaatttcagtgtaagaagggataggaagcaaaaagtaaatcccgctctccagctgtccccagccatccagttgcctgcctggaagtaatcattgttaccagtttcttgtaaccacttccagatacattctatgtctacataaacatatacatatatagtcttttaaaatagttccatacttctgtgccttacttttttttttttccacttaaaaatacatcagtctgggccaggcatggtggctcacacctgtaatcgcagcactttgggagcccaaggtgggcggatcacttgagggcaggactttgagaacagcctggccaacatggcaaaaccccatctctactaaaataatatggtattttagttaacttatatttcctggtaaagaataaaatttttaaatgtatttcctttctcaaagtttcccactaagcatggtatgtttcaacatcctcacccacccttcttttatttggaaaatcacaggtttggaaggcatctaggttttcatacagattcgggttcacgtataccttcaaacacacttacctgtattttatgtctctccctggtgccaattctcagtgcaaaggtggacccaggtaacaacggccaacaaagacactctccataatgcctggcgatgtcacactcaagacacataggacagaatagaccacagaaacctgtcaataaccacatccaaaaagccaaggttctcagatttcttggagcaacttcacatctcaaagaatatttacaacattatgccaccagtttaatgctgcactgtctccctgctatcagactgagaataaataaccaattcccaaaactcattgtatgaaaattgccataactgagccacatcaaaattgccttcttttgttaaacactggcaaagatgaacctgatacaattctgttagcattgactatggtaattgttttgttcctgttaagagaaaaagcatcaaataatttttttacatttgaatcataactgttgctttcattatgttcatctatctaatttcaatatttaaaataaacatggtatacaggatatttttgaataacagacatctatttctataagtgtaattgaaaggtctttttttttttttttttttttttgagacggagtctcgctctgtcgcccaggctggagtgcagtggcgggatctcggctcactgcaagctccgcctcccgggttcatgccattctcctgcgtcagcctcccaagtagctgggactacaggcgcccgccactacgcccggctaattttttgtatttttagtagagacggggtttcaccgttttagccgggatggtctcgatctcctgacctcgtgatccgcccgcctcggcctcccaaagtgctgggattacaggcgtgagccaccgcgcccggccgaaaggtcttttatagtacactaattctgcctcctattcttatcagggctttattctatttctcagaccaagttattcaaatttatgttagtgtcttggagccactgacatctgccagttttaatctgcagattattaggggcttggttccttgaacatcaactgtaaacaatttgtcattagttcactcatctttactgatattgttttctacatattctgcatgaaccttccaacacagaggttctattctaaatatgttttgggtcacagaccattttgagagtacaatgatagctatgaactcagtccacaagggaaaagaaaactacatgcacatagacatgcaaaattgtgcattcaatttcacggagttcatgtatccaytgaaaattattaacagaccacaggttaagaacccctgatatacagttaagatgttatgtcatctagcatcataaaagatgacaactctgatgaatgcaaataattaggactgtgaaacagcaaaaattccaagctaaccataatctctgaaaattttttaaataaatattttatggaggcataatttatatataagaaaatgcacaggccatcagtgttctgtgggatgagtgtcaacaatcacatacacccaagtaaccaaatgtgtggaacattgctctcaccccagagctcctgtgtccttttccaatcaatcccagccctcccgttgccca

SEQ ID NO: 667447 - DNA, 2263 bp, Homo sapiens
tgatatgggcctttataattgaaccactgatttctctatcaacttcttggttctttctcttagaacctaatatttataattatttatttctttggagtaggtaataagtgaacatggcctaaaatttcagtgtaagaagggataggaagcaaaaagtaaatcccgctctccagctgtccccagccatccagttgcctgcctggaagtaatcattgttaccagtttcttgtaaccacttccagatacattctatgtctacataaacatatacatatatagtcttttaaaatagttccatacttctgtgccttacttttttttttttccacttaaaaatacatcagtctgggccaggcatggtggctcacacctgtaatcgcagcactttgggagcccaaggtgggcggatcacttgagggcaggactttgagaacagcctggccaacatggcaaaaccccatctctactaaaataatatggtattttagttaacttatatttcctggtaaagaataaaatttttaaatgtatttcctttctcaaagtttcccactaagcatggtatgtttcaacatcctcacccacccttcttttatttggaaaatcacaggtttggaaggcatctaggttttcatacagattcgggttcacgtataccttcaaacacacttacctgtattttatgtctctccctggtgccaattctcagtgcaaaggtggacccaggtaacaacggccaacaaagacactctccataatgcctggcgatgtcacactcaagacacataggacagaatagaccacagaaacctgtcaataaccacatccaaaaagccaaggttctcagatttcttggagcaacttcacatctcaaagaatatttacaacattatgccaccagtttaatgctgcactgtctccctgctatcagactgagaataaataaccaattcccaaaactcattgtatgaaaattgccataactgagccacatcaaaattgccttcttttgttaaacactggcaaagatgaacctgatacaattctgttagcattgactatggtaattgttttgttcctgttaagagaaaaagcatcaaataatttttttacatttgaatcataactgttgctttcattatgttcatctatctaatttcaatatttaaaataaacatggtatacaggatatttttgaataacagacatctatttctataagtgtaattgaaaggtctttttttttttttttttttttttgagacggagtctcgctctgtcgcccaggctggagtgcagtggcgggatctcggctcactgcaagctccgcctcccgggttcatgccattctcctgcgtcagcctcccaagtagctgggactacaggcgcccgccactacgcccggctaattttttgtatttttagtagagacggggtttcaccgttttagccgggatggtctcgatctcctgacctcgtgatccgcccgcctcggcctcccaaagtgctgggattacaggcgtgagccaccgcgcccggccgaaaggtcttttatagtacactaattctgcctcctattcttatcagggctttattctatttctcagaccaagttattcaaatttatgttagtgtcttggagccactgacatctgccagttttaatctgcagattattaggggcttggttccttgaacatcaactgtaaacaatttgtcattagttcactcatctttactgatattgttttctacatattctgcatgaaccttccaacacagaggttctattctaaatatgttttgggtcacagaccattttgagagtacaatgatagctatgaactcagtccacaagggaaaagaaaactacatgcacatagacatgcaaaattgtgcattcaatttcacggagttcatgtatccactgaaaattattaacagaccacaggttaagaacccctgatatacagttaagatgttatgtcatctagcatcataaaagatgacaactctgatgaatgcaaataattaggactgtgaaacagcaaaaattccaagctaaccataatctctgaaaattttttaaataaatattttatggaggcataatttatatataagaraatgcacaggccatcagtgttctgtgggatgagtgtcaacaatcacatacacccaagtaaccaaatgtgtggaacattgctctcaccccagagctcctgtgtccttttccaatcaatcccagccctcccgttgccca

SEQ ID NO: 667448 - DNA, 649 bp, Homo sapiens
tacaaacaaaaaggttttgagtcaggcaaagcttcttgtcatggctttgccatctggtaactaaatgacattgaaattaagtatctaaccccaatragcctcagtgtactcatctgcaaactgggataactccttccatgcagggtcttggcaatggtagcaataactcaagctgcagccattgctattaccttccccctctttcctccaaggggagcttttagaatctgtcatttgtgtgactggggagaaccctgaattaacacagggaatgggccaaacgttttaaaatctaaatgatcattccaatctgaatgttttaaggtatagtttttcacaactactaacagatatggaggagggggtgatcttgcctcttatatgtaaaacactggcaggaaaaggtacttccttaacagactcaaggtcttcccccaaaaattaaataaacacatgaattataatttaaaatataactaatagtccctacaatatataacatctttgagccacatagtcccaggtggcagtaacctttatttgcacaagaaaggtgatagatacatcacgagcgaggcctcaaagaatgtgatcctagcactcccacagttaactgtatagccctggacaaagggttttgcctgtctgg

SEQ ID NO: 667449 - DNA, 649 bp, Homo sapiens
tacaaacaaaaaggttttgagtcaggcaaagcttcttgtcatggctttgccatctggtaactaaatgacattgaaattaagtatctaaccccaataagcctcagtgtactcatctgcaaactgggataactccttccatgcagggtcttggcaatggtagcaataactcaagctgcagccattgctattaycttccccctctttcctccaaggggagcttttagaatctgtcatttgtgtgactggggagaaccctgaattaacacagggaatgggccaaacgttttaaaatctaaatgatcattccaatctgaatgttttaaggtatagtttttcacaactactaacagatatggaggagggggtgatcttgcctcttatatgtaaaacactggcaggaaaaggtacttccttaacagactcaaggtcttcccccaaaaattaaataaacacatgaattataatttaaaatataactaatagtccctacaatatataacatctttgagccacatagtcccaggtggcagtaacctttatttgcacaagaaaggtgatagatacatcacgagcgaggcctcaaagaatgtgatcctagcactcccacagttaactgtatagccctggacaaagggttttgcctgtctgg

SEQ ID NO: 667450 - DNA, 649 bp, Homo sapiens
tacaaacaaaaaggttttgagtcaggcaaagcttcttgtcatggctttgccatctggtaactaaatgacattgaaattaagtatctaaccccaataagcctcagtgtactcatctgcaaactgggataactccttccatgcagggtcttggcaatggtagcaataactcaagctgcagccattgctattaccttccccctctttcctccaaggggagcttttagaatctgtcatttgtgtgactggggagaaccctgaattaacacagggaatgggccaaacgttttaaaatctaaatgatcattccaatctgaatgttttaaggtatagtttttcacaactactaacagatatggaggagggggtgatcttgcctcttatatgtaaaacactggcaggaaaaggtacttccttaacagactcaaggtcttcccccaaaaattaaataaacacatgaattataatttaaaatataactaatagtccctacaatatataacatctttgagccacatagtcccaggtggcagtaacckttatttgcacaagaaaggtgatagatacatcacgagcgaggcctcaaagaatgtgatcctagcactcccacagttaactgtatagccctggacaaagggttttgcctgtctgg

SEQ ID NO: 667451 - DNA, 649 bp, Homo sapiens
tacaaacaaaaaggttttgagtcaggcaaagcttcttgtcatggctttgccatctggtaactaaatgacattgaaattaagtatctaaccccaataagcctcagtgtactcatctgcaaactgggataactccttccatgcagggtcttggcaatggtagcaataactcaagctgcagccattgctattaccttccccctctttcctccaaggggagcttttagaatctgtcatttgtgtgactggggagaaccctgaattaacacagggaatgggccaaacgttttaaaatctaaatgatcattccaatctgaatgttttaaggtatagtttttcacaactactaacagatatggaggagggggtgatcttgcctcttatatgtaaaacactggcaggaaaaggtacttccttaacagactcaaggtcttcccccaaaaattaaataaacacatgaattataatttaaaatataactaatagtccctacaatatataacatctttgagccacatagtcccaggtggcagtaacctwtatttgcacaagaaaggtgatagatacatcacgagcgaggcctcaaagaatgtgatcctagcactcccacagttaactgtatagccctggacaaagggttttgcctgtctgg

SEQ ID NO: 667452 - DNA, 856 bp, Homo sapiens
ccatttcctatacacacctcgcagttttttctgggaatgctgtcctcacctggcaagcgtccaaagcccattgtgaatcctagttgccaaagcccctcacagcctgtcagtgaaccagtcaacagagttgtcgaatgcccaccaggcactgagctgggcacaggtgatacagtgaacaagacagacatggttgctacagccatggaacctccaagctagcagggaagacaaaaactaaacaaattattaacatacttgattacaaggtattaagcgtgcaaagtgctagtgaggttcaattatgggagatgaagggagtatgtaatggagggtccacctagtctagaaagtcagagaagcctgcctggaagaagtgatcttcaggtgaaaacctggaagctgatagcagtcagccaggtgaaaaaaggaagcgagctgaggttctgcacacacctctccttagcgctgcagcccagttgcctttctactgaggtcactccagaaagcgccagtactcctggggcacagtgacttctgcagtacttagatcctcagccctgcccaacctccccgaggtcctcggtctggtttctggtgactaaagcaggttcgataattaacattgcttacttccttgattcagcatttctccagcaagaggttaaactttacatcatcgttttgcccaattaatcctggcaggtgagtcactgagacgacccaaccctgcccgggtggaaaagggagcggccyagcctgtacctcagacattttaatgtagacactatagctctgggagctgggagcaggggacattgatatccaaggccaatgaggcctgcaacacacacacaca

SEQ ID NO: 667453 - DNA, 856 bp, Homo sapiens
ccatttcctatacacacctcgcagttttttctgggaatgctgtcctcacctggcaagcgtccaaagcccattgtgaatcctagttgccaaagcccctcacagcctgtcagtgaaccagtcaacagagttgtcgaatgcccaccaggcactgagctgggcacaggtgatacagtgaacaagacagacatggttgctacagccatggaacctccaagctagcagggaagacaaaaactaaacaaattattaacatacttgattacaaggtattaagcgtgcaaagtgctagtgaggttcaattatgggagatgaagggagtatgtaatggagggtccacctagtctagaaagtcagagaagcctgcctggaagaagtgatcttcaggtgaaaacctggaagctgatagcagtcagccaggtgaaaaaaggaagcgagctgaggttctgcacacacctctccttagcgctgcagcccagttgcctttctactgaggtcactccagaaagcgccagtactcctggggcacagtgacttctgcagtacttagatcctcagccctgcccaacctccccgaggtcctcggtctggtttctggtgactaaagcaggttcgataattaacattgcttacttccttgattcagcatttctccagcaagaggttaaactttacatcatcgttttgcccaattaatcctggcaggtgagtcactgagacgacccaaccctgcccgggtggaaaagggagcggcctagcctgtacctcagacattttaaygtagacactatagctctgggagctgggagcaggggacattgatatccaaggccaatgaggcctgcaacacacacacaca

SEQ ID NO: 667454 - DNA, 856 bp, Homo sapiens
ccatttcctatacacacctcgcagttttttctgggaatgctgtcctcacctggcaagcgtccaaagcccattgtgaatcctagttgccaaagcccctcacagcctgtcagtgaaccagtcaacagagttgtcgaatgcccaccaggcactgagctgggcacaggtgatacagtgaacaagacagacatggttgctacagccatggaacctccaagctagcagggaagacaaaaactaaacaaattattaacatacttgattacaaggtattaagcgtgcaaagtgctagtgaggttcaattatgggagatgaagggagtatgtaatggagggtccacctagtctagaaagtcagagaagcctgcctggaagaagtgatcttcaggtgaaaacctggaagctgatagcagtcagccaggtgaaaaaaggaagcgagctgaggttctgcacacacctctccttagcgctgcagcccagttgcctttctactgaggtcactccagaaagcgccagtactcctggggcacagtgacttctgcagtacttagatcctcagccctgcccaacctccccgaggtcctcggtctggtttctggtgactaaagcaggttcgataattaacattgcttacttccttgattcagcatttctccagcaagaggttaaactttacatcatcgttttgcccaattaatcctggcaggtgagtcactgagacgacccaaccctgcccgggtggaaaagggagcggcctagcctgtacctcagacattttaatgtagacactatagctctgggagctgggagcaggggacattgatatccaaggccaatgrggcctgcaacacacacacaca

SEQ ID NO: 667455 - DNA, 1318 bp, Homo sapiens
ttagacaataaacaatgttataaccaagcaatggaataaatgtcacctgagtcgtaaagaatgaggcaggtttagctgtgttgcaatgggaagtttctgtactactttgtcacatgagaatttatgctggtacagatagcactattctatgtttgtaaaattttcataaatgatacatatttattgaatgccttctgtgggcctcgctgtccttggtacttgagaaaagcactgagtgaagtagatattatccctgtctttgtcgagtttgtagtctaatgggagtatgaggaaaagcacaaagactgagaagtaaacagaactgctgacacagcaaagatttttaaaagggcaagggactctggtggagacgacagtggtgggaggacagccttagatgaatgtttagggacaatctctccaaagagatgacacttatgaccttaaggatggatggaaattacctacgggcagacagaggagcagaatgtttcaaacagagagccagaagtttggaaataacctgtggtatgtttgaaaaactcaaagaaagtgggccagaaaatggaatgaaggagcacgtggtacagagaggatggagatttaggcaggggcagaccatgttagacgttggagatcctgcatcagagtttgggcttgactccaagagctgtcagaagctactggagggtggtaaggagtgggaagatgggatctgttgagtaaagaatgtattgtgagggtcaagagcccaaccagagacaaggccagggctgttgcagtcagaaggtggagaggcagtagcttcctgtcctggggtcgtgagaggtgagatggtgaaaggaaggcagattcagaacgcatcctaccctcctgaggaggtcggggagaaaatcagttcccctatcacaccccttgcacagatgaacctcatatctcaaaagcaaaatagttatttttaaacaccagtactttttctttttctttttctttttttttttttttttttttagttgatataatccaactctgtggaaattgtgggaaacgccatctctggggataatgtacacatcatagataaggagactataaagatggaaaatatcgataccttacacaacttctttgcagaattggaagaaaagggtttttgtytgaaatgcaacgtgcactgctgtgtttgttaccctttggctccaaacaatgtccctccaaccaacagcaaatgctgaatatgttagaaagagggggagggaaggaagagtgactcttataatctcatgattgttctgcacgcctgtgggcagaagaagta

SEQ ID NO: 667456 - DNA, 1318 bp, Homo sapiens
ttagacaataaacaatgttataaccaagcaatggaataaatgtcacctgagtcgtaaagaatgaggcaggtttagctgtgttgcaatgggaagtttctgtactactttgtcacatgagaatttatgctggtacagatagcactattctatgtttgtaaaattttcataaatgatacatatttattgaatgccttctgtgggcctcgctgtccttggtacttgagaaaagcactgagtgaagtagatattatccctgtctttgtcgagtttgtagtctaatgggagtatgaggaaaagcacaaagactgagaagtaaacagaactgctgacacagcaaagatttttaaaagggcaagggactctggtggagacgacagtggtgggaggacagccttagatgaatgtttagggacaatctctccaaagagatgacacttatgaccttaaggatggatggaaattacctacgggcagacagaggagcagaatgtttcaaacagagagccagaagtttggaaataacctgtggtatgtttgaaaaactcaaagaaagtgggccagaaaatggaatgaaggagcacgtggtacagagaggatggagatttaggcaggggcagaccatgttagacgttggagatcctgcatcagagtttgggcttgactccaagagctgtcagaagctactggagggtggtaaggagtgggaagatgggatctgttgagtaaagaatgtattgtgagggtcaagagcccaaccagagacaaggccagggctgttgcagtcagaaggtggagaggcagtagcttcctgtcctggggtcgtgagaggtgagatggtgaaaggaaggcagattcagaacgcatcctaccctcctgaggaggtcggggagaaaatcagttcccctatcacaccccttgcacagatgaacctcatatctcaaaagcaaaatagttatttttaaacaccagtactttttctttttctttttctttttttttttttttttttttagttgatataatccaactctgtggaaattgtgggaaacgccatctctggggataatgtacacatcatagataaggagactataaagatggaaaatatcgataccttacacaacttctttgcagaattggaagaaaagggtttttgtttgaaatgcaacgtgcactgctgtgtttgttaccctttggctccaaacaatgtccctccaaccaacagcaaatgctraatatgttagaaagagggggagggaaggaagagtgactcttataatctcatgattgttctgcacgcctgtgggcagaagaagta

SEQ ID NO: 667457 - DNA, 1216 bp, Homo sapiens
tggagtttaatcctttgagaaagcaactctctaatttcacaggctcaacctgttaaggaattctatctagcccacaaaacaaaacaaaacaaaacccttgccaatgggaactgaggcatattagaaataattatgttagaaattgttgacaggaatcattttcttttcctgttatattctcatggagtaaaaagtgtagaatcagttgtgggcggcccatatggccaaaaccccatctatctcattggccatttgatctgcaatttggcagtgaaaatggagattaagacttgagattttttttaaaaccaatttttacatgatgccaggaaagaaaagaacatttggcctgtttccggcaactcatctaacttacaaatgggatccccaaatatctcatcataatattgagagtgatcagcttttccatttctggatggaattgagaggtacagaaaaaaaaaacagtaaatagaatgatggtctcttccaaataaccaacatgaagctccttcatttaaaacagggaaaagtacaagaaactccaaagaaagcatgaaaaaaaaaaaaacctctaaaccactcacagcatccatctaaaacaaattcttaaattctaatgaggtctcatattacttaaatttatcccccagagctatctgttagatgctgtttgggaaaagtttttggcagtagaaaatgggtaagtctaaattctgagggaaacaaattgaaaagaaaagcgtcctttggaatcaattcgctataggatagggatgaaggtaggtgaggacacacttttccccagcaatccccaatggattcttagaattggattccatgctgtccattgttcttattaccagttgcccacgaaaaggcctgggaacacgaacattatctttgcaaaatttaaatcctgattgttggaatttactttaaaattccaggtattctaattatygtctttttttctgttttgccttcattacaacactatatttatactgtgattaattcaaataaacaaatgaagagttttccagcttactaaagtccctaccactccctattgccacacccagtctagctcactcatttatgttaccggccctttccctgtgggtatttgagtttgcaatccctgatagagaaccgcctgattctttagaacaacttatttgaatcatattgtctggatttatcatactcaggt

SEQ ID NO: 667458 - DNA, 1216 bp, Homo sapiens
tggagtttaatcctttgagaaagcaactctctaatttcacaggctcaacctgttaaggaattctatctagcccacaaaacaaaacaaaacaaaacccttgccaatgggaactgaggcatattagaaataattatgttagaaattgttgacaggaatcattttcttttcctgttatattctcatggagtaaaaagtgtagaatcagttgtgggcggcccatatggccaaaaccccatctatctcattggccatttgatctgcaatttggcagtgaaaatggagattaagacttgagattttttttaaaaccaatttttacatgatgccaggaaagaaaagaacatttggcctgtttccggcaactcatctaacttacaaatgggatccccaaatatctcatcataatattgagagtgatcagcttttccatttctggatggaattgagaggtacagaaaaaaaaaacagtaaatagaatgatggtctcttccaaataaccaacatgaagctccttcatttaaaacagggaaaagtacaagaaactccaaagaaagcatgaaaaaaaaaaaaacctctaaaccactcacagcatccatctaaaacaaattcttaaattctaatgaggtctcatattacttaaatttatcccccagagctatctgttagatgctgtttgggaaaagtttttggcagtagaaaatgggtaagtctaaattctgagggaaacaaattgaaaagaaaagcgtcctttggaatcaattcgctataggatagggatgaaggtaggtgaggacacacttttccccagcaatccccaatggattcttagaattggattccatgctgtccattgttcttattaccagttgcccacgaaaaggcctgggaacacgaacattatctttgcaaaatttaaatcctgattgttggaatttactttaaaattccaggtattctaattatcgtctttttttctgttttgccttcattacaacactatatttatactgtgattaattcaaataarcaaatgaagagttttccagcttactaaagtccctaccactccctattgccacacccagtctagctcactcatttatgttaccggccctttccctgtgggtatttgagtttgcaatccctgatagagaaccgcctgattctttagaacaacttatttgaatcatattgtctggatttatcatactcaggt

SEQ ID NO: 667459 - DNA, 748 bp, Homo sapiens
tttttccgaagacttgggtgtgtgacataagtaatcccatggtagcccagggcacaatgggagaaatgaaaaatggaaggcaggttcaaacatgcagtgtgactgcaagagtaaccttcctgttctaagacttgaaaaagttttcagatccttggtgtattttatcagcagaacgttcatctgcatatggcattcagaagcaaactaaacttttctttcccccctgagtcttttgtttccaaatcaatgggaaacaaaggatacccctgctccattcaggcagtttcaatgattctcaaatcaacgtgggagcagtcgttgggccatttaaaatatacagtgataaaaaaaaaagcatacttattaaccttgtaaacattctataaaagtacaaggggaacctttataaagaatagccaagtgtcctttttatagaatagccytttgtactttgaaatgttcatgtctataaaatagaactggacagacgagcctaatgcaatttccatgtcttctagtaattgttccgttaaaacattatttttcagcgtcttaacacccggaagattaagttacctcaacccaagatcagttccactttaaaaaagcactttcgacccatatttaaccaaccgtcagagaggattcaaaagagggctaattgagcactgagtgtttgaagcattcaaatcaaggcccaggtttcttcttgaaaacagcaacagctcagcctggcaggaagcaggga

SEQ ID NO: 667460 - DNA, 3585 bp, Homo sapiens
ttcacatcatatctgttacctttctctttgtattaacttgtccgtgtactctattgacagctgcttaaggattggacagtaacctactcagtaaccacttactaaattaaatgatttaatagttgttaaatttaacatctggtatctattggtccttttataacagtagttgcttgtcctcatactaaatttcaggtcagccctgggaagtactgtaagtattctttaatacttactcattgtcatcatatgagttgcttttaactatttgttaagggtataaattcaaaagtaaaatttttgctttctcttatcctcatttttcactccccagatataacaaatgttaacagtttgtatgcaccctcctagaagtttgtatatatatgcgaacataaatgggagcctattacatatactcttctgcgctctgatttttaaataatttatcctagagatctttctatctcttcacgcttattttttttcttacttgcgttgttgtaccccattgtataaataatcaattattgatttaatcagttccctgttgatgaacatttaggtgatttccagttttctcggtaacgataatattacactgatggttctcctgcattccttattagtgctttttgctaataccactcctcaaagggattaaagatcctagatccatatccccactgaagaagagctgcaacccctcttaaagcctgccaccagtgtgccctcttctccctttctttttttttttttccttccttgcagtcaactcttgctaaccctatgattgcccacaagcaatacatttaaaccagggacccagctgaaatgctttaatggacaacacaaagtgggagactaaatatgtgaagctatagcaagtacaagtgactcaccaacctatttgcatctggatctcttgcccactatctactaacatttttcctatcaaagctgcttaatgattccttaattgccaaatcagataactggttctgttctccatgcatcctgactgtgctgcaacatttggagcactttctctcctgctctttcctctataactttcctgctctttcctctcctgctctttcctctataactttagaggtacagtgggactcatggagaaaaggagagacctgaggcctgaagacattgaaattcaaaaatattttcaaatactcgtggctttcaggctccaggatgccagctgatgttcactgattttaacaaatctgcactcaaaagtgtgcaaaattgtccctaagcctggaatgtctggagtctcacctcttattcatctttcaaggacccagcttaaattccaccttcccagattgttccaatttcctctccctcttactgccttagcagtgtatttatgcctgtgtttataacacatcacacattgccttccattcgagttatctgagtaggtctagtagaatgccaaaaggctgggtttgagtttctcattcttcctgcccttagcattcatttccatttagtgaattcttaataaatgtttggctgatttgtttattgggagaaaaacagggaaaaataaaacttagttgcaagtcacagacattcaaagtggagacagtacataatggtcatgacatcaaatggaaagttaaacaaaaatctttgaatacccaggatgtgaatattgttcagccaaaaataagtctgtaaaaggaatctatgagaatatcacagaattagggaagtctcttttttctgtattatgttcagtcagaataatagattactttgcttcatcatagaaaacacacatggcaggctttaataatcagtctgaaataatttcttgactccaaggattatgaaagcagtggcacccaggcagttagaactctaggaaaagcaagataggaacatgtgcaacaacctgcaaaataaacagcaccttaatgtcagaatgccagaagctctcatgaacaggcttgaaaacatccagttgcacactggtacattggctcaattgatttacgtattagtgcttttttaaactgtgtgtccaagaataacagggtgctatctcgagagtgctaccagaccaagagtagtggttaatattgagtgtcaacttgattagattgaaggatgcaaagtattgttcctgggtgtgtctgtgagggtgttaccaaaggagattcacatttgagtcagtggactgggagaggccgacccaccttcaatctgggtgggcaccatctaatcagctgccagtgcagcaagaataaagcaggcagaagaaggtggaaggacttgacttgctgagtcttccagtcttcatctttctcccgtgctggatgctttctgccctcgaacatcagactccaagttcttcagcttttggactcttggagtcaaaccagcagctcttgggccttcggccaccggctgaaggctgcactgttggcttccctacttttgaggttttgggactcagactgggccaccactggcttccttgctcctcaccttgcagacagcctatcatgggacttcaccttgtggtcgtgtgagtcaattctccttaataaactccctttcatatatacatatatcctgttagttctgtacctctagagaaccctgattaaatacacctcaagcttgggagaaagcctgcagatcttgttgatgtaagtgggaggttaatcagttgttttgaagtctgcctttcttacattgaacattttacactgagattatgtttttcattgcatttattgaggtagaactgacatgccgtaaaattcattcttttttagcatacactactatacattttgacaaatgcatacagttatgttaactactaccacaatcaagatatagaacagtgccatcatccccctaccccctaggtgctctcatccccttttaaggtcaaccctttcaccacctccagcctctggccactacttacctgttttctcactmtatagttttgccttttccaagatgtcatataaatggaatcatatgtagccttttgagtctagctcctatgacaaagcataatgaatttgaggtctgtccacattgttgtatcagtagttagttcctttttactgctgagtagtcttctactgtgtggctgtgcagtttacccattcaccagctgaaggacatttgggttgtttccagatattggtcattataaataaagtcactataagcatgcgtataccattttttgtatgtatatatgttttcatttctcttacctaaatatctaggtgtgaggttactaggtagaatgacaggtgtatgttcaactctctaagatgctgctgaaccattttccaaagtagttgaactgttttgcattcctatagtattcacaagaacttaaaggtctaagactaaggttaaatctataccattgtatattatttcaataggattacttgtttcaagtagagtgaaagtcacttaaaggtgttgattgggttgttctggctcagctgcaggtgtattgagaagaaaggagagaagtggaatggagatgtagacgccatcccaaagggttaaattttt

SEQ ID NO: 667461 - DNA, 1400 bp, Homo sapiens
acttgactccctaaattccatttattttttcatgtttagtcactgtgctgcaatagttctcaccattttaaatctcattccctacaaaaagataagtaggaatatgtaaatccscacttgagtaacaatgaagcagtttataccaaaagtagtgccaacaacgtataaataatgattcatggccataaagtatgatttttgtaataagacgtaaaagtagaaataatttttctttgttttccctggaaatcctattgttgggcagattatgttaacctagcagttcacttcctagaaaaaccagcctatttcacaccaggcttccttcctttcccctgttgatctatggaggatctgaaaaccagaaaggtaaaggtgaatcatcaatgaccaatggaaataatttttttaaatgtccttttagaattagcacatattgacgtcattacacaaggccaaaacttacatgcactaggtgacttatccttgtatatgtggttcattatcctatagaaaatttttactcctaaagatgtacatacattcatctgggacctatagacaaaaagatatattttatccataactgtattttttttctctcataaaactgtaccactgtgcttggcttcccttccatgttgaagaactatctcaatcattctctcttcttttatactcagtgcaattatacagcctacattgggggtgggggtgggatatcattgtaaatgcattagattctggtgaaaagacagcctcagagaagctacagtgttcctaatctagccagttaatttggtgttgagcttgatccaggttctaacttgattttttttcctttagagctttccctttccgtcaaataatcatcccagtcttcctttttctcttctgaaataacagagtagaatgcggactttacaaacttagtgtatccaagattatttaatttgggtggtttgagcatgtcactaataaaatataattttaagtttgattcctgcatgggtcggttcaatgtgctctgcctcactgctatagattgtatccccaaaacatccagttaaaaaatcatgataacatcaaagaaaatggggcatttggattaggtatcgaatctgagatatctttacatagctgactcttctcaactgtctaatctggaccatttaatattatgaaaacatatctcattctttatggccacagttctctgtctccatgaaacaaacaaacaaaaagtttagatggcacggttgtgctgaattaaaactaaaatttctcacgtgagttttcctacacagcaactgctttgtaatggctgaacacacatctttcagtaaaatcaggaacatactggaaattacaagctgtaaatatcatttggccattttgcc

SEQ ID NO: 667462 - DNA, 1400 bp, Homo sapiens
acttgactccctaaattccatttattttttcatgtttagtcactgtgctgcaatagttctcaccattttaaatctcattccctacaaaaagataagtaggaatatgtaaatccccacttgagtaacaatgaagcagtttataccaaaagtagtgccaacaacgtataaataatgattcatggccataaagtatgatttttgtaataagacgtaaaagtagaaataatttttctttgttttccctggaaatcctattgttgggcagattatgttaacctagcagttcacttcctagaaaaaccagcctatttcacaccaggcttccttcctttcccctgttgatctatggaggatctgaaaaccagaaaggtaaaggtgaatcatcaatgaccaatggaaataatttttttaaatgtccttttagaattagcacatattgacgtcattacacaaggccaaaacttacatgcactaggtgacttatccttgtatatgtggttcattatcctatagaaaatttttactcctaaagatgtacatacattcatctgggacctatagacaaaaagatatattttatccataactgtattttttttctctcataaaactgtaccactgtgcttggcttcccttccatgttgaagaactatctcaatcattctctcttcttttatactcagtgcaattatacagcctacattgggggtgggggtgggatatcattgtaaatgcattagattctggtgaaaagacagcctcagagaagctacagtgttcctaatctagccagttaatttggtgttgagcttgatccaggttctaacttgattttttttcctttagagctttccctttccrtcaaataatcatcccagtcttcctttttctcttctgaaataacagagtagaatgcggactttacaaacttagtgtatccaagattatttaatttgggtggtttgagcatgtcactaataaaatataattttaagtttgattcctgcatgggtcggttcaatgtgctctgcctcactgctatagattgtatccccaaaacatccagttaaaaaatcatgataacatcaaagaaaatggggcatttggattaggtatcgaatctgagatatctttacatagctgactcttctcaactgtctaatctggaccatttaatattatgaaaacatatctcattctttatggccacagttctctgtctccatgaaacaaacaaacaaaaagtttagatggcacggttgtgctgaattaaaactaaaatttctcacgtgagttttcctacacagcaactgctttgtaatggctgaacacacatctttcagtaaaatcaggaacatactggaaattacaagctgtaaatatcatttggccattttgcc

SEQ ID NO: 667463 - DNA, 574 bp, Homo sapiens
actaaggcagaaaaattgcaccctatttcctttaccccatcacatgttaatacagcattaaccactagcctttaaatacatctcctgataaaatcagcgcatattgcagacatgactgtcgtccacaaggagaagtggcaaatcacacaggaagctgtagactgttcttatttctccagcaaggattcacagataaaaagtgattgcaaaagcagtgtctgctgagaatgaaggccatagctgggtcctctgggatttaccctgcaagttgcacctgccccagccgggacaggccaccttagggacagaatcttcctcttctcagtcactgggttagtgcatataaaatcactctgcatgacaggaaagacaagagttctctttatttcctttgggtccaaacctgttttgcctaggagccttcggtcatgaacaacttttctgccaggtgaaatggagtgtttacagacatgggaaaaaaatttaaaacaagaaatttttatatcccttttctacactatatgcatttcattgcccccgacttctcaggctatatgcyagaaatctcacatat

SEQ ID NO: 667464 - DNA, 738 bp, Homo sapiens
gccgtttggccacactttctcacgggggaacccatgtgagcaaacatttagtaccagatgtgcaaaggattagtgtcgtatcagttaattgccagacagggaaaaaagtcactttgcaatcacaaaaatgaatttaaagcatgaccttaaaacgcgtgttaaagtctggtccattgattagcgacaatgtaagttttcaaggtttggtggttatggagcaaaataagagctgacctaaactggggaagaaaagggtaatttttatttaaaataaaaaatttttacaggaaggttttacatttttatcatgaaaagatctggccgcaacactataaataatatactgcatagattcatataaaccactttttttaaagcagacaaaaatgtaccataaagttgatattagtaacaggtaaaataaaccaacaaccccagcaacttgggtggggagagagtttttttctttctttcttttttccyttagagttttttataagctagctcacatagcagatggagtgaaggaatagcaatgatctgatgattctatattactgcaaataaacccaactatgtaacaagccactgagtaatttgtaccaaaaatacaatatatctcaatagctgcatttgtatggactaacttgttgtaccttattttcctatcaccttgtcttaatataaatatgttatctttcggagtcatcgctcattctggaggccagtccaactgga

SEQ ID NO: 667465 - DNA, 598 bp, Homo sapiens
tgaatgatgtaaaatgaatgacgtaaatgaagactcccctatcttaatggtctaggaagctcaaaaaattatcagcttagaccagggatggagaccatgtggaagaaaacacagacttctcaagagagccaaggacaaataaaaataatytggacacagggagtggatggatggagaagtccagagtaaagggctttccacgtatccctctcacatgggtgccttggaaaccttcttgcccaccacttactatctgtcctccaaggattcatcaagatcctacttcttccatgtagccttccttgactcattccgtcttcaagggtctccctcttcttccaacttctacagtacttagagtctagaccagtgggtttcctgtggggtcctggagtccacatcaccccccaccagaagtatttcatgagctatctcatctcagaggagggaggatgtacaaatgccccatcctgactttgaccagaacagctaaaacaatgtaacctaatttatgcacttcaatatacaaagaacaggttctgctgctataacaaaaattcttttgacaagctgcagtatcccgtcaggtactttcatt

SEQ ID NO: 667466 - DNA, 589 bp, Homo sapiens
tatatataaattatttaaactttgcccattaataatcttccctcctgaggtagtttgtgaaaaccttactaaaagcgtactgctttcaataagcacgtgaaaagatgctcaacatcattagccatcagggaaatgccaatcataacaacaatggggtaccaattcgcactccctaggatgtctgtaatcaaaaagtgttgtcaaggatgtggaggccgaggcaggcggatcacctgaggtcaggaattcgagaccagcctggccaacaaggcgaaaccctgtctctagtgcaaatacaaaaattaagctgggcacagtagcccamccctgtaatcccagtactttgggaggttgaggtgggcagatcacttgaggtcaggagattgagaccagcctggccaacatggtgaaaccccgtctctactaaaatacacaaattagccgggtgtggtagtgtacacctgtaatcccagctacttgggaggctgaggcaggagaatcgtttgaaccagggaggtagaggttgcagtgagctgagatcgtgccactgcactccagcctgggcaacacagagtgagactccatttca

SEQ ID NO: 667467 - DNA, 909 bp, Homo sapiens
tgggatgtgcaacatgaccagcctgggaggtgaatgattctctactcactgtagtgaatcccacagtgtagaagttactcatgtttatagatctttaactccctgctagtcctttcccatcgcccttttccataaagaaagcaagtgtcaggttcagagcttgtggggccacagcttttcatcagcatttatagatgctggttggtttcattgcatttttcttttacctttaccttctacttgtgaaaagtgatactggtttttcatttacaatagagcatggattgaactgtgtcctcctaaaattcacatattgaatttctaacccctagtacctcagaatrtgaccttatttggaaataagatgtaaacaagatgcaggggtaattactcaagatgaggtcatgctggagtagggcaagcccctgatctaatatgactggtatccttataaacagaagaaatttggagacacacaagcacatggggagaatgccatatgaagattaaggcagggatcagggtgatgcttctacaaataaaaaacaacaaagatttctgctagcaaaccatagaagctaggagagagagacatgggccagattctctctcagcgtcctcagactaaccaatcctgatgacaccttgacttcggacttcaatcctctagaactgtgggaaagtacatttctattgtgtaagccccccagtctgtgatactggagcagccatagcaaactaatagaaattgtggtattagtcttccctttaaaattaatgtaacatgaactaatttcaagaaaaatattaagtttgcagacatggcaaggattgtgattgtgagacagaaatgacagaagtttggacaccattgcattagatgatttttaagcatctacaggtctcaga

SEQ ID NO: 667468 - DNA, 909 bp, Homo sapiens
tgggatgtgcaacatgaccagcctgggaggtgaatgattctctactcactgtagtgaatcccacagtgtagaagttactcatgtttatagatctttaactccctgctagtcctttcccatcgcccttttccataaagaaagcaagtgtcaggttcagagcttgtggggccacagcttttcatcagcatttatagatgctggttggtttcattgcatttttcttttacctttaccttctacttgtgaaaagtgatactggtttttcatttacaatagagcatggattgaactgtgtcctcctaaaattcacatattgaatttctaacccctagtacctcagaatatgaccttatttggaaataagatgtaaacaagatgcaggggtaattactcaagatgaggtcatgctggagtagggcaagcccctgatctaatatgactggtatccttataaacagaagaaatttggagacacacaagcacatggggagaatgccatatgaagattaaggcagggatcagggtgatgcttctacaaataaaaaacaacaaagatttctgctagcaaaccatagaagctaggagagagagacatgggccagattctctctcagcgtcctcagactaaccaatcctgatgacaccttgacttcggacttcaatcctctagaactgtgggaaagtacatttctattgtgtaagccccccagtctgtgatactggagcagccatagcaaactaatagaaattgtggtattagtcttccctttaaaattaatgtaacatgaactaatttcaagaaaaatattaagtttgcagacatggcaaggattgtgattgtgagacagaaatgacagaagtttggacrccattgcattagatgatttttaagcatctacaggtctcaga

SEQ ID NO: 667469 - DNA, 647 bp, Homo sapiens
ctctggaatagcacttgcatttaaaaccttgtatctgctcagttaaagaaagaaagaatggttaggaaaatgtgaccacatgccaacaaaatgacaccaaaaagaaatatcaacaaacatctgagagtagaaataaaagtggaaaatccaactgccgtttaaggacagatagtaaaacaatatgattttctgttgcatgcctgcttcctgttatccttctaacctgttgtattatcctaccaccacaagactatattattcgacttcttaattttttaatayatactaattcacagtgttaatgaaatacatcaaagaagactgacctttgtttgaaatcaccatataagattctgcttgggaatcctttcctacagatgcggatgccttccagcacaccattacacctcagctggtgcaacacaagttcatgttccattgcccctaaaaatatagaacagtacttattagtgggcatttaactttcaaacctgtgcccgtttgattatttcactctctgtgtcttaccaggagttttggtttcattgggaatgatacaccgtacgaagtgagggtgtgtgctcctcagattcgtcatcaatttatttaaattttcctagaaaaccagacagaaaggacttgatgaa

SEQ ID NO: 667470 - DNA, 671 bp, Homo sapiens
ggcaaaagtcagaggagatgatgaacctggtcttgccctcaggaaattcatttttctaaacagaggacaaacccacaaaggcaagaagacaatgacagacatctgctaaggcatgtggataacgtcacagtccagcagggctccgcgggaggctgcctctcaggtgtgcacaggggcctgtggctacctgtgtgaaacgcagggcccgcacagcactgcctcccagagtggggattccacagcgactctgaacttcatacttagaagagcagggcctcacytgggctgccttggaatcctcaggaaattggatctcatggggttcttagacatcagatagtttaatccctcgctggaacagatgaaaaagggaaagagccaaaggaaaacaatgaccaagtgccaagctcgcaccatgtgctctaatcctcacgctatcccaggggtcagagacacaatctttctgcagatcgcctgccagtcacacagccaggatgcagggaggaaccaggatctgtgtgaccagtgccccagcactcccctcactgccccaagccaccgcaggtgaaaacaggaagaggcctgtccaggtgacaagggtaacaagtggcacatccaggcctggaccagggctttcgaccaagtcttacatgcaaaaacgttcatgtcca

SEQ ID NO: 667471 - DNA, 1383 bp, Homo sapiens
gtaaatccaggtaccaaacccaacagtaagcttattgtcagtctaagtcagaaggaaacatttccatcctcaggtttctcatcttctaagcctggagattgtgatgtagttaggaattttcctgtttagaaaaaaggactgaattcttctagaaaagcaactctatcaatagggaatgctttgaactacaaggaccagaacacctggcaaacactggcttgaaagataaggatttctttttctcaaatgataagttgggaatccacagcctacgtgtcactggccagaactgagttgcacagtaacccctattgcatagatggctgggaaagctagtttctggctgttccagctgccctagtgaagtcaggtggcagggagagggggttttaggttagcagctaacattgtctgctacaaaacccacttcattcattttctctttacctggaagtcaagtctttctcacatttctcccaagcctttcaacaagaagttctccagaagatgcatcatcgtctcactcctggctggaatcatacttccagatgtctacaatcacctgatttgctttaatacccttttgtgatatctagtctctgttataatacattctgcattccaaaaaaaaatcaggtgatttctgtacattctgtacattatgtaaatttgttcacttgtattttaatgtcctctacatggaaaaagaggacaatagtggtttgaacagtggcctctcaaaaaatgtccacctcctcatccctagaacctgtgaatgtgaccttatttagaaaaaagagtctttgctgatgtaattatttcaaggatcttgatatttcaatcacacgagattatccaaatgagaccaaaatctaataacaagtgagatttgtcaaatgtccttataagagacaggcagaagagaagactggcacagagaagatagtcttattaagatggaggcaaagattggagttaggtggccacaagccaaagaatatctggggccaccagaagctgaaagatacaaagaaagatcctctcctagagccttcagaggtagtgcagccctcccacagcttgattttggactctggcctccagaactttgagagaatacacttctgtcatttgaagtcaccaaatttgtgataattttttattccagttctaggaactcataaaatggccattccatttttgttgttattgtatatgaaattaacaaattcccaaaatttttttatatagaactcagagaacaattaaaacaaggtagagttgtccatstgtaggtttagagcccaaatcagacagtttttgcatcaaaacgaagcctgactcttgttttaagtccatgatacactccaacttatcaaaaaa

SEQ ID NO: 667472 - DNA, 1552 bp, Homo sapiens
taagcctagcctgaattactcacctacaatattatgaactaattaatttaaatggtggttgtctcaagtgactaagttttggagtgttatttttgcagcccaagctgatacaaagaaacaggtacttgcagacataactggtaggagtataaaacttttctctgaaggaaatctggcaatatctaacaaaattagaccagcagtaccacttctagaaatctatactaaaggtatacctgtaaaagtattaaatgaattatgtttgggttatttttttgtgacattataatagcaagtgactgaaaacaaacaaatgcttatcaatttgttagcacagatcagaattttatgcagttgtaaaaagaacgaggaagatttctatgtactgacagagtgaactctgcgatacacgtttaagcgaaaatgcaagatataaggaggggtgtttattaggctgaatgttgtataagaaaagggaggagataatatgcatgcatatatgcttctgctggaaaaaagcatcagtgaaaatataaatccaaaactaataaaaatggttacctatagaaggtgagagttggggtgaagagaacagggaagaaaatgaaaattgcccaagagtactatttcacatagtctttactctttaaccacttaaatattttatrtatttaaaacaccatgaaatactccacaaaaaagttatagtaacacacatgaaataatcattttgtgtgcttttaaaatacagctttttaaactgaatatacatagtgagatacatataaaggataaaaagaaatacaaaaggtattcaatatatttaaatgtaatataagaattttcttttttttttttttgagaaggaatctttgtctgttgcccagcctggagtgcaattacacgatctcaactcactgcaacctccacctcccgggttcaagcgattcttccacctcagcctcctgagtagctgggattacaggcacctgccatcatgcccggctaattatttatttatttttttaatatttatagagatggggtttcaccatgttggccaggctggtcttgaactcctgacctcaggtgatctgcccacctcgacctcccaaagtgctgggattacaggtgtgagccattgcgcctggccccaagaatattttataaacattgtataaaaatgtaaataaacaattatgttaatgttgctagaaatcatggatcttcaaaataagagaacaagagatatacaagtgtaaaatcaaagaagctgagtaaaaactgaaaataaatatattttatgtttttttttatacatacactctttcacatatttcttgccttggtccactaaaagaatctagaggcactgttatgccagcaccaaggtttcagtctctaaacaccattcattttaatagaaattgggttccttggagaaagagttaattccaggcctgaagaagaggaggtctagatatacttgggacaacttttgcctaaaggcaagatattttttagagactaactgggttttttaaaaaaagga

SEQ ID NO: 667473 - DNA, 1552 bp, Homo sapiens
taagcctagcctgaattactcacctacaatattatgaactaattaatttaaatggtggttgtctcaagtgactaagttttggagtgttatttttgcagcccaagctgatacaaagaaacaggtacttgcagacataactggtaggagtataaaacttttctctgaaggaaatctggcaatatctaacaaaattagaccagcagtaccacttctagaaatctatactaaaggtatacctgtaaaagtattaaatgaattatgtttgggttatttttttgtgacattataatagcaagtgactgaaaacaaacaaatgcttatcaatttgttagcacagatcagaattttatgcagttgtaaaaagaacgaggaagatttctatgtactgacagagtgaactctgcgatacacgtttaagcgaaaatgcaagatataaggaggggtgtttattaggctgaatgttgtataagaaaagggaggagataatatgcatgcatatatgcttctgctggaaaaaagcatcagtgaaaatataaatccaaaactaataaaaatggttacctatagaaggtgagagttggggtgaagagaacagggaagaaaatgaaaattgcccaagagtactatttcacatagtctttactctttaaccacttaaatattttatgtatttaaaacaccatgaaatactccacaraaaagttatagtaacacacatgaaataatcattttgtgtgcttttaaaatacagctttttaaactgaatatacatagtgagatacatataaaggataaaaagaaatacaaaaggtattcaatatatttaaatgtaatataagaattttcttttttttttttttgagaaggaatctttgtctgttgcccagcctggagtgcaattacacgatctcaactcactgcaacctccacctcccgggttcaagcgattcttccacctcagcctcctgagtagctgggattacaggcacctgccatcatgcccggctaattatttatttatttttttaatatttatagagatggggtttcaccatgttggccaggctggtcttgaactcctgacctcaggtgatctgcccacctcgacctcccaaagtgctgggattacaggtgtgagccattgcgcctggccccaagaatattttataaacattgtataaaaatgtaaataaacaattatgttaatgttgctagaaatcatggatcttcaaaataagagaacaagagatatacaagtgtaaaatcaaagaagctgagtaaaaactgaaaataaatatattttatgtttttttttatacatacactctttcacatatttcttgccttggtccactaaaagaatctagaggcactgttatgccagcaccaaggtttcagtctctaaacaccattcattttaatagaaattgggttccttggagaaagagttaattccaggcctgaagaagaggaggtctagatatacttgggacaacttttgcctaaaggcaagatattttttagagactaactgggttttttaaaaaaagga

SEQ ID NO: 667474 - DNA, 1552 bp, Homo sapiens
taagcctagcctgaattactcacctacaatattatgaactaattaatttaaatggtggttgtctcaagtgactaagttttggagtgttatttttgcagcccaagctgatacaaagaaacaggtacttgcagacataactggtaggagtataaaacttttctctgaaggaaatctggcaatatctaacaaaattagaccagcagtaccacttctagaaatctatactaaaggtatacctgtaaaagtattaaatgaattatgtttgggttatttttttgtgacattataatagcaagtgactgaaaacaaacaaatgcttatcaatttgttagcacagatcagaattttatgcagttgtaaaaagaacgaggaagatttctatgtactgacagagtgaactctgcgatacacgtttaagcgaaaatgcaagatataaggaggggtgtttattaggctgaatgttgtataagaaaagggaggagataatatgcatgcatatatgcttctgctggaaaaaagcatcagtgaaaatataaatccaaaactaataaaaatggttacctatagaaggtgagagttggggtgaagagaacagggaagaaaatgaaaattgcccaagagtactatttcacatagtctttactctttaaccacttaaatattttatgtatttaaaacaccatgaaatactccacaaaaaagttatagtaacacacatgaaataatcattttgtgtgcttttaaaatacagctttttaaactgaatatacatagtgagatacatataaaggataaaaagaaatacaaaaggtattcaatatatttaaatgtaatataagaattttcttttttttttttttgagaaggaatctttgtctgttgcccagcctggagtgcaattacacgatctcaactcactgcaacctccacctcccgggttcaagcgattcttccacctcagcctcctgagtagctgggattacaggcacctgccatcatgcccggctaattatttatttatttttttaatatttatagagatgrggtttcaccatgttggccaggctggtcttgaactcctgacctcaggtgatctgcccacctcgacctcccaaagtgctgggattacaggtgtgagccattgcgcctggccccaagaatattttataaacattgtataaaaatgtaaataaacaattatgttaatgttgctagaaatcatggatcttcaaaataagagaacaagagatatacaagtgtaaaatcaaagaagctgagtaaaaactgaaaataaatatattttatgtttttttttatacatacactctttcacatatttcttgccttggtccactaaaagaatctagaggcactgttatgccagcaccaaggtttcagtctctaaacaccattcattttaatagaaattgggttccttggagaaagagttaattccaggcctgaagaagaggaggtctagatatacttgggacaacttttgcctaaaggcaagatattttttagagactaactgggttttttaaaaaaagga

SEQ ID NO: 667475 - DNA, 605 bp, Homo sapiens
aagggcggtttattatggaaagaataatagaaaattagcaaaatagtaataaaaggaaaaatagataatgggttataaacataaatgaaaactatattccggtgctccaggagccttcaaactagtggaggaatttttttatgctaaaaagtaattgatggcccagkcatggtggctcatgactgtaaccccaacactttgggaagccgaggcactcagatcgcttgagcccaagaccaccctgggcaacatggcaaaatcccttccctacaaaaaatacaaaaattagctgggtctgaggctgaggtgggaggatcccttgagcctagggggtggaagctacagtgagccaagatcacgccattgcactccaacctaggcagcaaagtaagaccttgtctaaaataaaataaaataaataaaataaaataaaataaatagtaaagtaaaataaaataaaataataaaataaaagtaaagtaaaaaataaaaataattgatgatactttgaaaatgcaataacaggctgggcacggtggctcacacctgtaatcccagcactttgggaggccaaggtgggtggatcacttgagttcaggagttcg

SEQ ID NO: 667476 - DNA, 605 bp, Homo sapiens
aagggcggtttattatggaaagaataatagaaaattagcaaaatagtaataaaaggaaaaatagataatgggttataaacataaatgaaaactatattccggtgctccaggagccttcaaactagtggaggaatttttttatgctaaaaagtaattgatggcccaggcatggtggctcatgactgtaaccccaacactttgggaagccgaggcactcagatcgcttgagcccaagaccaccctgggcaacatggcaaaatcccttccctacaaaaaayacaaaaattagctgggtctgaggctgaggtgggaggatcccttgagcctagggggtggaagctacagtgagccaagatcacgccattgcactccaacctaggcagcaaagtaagaccttgtctaaaataaaataaaataaataaaataaaataaaataaatagtaaagtaaaataaaataaaataataaaataaaagtaaagtaaaaaataaaaataattgatgatactttgaaaatgcaataacaggctgggcacggtggctcacacctgtaatcccagcactttgggaggccaaggtgggtggatcacttgagttcaggagttcg

SEQ ID NO: 667477 - DNA, 620 bp, Homo sapiens
catcttttaaaataaaactgtattcgtatctacataatttttaaatacgcctaaaacataagaagaaattgacatcctaatagtggtggggaaaaaaaaacgtatctgtaagtctttaataaagtaggcaaagatttaagtgaagatttagaggacgtggacactaaataaaatttgattacatattttaatcctcttacttgatatagaatacaattttagacttagcaccctccccctgcgcgcgcacgcacacacacacacacacacacacacacacacacacacacacacacacagaaatgtcttgaccataagacagtaaaaaaagaaatttcttttaaaagttaaaaaactttaatcccaacaagttgagaatcaaaacrtaccaaaagtgctaaagcacatgcatggaaaaaagcctggagggatccattcccaaaatgattagctctgggtggtgagattatcagtaatttttaaattttcttatgttctttcttatattcttgattacaattatccagtatctcctatactgagtattatttgcctttttttttaagatatggagtgatggggagtgggttaacaataccatatttgcatagcagctaaat

SEQ ID NO: 667478 - DNA, 613 bp, Homo sapiens
ttttccttgtggctgcaagaccagggtccctgtcttcttggtgctatcacccagggtccctctctgctcctacgggccacccacactccttctccatcttcaaaccacagcagcactttgagcccctcccaagcttcatatctctccaacttctccttctgctggcagccagagaaagccctctgcctttcaggkcttttgtgttcagatgaggctcactgggagccctgccacagaaaagaactcaaccatgggagtgatgtctcaccgcattcacagcttctgaggatttgggacatgggatctcagagactgtgacggttaatactgagcatcaacttgattggaatgaaggatgcaaagacacacccattgttcctgggtgtgtctatgagggtgtcaccaaaggagattaacatttgtgccagtggactgggaaaggcagacccaccctcaatctgggtgggcaccagctaatcagctgccagcattgccagaaaaaaatctggcagaagaatgtgaaaagactagatttctttagcctcccccagcccacatctttctctcgtgctggatgcttcctgcccttgaacatcagactccaagttcttca

SEQ ID NO: 667479 - DNA, 611 bp, Homo sapiens
tggctaattttttctatttttagtggagacggggtttcaccgtgttagccaggatggtctcgatctcccaacctcgtgatctgcctgcctcggcttcccaaagtgctgggattacaggtgtgagccactgcgcccggctataatataactttaaaatagaaagtgaatgtattatatgatcgagagtaaggtcttagtgtcaaaaagattcaaattccaatactggatattacacctagtagctatgtaaccatgaaacttttatttttaacttctcttttattttctttatgtataaaatgggaataataatagtactcattgatataaccacagacatgtcaatcatttttaaaatcttttcacagctttctacatacaatatagtgcccctatacgatgcagggatttttaataaatttatacagtaatgcarccaaccccacaatccagttttagaaaactctcatcacccccaaaatttccctcatgcttgtctgtagtcaatcttcctagcttcagcctcaggcaaccacagttttgctttttctgaatattttattaaaaaggaattataaaataggtagtcttttatatgtcttttatatgac

SEQ ID NO: 667480 - DNA, 620 bp, Homo sapiens
cagttgatacaataaatgcgaattaccaattttcctcagctgtagtttttttatttttattttgtaacagcaaataatttattttcttatgtgtattataatttacaatgtgtttttctattatgaattaggggaaaatttctggaccatgtcagacatcattcaggtatgacacttatataattcaatgcattctaagttattaaactactgtaggcagatgcattgcggcaggttatttgtttttgcataaaacatgccaatattttaaggtgaggtggcatgggagacgcctgctatatatttaaagtcctatgagattaggattccaaaagtaacacaaacattaaatgacactgatgtactgacaatcatctacattcatgttcttctttttgtgcagaaactgcttctaaaatgttttctagtgtgccttcaagtatttttttttttwaaatacgacttgggaaaaacaactgctaactaattttaacaccatgtcaattatgctaacaaaattctaattgaattacttgtaatgtaaatcagtctttctttgtgttgtgtgagcgcttgcatgggtgtaattattatacaggctgtcaggtatcagacactaa

SEQ ID NO: 667481 - DNA, 1478 bp, Homo sapiens
cctatttggccttctttaacaccacgttggtggggtcttggsgtaacttcttatagccgctcagtggtggaagtttaggctcctactcagcctttgctgaagtgggtggggccatagttgttggagtgtgtgtgtgtgtgtgtgtgtgtgtgtgtgtgtgtgtgtgtttggtgtttggctggggtagaacagttattgtctaagaattttatgtctttctaagctgtcctcttcctgatcctggtcctatgaatagagaaagcagacttttgctggggcttttaaaatctgcatccattggcatttccagattgccagcttcttcagttccaagtctggaatacaaaaggaaaaaaaaacttacgactgtgttgtaccttgagtcttgagatccctagctggtctgccttttgtctgcctttcattgtattacatttgttttatgtacaatgctttggggttttagcaggatgaatggggaatattacatttactccaccttcctggaagcagaagtatgtgtaatattttgaataaataccataaactattccatgcattcatgaaatatgcaatttctcattcaccaatgtaaatggcttgattcaccattatagaaccatgcataagtacaacaaggaagttttatttagggaaactcaagcaaaaataaaaaggcaatttgtcaaatgtaaaaaggtatttgcctgcaaatataaaaagtatagaccaagcgcagtggctcacgcctgtaatccctgcattttgggaggccaaggtggatggatcacctgaggtcagagttcgagaccagcctggctaacatgatgaaatcccgtctctactaaaaatacaaaaaattagctgagcgtggtggcacgcacctgtaatcccagctactcactcaggaggctgaggcaggagaatcacttgaacccaggaggcagaggttgcagtgagccgagatcctgccactgcactccagcctgggcaacaacagcaaaactccgtctcaaaaaaaaaaaaaaaaaaaaaagaagtataataaacactttctatgttccaaacctcttgctaagcactgttgtagctctcataacctatactatattgaggagcccaaattgctttcgaaagtatttctactttcaaaagtattaagtcttttgacttactttccatacagcaatgcaaataagcaactgctacgcacaacaaaatagatgaatctagaaacataatgagggtctttggccataccatcttgaacgtgcccggtctcctctgatcttggaagctaagtagggtcaggcctggttagtacctggatgggaacataaggaggaatgagaaaatcagtcacgtattattccattaatacaaagttgaaaaaacaaaacaatcgtaatattagaaatcacctcaaggctttcttctgaggacaagtgtgagagaagtgactacaggaggctctagaa

SEQ ID NO: 667482 - DNA, 1478 bp, Homo sapiens
cctatttggccttctttaacaccacgttggtggggtcttggcgtaacttcttatagccgctcagtggtggaagtttaggctcctactcagcctttgctgaagtgggtggggccatagttgttggagtgtgtgtgtgtgtgtgtgtgtgtgtgtgtgtgtgtgtgtgtttggtgtttggctggggtagaacagttattgtctaagaattttatgtctttctaagctgtcctcttcctgatcctggtcctatgaatagagaaagcagacttttgctggggcttttaaaatctgcrtccattggcatttccagattgccagcttcttcagttccaagtctggaatacaaaaggaaaaaaaaacttacgactgtgttgtaccttgagtcttgagatccctagctggtctgccttttgtctgcctttcattgtattacatttgttttatgtacaatgctttggggttttagcaggatgaatggggaatattacatttactccaccttcctggaagcagaagtatgtgtaatattttgaataaataccataaactattccatgcattcatgaaatatgcaatttctcattcaccaatgtaaatggcttgattcaccattatagaaccatgcataagtacaacaaggaagttttatttagggaaactcaagcaaaaataaaaaggcaatttgtcaaatgtaaaaaggtatttgcctgcaaatataaaaagtatagaccaagcgcagtggctcacgcctgtaatccctgcattttgggaggccaaggtggatggatcacctgaggtcagagttcgagaccagcctggctaacatgatgaaatcccgtctctactaaaaatacaaaaaattagctgagcgtggtggcacgcacctgtaatcccagctactcactcaggaggctgaggcaggagaatcacttgaacccaggaggcagaggttgcagtgagccgagatcctgccactgcactccagcctgggcaacaacagcaaaactccgtctcaaaaaaaaaaaaaaaaaaaaaagaagtataataaacactttctatgttccaaacctcttgctaagcactgttgtagctctcataacctatactatattgaggagcccaaattgctttcgaaagtatttctactttcaaaagtattaagtcttttgacttactttccatacagcaatgcaaataagcaactgctacgcacaacaaaatagatgaatctagaaacataatgagggtctttggccataccatcttgaacgtgcccggtctcctctgatcttggaagctaagtagggtcaggcctggttagtacctggatgggaacataaggaggaatgagaaaatcagtcacgtattattccattaatacaaagttgaaaaaacaaaacaatcgtaatattagaaatcacctcaaggctttcttctgaggacaagtgtgagagaagtgactacaggaggctctagaa

SEQ ID NO: 667483 - DNA, 611 bp, Homo sapiens
ctcagagaggcatgtccttaaatctaatacaaaggcagctctagaaaaaggaaaagcaaatcatatttcatgcgcagcacgattatttggtaacctatccagactttctcttttctcatggtgaatgactttgtttggacttaactttctagaccctgcaaatcacttggaagaattctgggagcagcccttgctcttgagaattctctgagatttggctccagataaagagtcaggcatatgcagatttaaacatggtatactcattatgtaaaatgtgaagtcaatgaacagcagacaagactttcaactgtttcccaaattgagcaaaattatttgaactgtttttgaaattcttaacatgcgccatagaagtaggtttgtttctgaaacttgcctagagcaagtaaaagtcatttcaaaaccaccttccttawccgaacacaaaaaggatgggcagtgaagaattaaagcaatacatagaactatctctagtccttccttagccactgtataattgtgtaaaaactccttaacttctgtcagcttcaatttttccgtgtaaaatggaccttatatctacatgacaggactcctgtggggacaggaga

SEQ ID NO: 667484 - DNA, 1162 bp, Homo sapiens
ttaatttcttgttttattgtattgtaaccacataaggtagcctgtatatacttttccttgtagaaatcactgacaattttttgtattgtagattataaccaattttcaaaatcatccctggggttttgtaaagaatatctattccctgttggttaaaaagcttgacatatctagtaaatcaaccttatttcttttattatccaattaagcatgttatgtctacttgaccaaatgtggtgtgttaaaaccatcaacattcatatttctgttaatgccatcgtctacacttaacaagagtttttactttataaattgtgaggacatttaatttgatggataaaattacatgccaattatatctttatttcaatggataattattgtcaaactgaaacaatttatttcctttttaatgcatttyctctgcatttcatgttttttgttgtgtaatggcaatattgtcactttgttatcctttttactcaaaattatgtaatacgctataacctttttttttttttcccccaaagtctccctctgtctccaggctggagtgcagtggtgccatctcggctcactgcaacctccgcttcctggattcaagctattctcctgcctcagcctcctgagtagctgggactacaggcgcgtgccaccacgcccagctaatttttgaatttgtatttatttatttatttatttattttgagacggagtttcactcttctttcccaagctggagggcaatggcgagatctctgctcacggcaacctccacctccttggttcaagtgattctcctgtctcagcctcctgagtagctgggagtacaggcatgcaccaccatgaccggctaatttttttttttttttttttttgtatttttagtagagacggggtttctccatgttggtcaggcaggtcttgaactcccaatctcaggtgatccgcccaccttggcctcccaaagtgctgggattacaggtgtgagccaccgtgcctggcctatcacccatttatatacatatagtgatactttggggtggaattcttacattcatcacacacctgaaattcttaaaattaatttgtgtgcttgcaattaaatttttttattttgaaataattttaaattaacagtagaatacaaagaaattacaga

SEQ ID NO: 667485 - DNA, 604 bp, Homo sapiens
catttactttaattcatattttggatcaaaatatattcaaatttgtacacttgcacttcaaaaatcctttagatcagaggtcatcaagctatggcccacaggccaacaccagctagttttttaaactgcatgatccctgaggtcaggagatcgagaccatcctggctaacaaggtgaaaccccgtctctactaaaaatacaaaaaattagccgggcgcggtggcgggcgcctgtagtcccagctactggggaggctgaggcaggagaatggcgtgaacccgggaagcggagcttgcagtgagccgagattgcgccactgcagtccgcagtccggcctgggcgacagagcgagactccgtctcaaaaaaaaaaaaaaaaaaaaaactgcatgatcccatttatatgacacattcagaataagcaaatctatagtgacagaaagcagattagttgttgccaagggctgaggggtgtggggaataggagtgagtgcttaacaggcatgacgtttccttttgacgagatgaaagtgctctgggattggatagcmgtggtggtcagctatttttgtcaataaagttttattgaaacatagccatgtcca

SEQ ID NO: 667486 - DNA, 2440 bp, Homo sapiens
tgcagtcacattggcatttacatttctacagggcatttccaactcagtgaatgggaaattgctcgtcatttccaaaggcaattaattatgcaggaaattttgcatccaagaaaaacaagaatttaaaagaaccatcaatgtgaaaaagtaccataccatgctggagtcttgggattgttttcccttccccagtagttgtcagtgtaagcgtttgcgagttaggcagacctgggcttgcattatggttttgttagttcttatgacaccagccactggaggcctcagtttcccatccataaatggagataatgactccatcttcacagggatgcagtgaggactaaatgagatatttttgtgcaagtacctcagcatgtgcctgccatctaacccagaaaattctcaataaatatgtccttctttctctttcacttttccaaccagtttttatcagggaggacaaagcttaagattttaaatgtgataccccccagaacagagagagatctttgaagtagaacttgtgagctggtgtggtggtatgtgcctgtagtctcagctgctcaggaggctgagaggtgggaggatcacttgtgtccaggagttcaagtccagcctggactacacagcaagaccctytctctaaaaaaattaaaaataaaaattaaagtaggatttgtgagggggcagattcccattactctacacttctctgcacccacagcactaaacgtcatgtggaaatgccacatggctaagcttgatagtcatcctctttcagcctttgtaccattagggaaaacggaggggcggaggcggaggcagagtctagaggtgtttggagcatgtgtcatctcaagaacatttttgtcaagaatatacaattattggcacacagatacacagtaagatgtgagcagagctggctctgagactgctgggcacagagtggggagattcactattgtctggactgaataggcagtgggagccctctggcagcctcttggccacgtgcttcttctgtgacctggagtaactgtgaataaggggctctcagaggtgcttatgtctgagtcagtgatgtgagggatccagcaaagggcagccactgactcagtgagactgaatccatggccccctccctctggatgtttccatgttgtgaatcaccccatcttccccttaggaagcaaagccacacccgggggcagagttgctcgtcatataggactcagggagcttagaatgcacagagccggggacatggttgtaggaacgagtggatggcggtgacggtggtgcgggtgatgatgaggcgagcaacacgtacttggcatttactttgtgccaggccctgggctgagctctttgcagcaactttggaagtgggagctgtcgttaccctccctgtcactggatgaggaggtgagatcttgaacaacttccacatcacccaagtggtgccgctggaaccaaaggcaatgaattatgcagcaggtgcagcccctctctgctgtcccactccatagtcaaggaacccagagggtctgtggggctgcggagctcatgttgccgaatgccgcactgcccatttctgtacacaatgtgcctgtcttgtaaaccacccacagaacttccagagacacccagggagagtggaattggataccggtggtgactttacttcttatttatgttaaaacaaaaattttaaagtaagggacctttggatcttgtcaagatagggcttaagtgctctttggcaaacatagttcatttatcattaaaaccgcgggtttcaaactttttggtttctggactcctttatgctcttagaaaattactgaggatctcaatgggcttttgtttatgtgggctaaatctataggtacttaccacactggattgcaggtgaaaagaggtttacatatttattacttcatttaaaaataacatcgagcagctcattacatgttaccataaataacagaacatacttttattaacaatcactatattttccaaaaaaaaaaaaaaattagggagaagtgtggcattgtttttacatttttacaaatttagcatctggctggaaggtggctgggagagagagagagaaaagtcattaaggtcttagtatgactaagaaaatagttatggtctcactgaccccctacgaggttccctgagactgccaggatccctagacctcgctttgagaactgctgtgctagatggaccagagtaatcttgggctggaagacttgtgtgtgcaccagcgctcctgaggtctcgttgaaccaagacagtctggggtgtgcgcctgccttgcgcccagctcgtttagccacagtgggtcaggatgctgaggctgtgggatgtctgccccagccaagcgctggagcccctccaggtggaaatgggttgagtaattaga

SEQ ID NO: 667487 - DNA, 2440 bp, Homo sapiens
tgcagtcacattggcatttacatttctacagggcatttccaactcagtgaatgggaaattgctcgtcatttccaaaggcaattaattatgcaggaaattttgcatccaagaaaaacaagaatttaaaagaaccatcaatgtgaaaaagtaccataccatgctggagtcttgggattgttttcccttccccagtagttgtcagtgtaagcgtttgcgagttaggcagacctgggcttgcattatggttttgttagttcttatgacaccagccactggaggcctcagtttcccatccataaatggagataatgactccatcttcacagggatgcagtgaggactaaatgagatatttttgtgcaagtacctcagcatgtgcctgccatctaacccagaaaattctcaataaatatgtccttctttctctttcacttttccaaccagtttttatcagggaggacaaagcttaagattttaaatgtgataccccccagaacagagagagatctttgaagtagaacttgtgagctggtgtggtggtatgtgcctgtagtctcagctgctcaggaggctgagaggtgggaggatcacttgtgtccaggagttcaagtccagcctggactacacagcaagaccctctytctaaaaaaattaaaaataaaaattaaagtaggatttgtgagggggcagattcccattactctacacttctctgcacccacagcactaaacgtcatgtggaaatgccacatggctaagcttgatagtcatcctctttcagcctttgtaccattagggaaaacggaggggcggaggcggaggcagagtctagaggtgtttggagcatgtgtcatctcaagaacatttttgtcaagaatatacaattattggcacacagatacacagtaagatgtgagcagagctggctctgagactgctgggcacagagtggggagattcactattgtctggactgaataggcagtgggagccctctggcagcctcttggccacgtgcttcttctgtgacctggagtaactgtgaataaggggctctcagaggtgcttatgtctgagtcagtgatgtgagggatccagcaaagggcagccactgactcagtgagactgaatccatggccccctccctctggatgtttccatgttgtgaatcaccccatcttccccttaggaagcaaagccacacccgggggcagagttgctcgtcatataggactcagggagcttagaatgcacagagccggggacatggttgtaggaacgagtggatggcggtgacggtggtgcgggtgatgatgaggcgagcaacacgtacttggcatttactttgtgccaggccctgggctgagctctttgcagcaactttggaagtgggagctgtcgttaccctccctgtcactggatgaggaggtgagatcttgaacaacttccacatcacccaagtggtgccgctggaaccaaaggcaatgaattatgcagcaggtgcagcccctctctgctgtcccactccatagtcaaggaacccagagggtctgtggggctgcggagctcatgttgccgaatgccgcactgcccatttctgtacacaatgtgcctgtcttgtaaaccacccacagaacttccagagacacccagggagagtggaattggataccggtggtgactttacttcttatttatgttaaaacaaaaattttaaagtaagggacctttggatcttgtcaagatagggcttaagtgctctttggcaaacatagttcatttatcattaaaaccgcgggtttcaaactttttggtttctggactcctttatgctcttagaaaattactgaggatctcaatgggcttttgtttatgtgggctaaatctataggtacttaccacactggattgcaggtgaaaagaggtttacatatttattacttcatttaaaaataacatcgagcagctcattacatgttaccataaataacagaacatacttttattaacaatcactatattttccaaaaaaaaaaaaaaattagggagaagtgtggcattgtttttacatttttacaaatttagcatctggctggaaggtggctgggagagagagagagaaaagtcattaaggtcttagtatgactaagaaaatagttatggtctcactgaccccctacgaggttccctgagactgccaggatccctagacctcgctttgagaactgctgtgctagatggaccagagtaatcttgggctggaagacttgtgtgtgcaccagcgctcctgaggtctcgttgaaccaagacagtctggggtgtgcgcctgccttgcgcccagctcgtttagccacagtgggtcaggatgctgaggctgtgggatgtctgccccagccaagcgctggagcccctccaggtggaaatgggttgagtaattaga

SEQ ID NO: 667488 - DNA, 2440 bp, Homo sapiens
tgcagtcacattggcatttacatttctacagggcatttccaactcagtgaatgggaaattgctcgtcatttccaaaggcaattaattatgcaggaaattttgcatccaagaaaaacaagaatttaaaagaaccatcaatgtgaaaaagtaccataccatgctggagtcttgggattgttttcccttccccagtagttgtcagtgtaagcgtttgcgagttaggcagacctgggcttgcattatggttttgttagttcttatgacaccagccactggaggcctcagtttcccatccataaatggagataatgactccatcttcacagggatgcagtgaggactaaatgagatatttttgtgcaagtacctcagcatgtgcctgccatctaacccagaaaattctcaataaatatgtccttctttctctttcacttttccaaccagtttttatcagggaggacaaagcttaagattttaaatgtgataccccccagaacagagagagatctttgaagtagaacttgtgagctggtgtggtggtatgtgcctgtagtctcagctgctcaggaggctgagaggtgggaggatcacttgtgtccaggagttcaagtccagcctggactacacagcaagaccctctctytaaaaaaattaaaaataaaaattaaagtaggatttgtgagggggcagattcccattactctacacttctctgcacccacagcactaaacgtcatgtggaaatgccacatggctaagcttgatagtcatcctctttcagcctttgtaccattagggaaaacggaggggcggaggcggaggcagagtctagaggtgtttggagcatgtgtcatctcaagaacatttttgtcaagaatatacaattattggcacacagatacacagtaagatgtgagcagagctggctctgagactgctgggcacagagtggggagattcactattgtctggactgaataggcagtgggagccctctggcagcctcttggccacgtgcttcttctgtgacctggagtaactgtgaataaggggctctcagaggtgcttatgtctgagtcagtgatgtgagggatccagcaaagggcagccactgactcagtgagactgaatccatggccccctccctctggatgtttccatgttgtgaatcaccccatcttccccttaggaagcaaagccacacccgggggcagagttgctcgtcatataggactcagggagcttagaatgcacagagccggggacatggttgtaggaacgagtggatggcggtgacggtggtgcgggtgatgatgaggcgagcaacacgtacttggcatttactttgtgccaggccctgggctgagctctttgcagcaactttggaagtgggagctgtcgttaccctccctgtcactggatgaggaggtgagatcttgaacaacttccacatcacccaagtggtgccgctggaaccaaaggcaatgaattatgcagcaggtgcagcccctctctgctgtcccactccatagtcaaggaacccagagggtctgtggggctgcggagctcatgttgccgaatgccgcactgcccatttctgtacacaatgtgcctgtcttgtaaaccacccacagaacttccagagacacccagggagagtggaattggataccggtggtgactttacttcttatttatgttaaaacaaaaattttaaagtaagggacctttggatcttgtcaagatagggcttaagtgctctttggcaaacatagttcatttatcattaaaaccgcgggtttcaaactttttggtttctggactcctttatgctcttagaaaattactgaggatctcaatgggcttttgtttatgtgggctaaatctataggtacttaccacactggattgcaggtgaaaagaggtttacatatttattacttcatttaaaaataacatcgagcagctcattacatgttaccataaataacagaacatacttttattaacaatcactatattttccaaaaaaaaaaaaaaattagggagaagtgtggcattgtttttacatttttacaaatttagcatctggctggaaggtggctgggagagagagagagaaaagtcattaaggtcttagtatgactaagaaaatagttatggtctcactgaccccctacgaggttccctgagactgccaggatccctagacctcgctttgagaactgctgtgctagatggaccagagtaatcttgggctggaagacttgtgtgtgcaccagcgctcctgaggtctcgttgaaccaagacagtctggggtgtgcgcctgccttgcgcccagctcgtttagccacagtgggtcaggatgctgaggctgtgggatgtctgccccagccaagcgctggagcccctccaggtggaaatgggttgagtaattaga

SEQ ID NO: 667489 - DNA, 3778 bp, Homo sapiens
attctcaagactcgaagaaaaccaagtcccttgacactgaaatcataacagtaggatggaatatgggtaagaataataatgctatgaaaacaagtgggttttccacccctctacattgattgctttgagcattccatagactgtatttctgaggtggaagggaaagctaggagcttaaacatgaagcaacgcactcaggaactttggttcatgagtcggagcctggatcccattcaacatcttacaattctcagtccaaggctcaattcyaccaaccacatggcttatgtccaagtatgggatttgttctggaagaatatttaaaggattatggtaatccaggatgggttaaattgggcattactggtatgtttttacctgttttccatcacactactttcctaaaactgttgcagagaaagtaggtaaataattttctccccactgtcagaagaccatctgctgtttgagacaattctcctagatattattattattataatttttctatttccaattagcagcgtacttcctttaatatgatgctttctgcataaaccatggtttctgcagatttcctaaggccatcttggtattttgtctgccttttcctcttctttaagggtgggagattttctcttactgagagcgatacatttctacattagtacctattcatttccttttcattttctcggagaaaaacaatcagagctcatcattgctgtcgtcatggagatttcatgtctccagaagaaatccagttgaggagtttctttgttaatcccatactggacattcaagctttcttgtttgtatcccagcagcccaggcagggaagccattgacattgattacagtgtgattgataacccagggtgggcaggggaaagtgtgtgcagaaggagctgtcctggggcactggagctgtgcatacagtaggtgctcaggctgcagttggtgactggacagaagcagcagccagagctctaacaacatgtcagcatcttggctgtccacagcatcaggaactcaacacagccaccgccagcctcattatcttcctggtaaacctgtcctcccccatctttcccaccagggccccactgtctgctgagctgtcctcctctcgattctgttctcacccctccagtccgaagttttgactttcattctattgatatccacatttccgggcatcctcctttctttctcctcttccggccctcggttctttgctctggttcatggccacggtctcctagggaaccatcccttcccctcctggcaaatttcttgctcttcccattgctgctggaacagtgagggcacacagtaggtctgaagcatatctttgccgaacaatggtgagatcgaagagtcttcctaatatgcaaatctgatcatgttacttctcgggtttaaaatccttcagtggcttccactgcttttaagataaaaacctaaacccttggatcattcaaaggctttcaagacctcatcagcatattttcccatcactactcatttgatcttgtggcctgggcatcctgagtgagtgaccagtgatgttctgggcgatgcacctgttaagtgcagcagttgagaatgatctccggctctggcatcagattgaatgtggtcatgttctagctccatcacagagttctgcaacctagaaggagttgcttaaaggctccgtgcctcggtttcctcatctgtaaaatgggcttgattggaagtatcacctaataaggttgttgtgagaatccaatgtatgaatacatgttaagtcgttaaatcagtacctggcatgtacaaatacttcgtagttgttatgcaggtcttactgtgagtgtgattactttatactttgctgcttccttctgtctggaataccctgctctacctgtacctaaccaattctacccatcctttaagtctcagtcccaatatcacagcctcttggaaaccagcttctgcagctgtgtaatagtaaaaccttaagtggtagagtcagaatgtatgactttaaatcctcgttctgctactgactctttcattctagtctaacctcactaagccttggtttccttgactacagaattaggataataaaataacaataacaattattttgctgtcatacaaagtaaaagtttgtaaagatatacctaacatgtactgaacacttcattcatgctaggtattgttttagcggccattcattcttaccttttatcaagaacaaatcactgtattataataatctttttacttgtttttcttggcacctagattgtgggttatataagttcaaggacagggtctttttcatcattatatcatggcacttgacacatcagtcagtgggatggacaggaatccagctgttgtgtcaatacatgtgaccatttgcatgcataatttaggagatgttagaggattgtgatggtaggagaaggagatgttgggcaggaaggatgttttagtgggatgggggagtggagctcttttctttctttggaaagtactgaagaccagaggttaattgctattgccccatttcatttggcacaagggtgactggggatgggagaggaagcctgtcccagaagggttgggactcaactggagacatgatgcatgctttatcagtgggatttactaacatcatactggttcttaaatagagacgtgccagtaaatatttaacaaccagtgctccaagaacaacacaaagccctgatttatagtgtttgctggttaccgtggtgtaaatccctccaccatggccactttcaaactaccactgcaatgttattaaccaacctgcaaaattcctgaaattgtaccaactcaccagtgatgagctggccccagcatagcgctgtataaacttcttacttcagtgtttccatccgtaacatgtgaatcctataatgtgagtatcctgtctccaagtatagctgccagggggaggtggtcaaatgtgataaaacgtggaaatgttagtgttttaacagtgcctcatgtgctcacccttacatcaaaactctcttcccatccactggctgtgggtcatagggccaggatatgtgccgatgatctctcaaaaagcagcctgtccagagttctgctcagagcagtatattttgttttatcctcccaatcggggctatgctttctacagcagactgactcaattagcctttcattccagagtccaattgtgagtcaattccgaggttgttaagcaaaatgagtctggtggcattagtctctcgctgaaggacagtaatcctcatcacagtgttgttcagttaatagtctgctggagagactgtgagaaacaggagatgtggagagggagcgaccttttgtcttgtctctgggggacaggccgggagcattgggctgccaggtcagagagctgttcagcagccaggttgtgtgcagaaccggagccccagctgcctgaacttgcagttggcctttgcaaagttagaaacccagtgtcactagatcattaactttcatgaccaggaaaattcttttgaaattaacactcaatccaagctggatgccattggagccagttgagtaagcccgagccatctttagggatttcctctgaaaaacgaatcctttagccaggctacagaaaataggcaggttttatatctttcagtgtgttcaattaaagtcaggaaacaccagcaaggcacggaccgtggttgccactcaggtgcgtacacacgcgcacaccccagccaca

SEQ ID NO: 667490 - DNA, 3778 bp, Homo sapiens
attctcaagactcgaagaaaaccaagtcccttgacactgaaatcataacagtaggatggaatatgggtaagaataataatgctatgaaaacaagtgggttttccacccctctacattgattgctttgagcattccatagactgtatttctgaggtggaagggaaagctaggagcttaaacatgaagcaacgcactcaggaactttggttcatgagtcggagcctggatcccattcaacatcttacaattctcagtccaaggctcaattctaccaaccacrtggcttatgtccaagtatgggatttgttctggaagaatatttaaaggattatggtaatccaggatgggttaaattgggcattactggtatgtttttacctgttttccatcacactactttcctaaaactgttgcagagaaagtaggtaaataattttctccccactgtcagaagaccatctgctgtttgagacaattctcctagatattattattattataatttttctatttccaattagcagcgtacttcctttaatatgatgctttctgcataaaccatggtttctgcagatttcctaaggccatcttggtattttgtctgccttttcctcttctttaagggtgggagattttctcttactgagagcgatacatttctacattagtacctattcatttccttttcattttctcggagaaaaacaatcagagctcatcattgctgtcgtcatggagatttcatgtctccagaagaaatccagttgaggagtttctttgttaatcccatactggacattcaagctttcttgtttgtatcccagcagcccaggcagggaagccattgacattgattacagtgtgattgataacccagggtgggcaggggaaagtgtgtgcagaaggagctgtcctggggcactggagctgtgcatacagtaggtgctcaggctgcagttggtgactggacagaagcagcagccagagctctaacaacatgtcagcatcttggctgtccacagcatcaggaactcaacacagccaccgccagcctcattatcttcctggtaaacctgtcctcccccatctttcccaccagggccccactgtctgctgagctgtcctcctctcgattctgttctcacccctccagtccgaagttttgactttcattctattgatatccacatttccgggcatcctcctttctttctcctcttccggccctcggttctttgctctggttcatggccacggtctcctagggaaccatcccttcccctcctggcaaatttcttgctcttcccattgctgctggaacagtgagggcacacagtaggtctgaagcatatctttgccgaacaatggtgagatcgaagagtcttcctaatatgcaaatctgatcatgttacttctcgggtttaaaatccttcagtggcttccactgcttttaagataaaaacctaaacccttggatcattcaaaggctttcaagacctcatcagcatattttcccatcactactcatttgatcttgtggcctgggcatcctgagtgagtgaccagtgatgttctgggcgatgcacctgttaagtgcagcagttgagaatgatctccggctctggcatcagattgaatgtggtcatgttctagctccatcacagagttctgcaacctagaaggagttgcttaaaggctccgtgcctcggtttcctcatctgtaaaatgggcttgattggaagtatcacctaataaggttgttgtgagaatccaatgtatgaatacatgttaagtcgttaaatcagtacctggcatgtacaaatacttcgtagttgttatgcaggtcttactgtgagtgtgattactttatactttgctgcttccttctgtctggaataccctgctctacctgtacctaaccaattctacccatcctttaagtctcagtcccaatatcacagcctcttggaaaccagcttctgcagctgtgtaatagtaaaaccttaagtggtagagtcagaatgtatgactttaaatcctcgttctgctactgactctttcattctagtctaacctcactaagccttggtttccttgactacagaattaggataataaaataacaataacaattattttgctgtcatacaaagtaaaagtttgtaaagatatacctaacatgtactgaacacttcattcatgctaggtattgttttagcggccattcattcttaccttttatcaagaacaaatcactgtattataataatctttttacttgtttttcttggcacctagattgtgggttatataagttcaaggacagggtctttttcatcattatatcatggcacttgacacatcagtcagtgggatggacaggaatccagctgttgtgtcaatacatgtgaccatttgcatgcataatttaggagatgttagaggattgtgatggtaggagaaggagatgttgggcaggaaggatgttttagtgggatgggggagtggagctcttttctttctttggaaagtactgaagaccagaggttaattgctattgccccatttcatttggcacaagggtgactggggatgggagaggaagcctgtcccagaagggttgggactcaactggagacatgatgcatgctttatcagtgggatttactaacatcatactggttcttaaatagagacgtgccagtaaatatttaacaaccagtgctccaagaacaacacaaagccctgatttatagtgtttgctggttaccgtggtgtaaatccctccaccatggccactttcaaactaccactgcaatgttattaaccaacctgcaaaattcctgaaattgtaccaactcaccagtgatgagctggccccagcatagcgctgtataaacttcttacttcagtgtttccatccgtaacatgtgaatcctataatgtgagtatcctgtctccaagtatagctgccagggggaggtggtcaaatgtgataaaacgtggaaatgttagtgttttaacagtgcctcatgtgctcacccttacatcaaaactctcttcccatccactggctgtgggtcatagggccaggatatgtgccgatgatctctcaaaaagcagcctgtccagagttctgctcagagcagtatattttgttttatcctcccaatcggggctatgctttctacagcagactgactcaattagcctttcattccagagtccaattgtgagtcaattccgaggttgttaagcaaaatgagtctggtggcattagtctctcgctgaaggacagtaatcctcatcacagtgttgttcagttaatagtctgctggagagactgtgagaaacaggagatgtggagagggagcgaccttttgtcttgtctctgggggacaggccgggagcattgggctgccaggtcagagagctgttcagcagccaggttgtgtgcagaaccggagccccagctgcctgaacttgcagttggcctttgcaaagttagaaacccagtgtcactagatcattaactttcatgaccaggaaaattcttttgaaattaacactcaatccaagctggatgccattggagccagttgagtaagcccgagccatctttagggatttcctctgaaaaacgaatcctttagccaggctacagaaaataggcaggttttatatctttcagtgtgttcaattaaagtcaggaaacaccagcaaggcacggaccgtggttgccactcaggtgcgtacacacgcgcacaccccagccaca

SEQ ID NO: 667491 - DNA, 595 bp, Homo sapiens
gaaaaacatttactattcttacaagggctgaaaatctcatgtatttctgaagcaatctcatttgtcaaaaagtgtgacaggaaatagcccttaaaaaatggaaaacatctagtcagtatcatacaattcccatttctaaaactgcagtatgacaaagcaaaaaaaaaaaaaaaaaaaaaagaatcctaatatcctcaaaggaaactcacayttctgaaacctctaaggcgctagttctgtatgttttgacaaacagcttcaaactgcacatagaaaggaaagcttgtagtgaatagtagcgaggtagacaaggacagagttcatatgcaaccgctggtgggcagaatgtcacatggtgaccctacaccaggccagtgcatcatttaggaaaactttatccaagtcccaattgtccagatttactgagaaatttagcaaaggcacacaaaagattctataatccaacagctcacttaagccaagttttagatttagtttgctgggtgatgattaaaagtacaatgagatcatattttaaagatcaaaagtcatttggcagtcaccataataaaaactgtcacaagcaagaaaatca

SEQ ID NO: 667492 - DNA, 1714 bp, Homo sapiens
acaagtacatacaatggagtattattcagccttaaaaaggaaaggaattctgacacatgctgcagcaacatggagtaaatttgaggacactatgttaagtgaaatatgccagatgcaaatggacaaatattaaataattccccttatatgagatacccatagcagtcaaattcatggagacagaagagtggctgtccaaggctgggtggaggggagaatgggtacagaggttaatgggtacagagtttcagttctgcaagacaaaaagttttggaggagggtagtgatggttggacagcaatgtaaatgcacttaattctaccgaactgcacagctaaaaatgattaagacagtaaattttatgttatgtacattttacaatttaaaaaccttatataaaatgtcagcttattttctgaaaggccatataactgccatttatgttatttcttggctatttccctaaatgaagtccatggctttataatttcctttatattagtcattaatatatattctctctcacacacacacacaaacacatacacacacattaaacacagaagtatttaatgtgacaaatgattttaaaaggtttaaagaaaaaaatataatttctgaatcccctttctgaacttgttttttccctacgccaaaataaaaaattcacaagatacttaaagcctgcagccaaaaagaaaaagacaaaacgaaaaacgcaaaaatcacaacaaacatccatccacagtagatatttttacatcagatataatgatggaagagtgcaacagtatttccatagaagaatttgctgaaatcacagttatctctggtctcagtttaggataaaaagtccacctgcaagtcagaakagtgagtgtggccagtaatttacccagataacccatgatgctctctacgtaacgaaacactatggagtagttaaagtctgaggtgaaggagggaaggatcaaggcactaaaaaaaaagactatggtggagattttttcctagaaaggaaaaaaaggaattacaaagcaacaacaataataacaaaacacatgccaatatgagctctttaatctatattgacattaattctcaactgggggaatttgcccacaccccacctccaggagtataattcagaatcttcttgtggccttctgtacttggcaaaagaatacccaatatatctattagttttatactatagaaaaaaagaaaaaagacccaaaattctttagggctgagggggatgtgctgagcaaacagtaagaaagcattttaccaagggttaagaaaaggttcagggatgtggccttagaatacacagttgccctcagagttcaaatgagttaaagatgcaaatggaaaagaaagctagcattttaatcatacctgaaacaaacctctctgatccaggtaaaatctaaggttcagtatcaatcatggattatttctagcaagttttagaccagaatgatttaaaaacattaaagacaaaataaaacctagcatttcaaaataaatgacagaataaaagagaagaaaatggacaaaaaggaaaacctcagatgaaatattttaatactgaacttattaatgatcataaaaagaatacaaatttattctagaaaatttgaaaatacagaaaatgtgtaacccttttgactcacctctcgagtagctagctggttgctgagttcctcag

SEQ ID NO: 667493 - DNA, 601 bp, Homo sapiens
tttgatttggatgtagcttgacttagtgtaatgtattcttgggtttttaggtcttaagatttatattgagaagacagtggcaaagcatagagcatataataatcttcaaactggtgacaaggaagggtaatgaaatgaaataatagaaccaagtaagagaaaccacaagatcgaaaagaaggaatggggctgggcacggtggctcacgcctgtaatcccagcactttgggaggctgaggcaggtggatcacctgaggtcagaggttcaaaattagccaggtgtggtggcaggcacctgtgatcccagctactcaggaggctgaggcaggggaatcatttgaacccgggaagtggaggttgcagtgagctgagatcaaaccattgcactccggcctgggcgacaagagcgaaatttggtctcaaaaaaaaaaaaaaaaaaraagaagaagaagggatgaagagtagataagtaattttgtagaaactgagagaggattctcccagagatgaagttactatattgttttattcctttctactgtcttctttgctaaaatgttcccacctcccaacttaataaagaaatccacaaccctgtctc

SEQ ID NO: 667494 - DNA, 632 bp, Homo sapiens
gcttcacccagtgtattttatggcataatgtgaccatccagtcatattcagttatctaaaactatttcactacaaaaagccaggactggaatgaatgagagaaaattcatttcttatagaaaaataaataaaaaataaaaaaataagctagagtactgatactcatatatgaaaaattagtattttgatctatattttcatatatactgccttctagcatgccttctcacttaactttataaacatcatgtgtattaaaaaaatatgtatatatacagatagaactacctcatcatctgttgtagcgtattgtcttcaatgaatgcatccaaatatatttaaacaatctccttttggcttttcttaacctgctttctgattattcttctaaattacagtaactgcttaggaawgccctttgacttcctcttcaataagctgcccttttatgatgtctacaaatcaatgagctggtcattcatttaaataacttaaatatatccaaattacacttcacaataaaaattcaatcttttacatgtgaagaattttactaagccactatgacatgctgctaggaatagtggtgaactaggtgccttatcctgggaagctaatacttagtgaaggca

SEQ ID NO: 667495 - DNA, 615 bp, Homo sapiens
cctcgaagcctgcaaacggcctgctgagctggaacagctggaagggragcaggatgtcagcccgggccagacgggacaggtcacagctggtgggccctcgcagcctggccaccagagggaggctccccactgccccgtcctcgcctccccatcctcgctccccagggccctgggtcttgctctcctgctgttctcagggtgaccctggtgcctcccaagcctccccagtgggcacctccctggggcctaaggctcgctcctcctggccagcacctggctgccttctcactgatggccagtgtgcctgcctggagtgcccgggaggaaggtgcccggctagttctgacagacaacacagcttggtcccgcgggagctgccaggaaggctgtggacaggggtctgacaggagagacccactgtgtgccagccccatgcagtgcaggaggccctcgggggcctgggagacaaggggttgggagctccctgtcgagggggaagaggagacagaggcagtgggggcgggcgggcctgggccttgtccctcacccgatggctcccagcacacagggtgggtggcccagggcagccctgcactctccaagaacccccgtggg

SEQ ID NO: 667496 - DNA, 615 bp, Homo sapiens
cctcgaagcctgcaaacggcctgctgagctggaacagctggaaggggagcaggatgtcagcccgggccrgacgggacaggtcacagctggtgggccctcgcagcctggccaccagagggaggctccccactgccccgtcctcgcctccccatcctcgctccccagggccctgggtcttgctctcctgctgttctcagggtgaccctggtgcctcccaagcctccccagtgggcacctccctggggcctaaggctcgctcctcctggccagcacctggctgccttctcactgatggccagtgtgcctgcctggagtgcccgggaggaaggtgcccggctagttctgacagacaacacagcttggtcccgcgggagctgccaggaaggctgtggacaggggtctgacaggagagacccactgtgtgccagccccatgcagtgcaggaggccctcgggggcctgggagacaaggggttgggagctccctgtcgagggggaagaggagacagaggcagtgggggcgggcgggcctgggccttgtccctcacccgatggctcccagcacacagggtgggtggcccagggcagccctgcactctccaagaacccccgtggg

SEQ ID NO: 667497 - DNA, 638 bp, Homo sapiens
tgctctcaaagtccagcctaggctrcatagcaagatccaatctccacacacacaataataataatcaatttgctgggcatagtggggtgtgcgtgtagtcccagctactcaggaggctaaggagggaggatcacctgagcccaggaagttaaggctgcagtaagcttggatggcaccactgcactccagcctgggtgacagagggagactctgtcaatgaatgaatgaatgaataaatgaataaatgaatgaatagaaaatgctctgagcgaaaagaggagagtctctttatctttttgcaacaggctaaacaaaatttttaaaaatgtatatttgcctcacagagattattccaggaaaagaaatggccctcagtgtcaaaggatgcaaaactaacctgtgagttcctggcaggtttagcaataaaggaggatgttgctgatctcagtacaagcaatgttagagaaaggggaagatggaagtggacgaggaccagtgagtggaaggtgacaaatggaagcaaagaaacccatccagaccattgaagatgcttgagcgagaagaaagaggcggtggagggaatggaagcccgaggaagtcatttgttgcaataggatgcctcagagcacgtgtagggt

SEQ ID NO: 667498 - DNA, 595 bp, Homo sapiens
cctgtaatcccagctacttgggaggctgaggcaggagaatcacttgaacccaggaggcagaagttgcagtgagctgagattgtgccattgcactccagcctgggggacaagagcgagacttcatctcaaaaaaaaaaaaaaaaaaaaaaaagagaatcaaccttgagccaggcacggtggctcatgcctgtaatctcagcactttgggatgccgatgaagtcaggagtttgagaccagctgggcaacatgctaataccctgtctctaccaaaaatttaaaaattagctgggtatggtggctcatgcctgtaatcccagctatttgggaggctgaggcacaaggatggcatgaacccaataggtggagcttgcagtgagccaagattgtgccattgcactccagtctggrgtgcaaaaaaaaaaaaaatccatctcaaaaaacaacacaaaaagaataaatatgtggcttcatgactgtatattactgggcttctgacctagactaaaagatcagggaagagtttcctgaagagaaagtgagctatgatgggcccactgtactccagcctgggcaacgtaatgaggctctgtctca

SEQ ID NO: 667499 - DNA, 1452 bp, Homo sapiens
taattgtttttctgcccactccatctcttccgacctgccttctcccctttaatcaaatgtataaatactaagcctcctgaaatctcttcagagaaaacacaagccacagagattttttgcaactcatgttttcccagggttcactctcaagctctggctcaataaaactcaattggtcaagacccttgcctcagtcagtctttctggatawccaccatgagtcctgcaaagcccttcagtaatctattgcctgcctaggtgatgtgtacccaggtgagtcaggtcttcatgagtcaaacactcgtcttccttttctgtctttcccaaccctaccactcagtgctgtgtgctctgatctgaccccagctcccaggttgtttgtattggtctaagaaagcaagaccaggaggggcaggttgagaaggaagtaagaggccaacagccatggaaagtggcacgtggggctgtcattcctcaaaaccacataccctgggtgcattttgtgaatttttctggattcagaatcttttccctgtgtgtctatctagaaaatcaccctcctcctactttcctctcattacactttctgtttctggtgcaatcgtttatgtccagagaatggccatgcaaatagttgacaatagaataaaaaatgactttttgtgagatttggaacctggcctttcttttttccaaaagagattgaggtttctaaaagctagcttttatgcagggctgtgcagttgtgagtgtagttttagggaacaggtgcataagtgaagggtgagacagaaaacaaaatgctggctgtttgtcaaatcctgaaaataatttttgaaggtggatgtcattcaggagaccttgtaaatcttagagtgtcctcttaccagatgaagtggaggatgaggttgaattatggagttaggtgacagtgggtacatacttctctgcctcagtttttttttttaatctgtaaaaatggggatggaggcacttgggattttttgtgaggagtgtagttacctggaaagctcttacgatagtgcctcgtgcatagtgagtgctgcattagtgtgagctattataattatgggaatagacaaaggtgccaccctggccatccagagtggggaggtattttccagtcagggtccaggcaggccagctggagatgaagctgattagtggggaagcttaacttccaggagtggaagaatttaggaggagtaaacagaatgcacaacattctgtaaacatgcctttacccaacagtaggaatactcagagtgggtgtgtcttccgtggcaatcattatctcctgggaatctaagaatgtgtcctagagtcaaatggctttgatgtaagccaaacccagaaatggacttcagggctgcctggcacatagcattcattcatcttgaaaaaggaaagcattcatcttgctaaaggaat

SEQ ID NO: 667500 - DNA, 1452 bp, Homo sapiens
taattgtttttctgcccactccatctcttccgacctgccttctcccctttaatcaaatgtataaatactaagcctcctgaaatctcttcagagaaaacacaagccacagagattttttgcaactcatgttttcccagggttcactctcaagctctggctcaataaaactcaattggtcaagacccttgcctcagtcagtctttctggatatccaccatgagtcctgcaaagcccttcagtaatctattgcctgcctaggtgatgtgtacccaggtgagtcaggtcttcatgagtcaaacactcgtcttccttttctgtctttcccaaccctaccactcagtgctgtgtgctctgatctgaccccagctcycaggttgtttgtattggtctaagaaagcaagaccaggaggggcaggttgagaaggaagtaagaggccaacagccatggaaagtggcacgtggggctgtcattcctcaaaaccacataccctgggtgcattttgtgaatttttctggattcagaatcttttccctgtgtgtctatctagaaaatcaccctcctcctactttcctctcattacactttctgtttctggtgcaatcgtttatgtccagagaatggccatgcaaatagttgacaatagaataaaaaatgactttttgtgagatttggaacctggcctttcttttttccaaaagagattgaggtttctaaaagctagcttttatgcagggctgtgcagttgtgagtgtagttttagggaacaggtgcataagtgaagggtgagacagaaaacaaaatgctggctgtttgtcaaatcctgaaaataatttttgaaggtggatgtcattcaggagaccttgtaaatcttagagtgtcctcttaccagatgaagtggaggatgaggttgaattatggagttaggtgacagtgggtacatacttctctgcctcagtttttttttttaatctgtaaaaatggggatggaggcacttgggattttttgtgaggagtgtagttacctggaaagctcttacgatagtgcctcgtgcatagtgagtgctgcattagtgtgagctattataattatgggaatagacaaaggtgccaccctggccatccagagtggggaggtattttccagtcagggtccaggcaggccagctggagatgaagctgattagtggggaagcttaacttccaggagtggaagaatttaggaggagtaaacagaatgcacaacattctgtaaacatgcctttacccaacagtaggaatactcagagtgggtgtgtcttccgtggcaatcattatctcctgggaatctaagaatgtgtcctagagtcaaatggctttgatgtaagccaaacccagaaatggacttcagggctgcctggcacatagcattcattcatcttgaaaaaggaaagcattcatcttgctaaaggaat

SEQ ID NO: 667501 - DNA, 1452 bp, Homo sapiens
taattgtttttctgcccactccatctcttccgacctgccttctcccctttaatcaaatgtataaatactaagcctcctgaaatctcttcagagaaaacacaagccacagagattttttgcaactcatgttttcccagggttcactctcaagctctggctcaataaaactcaattggtcaagacccttgcctcagtcagtctttctggatatccaccatgagtcctgcaaagcccttcagtaatctattgcctgcctaggtgatgtgtacccaggtgagtcaggtcttcatgagtcaaacactcgtcttccttttctgtctttcccaaccctaccactcagtgctgtgtgctctgatctgaccccagctcccaggttgtttgtattggtctaagaaagcaagaccaggaggggcaggttgagaaggaagtaagaggccaacagccatggaaagtggcacgtggggctgtcattsctcaaaaccacataccctgggtgcattttgtgaatttttctggattcagaatcttttccctgtgtgtctatctagaaaatcaccctcctcctactttcctctcattacactttctgtttctggtgcaatcgtttatgtccagagaatggccatgcaaatagttgacaatagaataaaaaatgactttttgtgagatttggaacctggcctttcttttttccaaaagagattgaggtttctaaaagctagcttttatgcagggctgtgcagttgtgagtgtagttttagggaacaggtgcataagtgaagggtgagacagaaaacaaaatgctggctgtttgtcaaatcctgaaaataatttttgaaggtggatgtcattcaggagaccttgtaaatcttagagtgtcctcttaccagatgaagtggaggatgaggttgaattatggagttaggtgacagtgggtacatacttctctgcctcagtttttttttttaatctgtaaaaatggggatggaggcacttgggattttttgtgaggagtgtagttacctggaaagctcttacgatagtgcctcgtgcatagtgagtgctgcattagtgtgagctattataattatgggaatagacaaaggtgccaccctggccatccagagtggggaggtattttccagtcagggtccaggcaggccagctggagatgaagctgattagtggggaagcttaacttccaggagtggaagaatttaggaggagtaaacagaatgcacaacattctgtaaacatgcctttacccaacagtaggaatactcagagtgggtgtgtcttccgtggcaatcattatctcctgggaatctaagaatgtgtcctagagtcaaatggctttgatgtaagccaaacccagaaatggacttcagggctgcctggcacatagcattcattcatcttgaaaaaggaaagcattcatcttgctaaaggaat

SEQ ID NO: 667502 - DNA, 1452 bp, Homo sapiens
taattgtttttctgcccactccatctcttccgacctgccttctcccctttaatcaaatgtataaatactaagcctcctgaaatctcttcagagaaaacacaagccacagagattttttgcaactcatgttttcccagggttcactctcaagctctggctcaataaaactcaattggtcaagacccttgcctcagtcagtctttctggatatccaccatgagtcctgcaaagcccttcagtaatctattgcctgcctaggtgatgtgtacccaggtgagtcaggtcttcatgagtcaaacactcgtcttccttttctgtctttcccaaccctaccactcagtgctgtgtgctctgatctgaccccagctcccaggttgtttgtattggtctaagaaagcaagaccaggaggggcaggttgagaaggaagtaagaggccaacagccatggaaagtggcacgtggggctgtcattcctcaaaaccacataccctgggtgcattttgtgaatttttctggattcagaatcttttccctgtgtgtctatctagaaaatcaccctcctcctactttcctctcattacactttctgtttctggtgcaatcgtttakgtccagagaatggccatgcaaatagttgacaatagaataaaaaatgactttttgtgagatttggaacctggcctttcttttttccaaaagagattgaggtttctaaaagctagcttttatgcagggctgtgcagttgtgagtgtagttttagggaacaggtgcataagtgaagggtgagacagaaaacaaaatgctggctgtttgtcaaatcctgaaaataatttttgaaggtggatgtcattcaggagaccttgtaaatcttagagtgtcctcttaccagatgaagtggaggatgaggttgaattatggagttaggtgacagtgggtacatacttctctgcctcagtttttttttttaatctgtaaaaatggggatggaggcacttgggattttttgtgaggagtgtagttacctggaaagctcttacgatagtgcctcgtgcatagtgagtgctgcattagtgtgagctattataattatgggaatagacaaaggtgccaccctggccatccagagtggggaggtattttccagtcagggtccaggcaggccagctggagatgaagctgattagtggggaagcttaacttccaggagtggaagaatttaggaggagtaaacagaatgcacaacattctgtaaacatgcctttacccaacagtaggaatactcagagtgggtgtgtcttccgtggcaatcattatctcctgggaatctaagaatgtgtcctagagtcaaatggctttgatgtaagccaaacccagaaatggacttcagggctgcctggcacatagcattcattcatcttgaaaaaggaaagcattcatcttgctaaaggaat

SEQ ID NO: 667503 - DNA, 1125 bp, Homo sapiens
ataggcttcacatgccctatccatggtctagtttggaggggaattgggagttggacatgtaatacctaggccgtagtggaacactgggaaagggggtactccttgccctattgcttctgcctgcatattccattagcctaattgtaccaagtccatttgggattcaattactggtgtccagcatgttccaggcctaatattaatacctgtctttggtaatacaaaagataccatgcaccacccaccttagacatccttcagatagcaaggtgtgtcagggctgtggccctttgtattataagttatatcctcaaataaggcattgctcactttgctgcagcctgtcctgaacttagcttattagacctaccttggttttgcttggcttggcttacttatgcactgggtggtttaactatattggttccatagttcagcttactgtttaaaaatttcattctagttacattttaaacttgccttatgtttaatttttaacttgttaaggctagctttgctgtggagctcagatgaattgtcagtgggagcttttacatttcactctttttggaccttttggtggacctttctaatcacctatccaattttccactgttgtgagatactgtattattttatccaagtcaatcaataatgatatttgcttagggagtcaacagaaagacataactaacaatcaatctcactatgggaaargaaaacaagtccactccttttgaaatctgattctctgcttccagagccattttccctcactctggctgtctttattctggtacacctctatattccagctgtaccaagctgttaatacttgaagttctcagaatcctccttgtgtcattttcccaggataattcctacctctcatccctcaagaagcttcccagtcccatcccaccttcacctttccccttccaagccaagtttcttgtcccttatgtctgttcctagagcactttgtgtgcatttctgtcagagaacttatcacagtacattacagtcgttggtttgcttgtctgggttttgttagtttgttttttgagacaggttcttgctctgtagcccaggctggaatgcagtgatataatcatggttcatgca

SEQ ID NO: 667504 - DNA, 1033 bp, Homo sapiens
caaaagcaccctcgctggagccctcggaggccagtgcttggtggccgtgggtcccctctggacctgtggccaaactccaaactcgctgcgcacctcctgtgggcgctggcaccagaaggaagtggccccaatcatggagcagtgtggtggtggtgaagctgcacggactctgcttctctacgcaattctttcatttttcttggagattttacttacagtttttaaaacaacaaatcctagggcttggaaaacttagtgagtgttttaactgattgaactaggaaagtactgtgcactagagatcaatacactccaggttggatgctgtcctgacaccttccttcaggtaggaatgtcagcctctttcaggggtgacaagatgggataagataaaacatctagagagaggagaagaatgcatgtgtacataygcacatgctctatgcagctgaatgcctcaggaatgtcatgaagctgcaagtcatcccatcagctctgaacgaaggtgtgaatgatgcaaaaatcccagggactcaatggcttttagctcctgcacaaattagttcttggagagtgaaaattggcagtggcaggaaattgtaatacaaatcatcagaaaaaaactggttgactctgacatctgaacaccccacacacactactccaaacattgattccagaaacccagtttcacagtggggccacacagacaccgcagccagagatgaggctgtggtcagaggtgctgggctgggcccggtgctgcagcccacacagagcgtgggaataaaagcaggggcttctggctgcttccaggggcctctagggccctgcctcattttcagcacagccacctttaggcacttgtgagaccagcaactgcggaccgttcttacgtgtctgagaaggcattaccaagagcagggtcaggagggagcagggcagggaacaggcagcgcagcctggagccctcaggcttttgacctggcttggtctcgtgctttgatggtgcccacggcaccctgagaccagt

SEQ ID NO: 667505 - DNA, 540 bp, Homo sapiens
agcttagttgatgagacaaatggcaatttggagtaatggctagtgcactaaattcaattgggtcattcaaaggcctacatttgaacttaatctggctcctctcactgttgtaagttgtgacttttccattcctacctaactctgatttatttctcatttctttcttattggctctgtgagttgatgacatctttaagagtattcatcatgtcaacagctcacagaccaataagaaagttgggtgcattattgggcatatggtgtggtaaatgatatactgaatgtttatttgaaagtttaatgtcgctcacatgtgaatttaatgttttctcctctccgataatgctcatcttaactataaacatagtttgcagaaggaactgatgttgttctaggacgctaaatcaaaattcagcacttcctccttttcttgtccrccctccttctactcaaatcaagtttaattttcattctatagttggaaaagctgagatataaatggcttccactcccatccctgactttttgttaaatactaaa

SEQ ID NO: 667506 - DNA, 602 bp, Homo sapiens
atctgatacagacttttcaagaatgtctcattgctttagacaattccctgacactacctgtctggtttctttgattagcaaaaataatcatagtaaaaataccaatcaaaataccctgtaattattcggtaaggtttacatctctttacagttttctagtgtgtgtgtgtgtgtgtgtgtgtgtgtgtgtgtgtgtgtgtgtgtatgccttcgagagaaatctgtgaggttgacagagcaagaattacaattgccatttgcagatggagaaatgaaggttctggagtttgtgacatgtctgcggaacagccaggaaatgaaccaggactctgaacccgagaaaatcagggtgatatggaaggatgggaatggacttggaacgcaaatctcagttctgccacttccagaagatgttatcccaggkagtcacttaacccttgatgtcttgagaatttgctcatttgtgcagctgagatagtcaaacctaccatgaactgctctgttaggattatagattataccagccccagggtgaaggcttaatgcatgggagatattattttcattgttcttttctggaagtcacttggcccaaaggaaca

SEQ ID NO: 667507 - DNA, 2416 bp, Homo sapiens
aatatctttccaccagaagagattttaatgcatatgattctatgccaaaatctgtggttctagctccaacttgggcctaacctccagacaaatcccaaaggtctgttgtgtatttccacgagaatgatgcgcagcacctaaaactcagcttgttcaaaacggactcaatttctttcccccagagccctcctacccgattcctgagtcattcaggcctggctcctctcttcacttctaggtcccatcaatgacttatcttaccattttgactttgaggatccatctgcttgtcctcctcttttccactagaccttggactattgcaaggtcattcttgatccacctctagcatctttcatgtttaatcaatcttccccacaagggaaaatctcaaacaactacataattcagttataacgtgagcatcaagagagcttaaagaactacataattctgttataatatgaacatcagacacttctatatgcacatgaattgccaagaatggctgatttcacctttcacatgatcagaaacaatttaataaggatttcacattggtgttcctggaatctgaagagtttctgccactttttgaacccaagttgcaaggatgataaccaatgtagccttggataaatattacaatgttggagaaagaaggggtttttcagaagatctgtaaatgggctcatttttcagaagcagaaactagcaatcagtgacagcaacagattgacggagcatagactttgaggcagagtcaggacttgcttaaactctgtcttctgactcttggttcacgctcttccattccacactatgctccatcataccacctcatgccacatcatgccaccaatatgccacatcatgaaaccaacatgtttcaccaaagtttcaggaaggttgacttagtctgtagacgggattggaggggattcaggggagcatggataaggaaggatgggaaggaggtcagtgctggagcctcaagagctatgacatctgcagggtagcccaggatggtggcagtggggacagagagaagggaataaattcgagaaagagaacatgactgcacccgtaaactactctttttgctcaaggatgttcctgggatggagatggtctcttgaaatatattctcatcattataagagatggattgtcttccaaggtagtggtcagtaagtcactcttcagatgccatcaaaacctgggtcaagagatgggctatgtactcccacttatatcattggaccaattagtggcacaaaatattctgagggatgcagataccttgaggggcagattgctggcagaaacttagtcaagagatttgactccaagcaagagggagaaggaaaagtttgaggagaaggaaaagttcctctcctgaaccagctcttcttagaggtacctaccttttgtggctcttatgcaggttatttttaaaagtaactaatttttaaagtgaatatggtttttgtatcttcacttgcttttttacaactctttacctttctgcaagttccccctccctagtctactcctagttctttgggggaatttctggggttaaacctacatgtttcaggtcttaaagccatcttggaacacacatggcaaaacaagtatatttaaattcttctgccccaaggttgacacagcgaggggggagcagggagctagttactgacatgtgaacactaaatgaagctctggaagttcttcctgtaaagctgtcaacgcctatatgctttggcaaatcttggagatgtgggcccaggaagacaacctttgaatcattctcttaagtatggcaaacattttcatttactaaggaaatgatttcttttatatgtaattaaaatataattataggccgtgcatggtggctcatgcctgtaatcccggcactttgggaggctgaggtgggtggatcacctgaggtcaggagttcaagaccagcctggccaacatggcaaaactctgtctcgactaaaactacaaaagttagccaggtgtggtggtgtgcacctgtaatcccagccacttgggaggctgaggcaggagaatcgcttgaacccgggaggcggaggctgcagtgagccgagatcacaccactgcactccagactgggtgacagaatgagactccatctcaaaaaaatatatatataattataaatatatttaatatttaagttatttaatatttaagttatttaatacctaatttaaatrtaattatataaattaaacaattgattttaattcactttatatatttaatatatagttaaacaaatatatttatatgatcgacataagtaaaatatatttttataatgaaatatgtaaatatgcacttaaaatatactaaataaatattaaatatataagtataaaaa

SEQ ID NO: 667508 - DNA, 2416 bp, Homo sapiens
aatatctttccaccagaagagattttaatgcatatgattctatgccaaaatctgtggttctagctccaacttgggcctaacctccagacaaatcccaaaggtctgttgtgtatttccacgagaatgatgcgcagcacctaaaactcagcttgttcaaaacggactcaatttctttcccccagagccctcctacccgattcctgagtcattcaggcctggctcctctcttcacttctaggtcccatcaatgacttatcttaccattttgactttgaggatccatctgcttgtcctcctcttttccactagaccttggactattgcaaggtcattcttgatccacctctagcatctttcatgtttaatcaatcttccccacaagggaaaatctcaaacaactacataattcagttataacgtgagcatcaagagagcttaaagaactacataattctgttataatatgaacatcagacacttctatatgcacatgaattgccaagaatggctgatttcacctttcacatgatcagaaacaatttaataaggatttcacattggtgttcctggaatctgaagagtttctgccactttttgaacccaagttgcaaggatgataaccaatgtagccttggataaatattacaatgttggagaaagaaggggtttttcagaagatctgtaaatgggctcatttttcagaagcagaaactagcaatcagtgacagcaacagattgacggagcatagactttgaggcagagtcaggacttgcttaaactctgtcttctgactcttggttcacgctcttccattccacactatgctccatcataccacctcatgccacatcatgccaccaatatgccacatcatgaaaccaacatgtttcaccaaagtttcaggaaggttgacttagtctgtagacgggattggaggggattcaggggagcatggataaggaaggatgggaaggaggtcagtgctggagcctcaagagctatgacatctgcagggtagcccaggatggtggcagtggggacagagagaagggaataaattcgagaaagagaacatgactgcacccgtaaactactctttttgctcaaggatgttcctgggatggagatggtctcttgaaatatattctcatcattataagagatggattgtcttccaaggtagtggtcagtaagtcactcttcagatgccatcaaaacctgggtcaagagatgggctatgtactcccacttatatcattggaccaattagtggcacaaaatattctgagggatgcagataccttgaggggcagattgctggcagaaacttagtcaagagatttgactccaagcaagagggagaaggaaaagtttgaggagaaggaaaagttcctctcctgaaccagctcttcttagaggtacctaccttttgtggctcttatgcaggttatttttaaaagtaactaatttttaaagtgaatatggtttttgtatcttcacttgcttttttacaactctttacctttctgcaagttccccctccctagtctactcctagttctttgggggaatttctggggttaaacctacatgtttcaggtcttaaagccatcttggaacacacatggcaaaacaagtatatttaaattcttctgccccaaggttgacacagcgaggggggagcagggagctagttactgacatgtgaacactaaatgaagctctggaagttcttcctgtaaagctgtcaacgcctatatgctttggcaaatcttggagatgtgggcccaggaagacaacctttgaatcattctcttaagtatggcaaacattttcatttactaaggaaatgatttcttttatatgtaattaaaatataattataggccgtgcatggtggctcatgcctgtaatcccggcactttgggaggctgaggtgggtggatcacctgaggtcaggagttcaagaccagcctggccaacatggcaaaactctgtctcgactaaaactacaaaagttagccaggtgtggtggtgtgcacctgtaatcccagccacttgggaggctgaggcaggagaatcgcttgaacccgggaggcggaggctgcagtgagccgagatcacaccactgcactccagactgggtgacagaatgagactccatctcaaaaaaatatatatataattataaatatatttaatatttaagttatttaatatttaagttatttaatacctaatttaaatataattatataaattaaayaattgattttaattcactttatatatttaatatatagttaaacaaatatatttatatgatcgacataagtaaaatatatttttataatgaaatatgtaaatatgcacttaaaatatactaaataaatattaaatatataagtataaaaa

SEQ ID NO: 667509 - DNA, 2285 bp, Homo sapiens
ttccaagcatagattctttattaaactcatcacccattgtcctgctacactgaatatattgtgtgcatatggttggtttagtagaaaattgttatcggaacagcttttggaatcatttaaaagatacttgtgattgtattctaagcttaggctgttcctacccatccattttcagttttgaagtcagcctcagaattgcttcctatcattttagttttgaaatttatttttgaaatattatactataagaaacatggaattattttactttytggagaaatatcactggtttttgcacaatgaatatgagtttactgaaggcaaagattctttttgtttatttctgagtcctcagcacacaggattttctgacacattaaatgcttagcagatatttgtggaatatggaatgattaaatgtaaatgatgtctgtcctttttaaagaagacattttagagtttcctaggtcaaacatatttcataataggcataatcataggcaggacctttgccaataatatttgtagaatattaaatatggaaagaaagccattgaaaatgactttattttttgttttttccccacccttcaaggcagaagtatcagcatttttttttcttttgccccttttaaagtcaggcttggagctccctggccccttcatggctcatttataatgcatggtcatttggatttttggttttgttgctcactccaaagcacttcttatcaatcacagtatgaagttgatacacagatttccatgtagcataaaaaatgtttgctaaaggtcactgaaagtatggcgattatgactctaaattttttttactggtattttagcaagatgatcctattttctgaattagtgaattatataacaacattcactctcccctcctacccacactaaacttcaagcaggaacatatgccaaatgtccaattttccagaacatgccattacagacattacttagactagcagatcactcttcaccaacagaactctctacgacacctggcacacagctgggtgttagtcgtagaatgtggtggctctgggttttgtctgctcattaccatggctctatttttttgtcttccggttcttatgtgtactcctctttcaatccttgtggtcccacagggtcgtcagagtgaggccccaccctccccccacagacaggaatgagcctgtgaccatgaatttatgtgcatcaccccgcagcaccagtgcttagtttagagaagggcgcaatgattcaaagccttagagtcaatggttagagaatccatctgagaaggaagccaagcaggacaggctgatgacatctttgaaaccactgaatccagctgtgcttcaggtccacaacggaacttcccattaagtcaaacaacacagtacctttatgtgtaggcaagtttcagttgaattcctataacttgcaaccaaaagagtcccaatgaatacaatatgtcatttgaaaagttaaaataatcatgatattaaccaatctgtcttgaaccccttcctttccttaacatttggggttttaatgtacagtttttaaaatgctgacaacttaaatgacatatctgagtgtgagacacacttagcctagaagctcatgtcaaacaattatttattttttatggtacaaattaaaagtgacagatctgaagctgttaagaaatacacaaagtgcagctttactgaccatacagatattgctctagattaagtacagttttttttttttttaaatattaagcaacctgtgcagataaaatcagctttggtttcaatgtcagagcaagtaaggagcttttaaatattcagtttggcttcttggtcacaagtctatcatgtcaacttcttgtcatgatgatttttccaaagcaacccagtcctgtttcctgccctccctcctgctgcctgctccgggcacggagaagcagatctctttgtggtgcctcataagtgaccccggtgaccagtctagatcacagcacataggacaaaaaaaaaaaaaaatcactttcttaacaacaaataaacaaatgtgcctcacataatttcaagttgaagacaagcaaatcacatgacaaaaagctcattacaaaatgttatccaaacagattttacagtcaaacattgaaatgaaaatcaatttcctttatctcaatttttttttaagcttggtcattaactgggtacaagtagagtgctgaggtaaaacattgatgaacagtttgtatttcttttttttttcttaaaata

SEQ ID NO: 667510 - DNA, 2285 bp, Homo sapiens
ttccaagcatagattctttattaaactcatcacccattgtcctgctacactgaatatattgtgtgcatatggttggtttagtagaaaattgttatcggaacagcttttggaatcatttaaaagatacttgtgattgtattctaagcttaggctgttcctacccatccattttcagttttgaagtcagcctcagaattgcttcctatcattttagttttgaaatttatttttgaaatattatactataagaaacatggaattattttactttttggagaaatatcactggtttttgcacaatgaatatgagtttacygaaggcaaagattctttttgtttatttctgagtcctcagcacacaggattttctgacacattaaatgcttagcagatatttgtggaatatggaatgattaaatgtaaatgatgtctgtcctttttaaagaagacattttagagtttcctaggtcaaacatatttcataataggcataatcataggcaggacctttgccaataatatttgtagaatattaaatatggaaagaaagccattgaaaatgactttattttttgttttttccccacccttcaaggcagaagtatcagcatttttttttcttttgccccttttaaagtcaggcttggagctccctggccccttcatggctcatttataatgcatggtcatttggatttttggttttgttgctcactccaaagcacttcttatcaatcacagtatgaagttgatacacagatttccatgtagcataaaaaatgtttgctaaaggtcactgaaagtatggcgattatgactctaaattttttttactggtattttagcaagatgatcctattttctgaattagtgaattatataacaacattcactctcccctcctacccacactaaacttcaagcaggaacatatgccaaatgtccaattttccagaacatgccattacagacattacttagactagcagatcactcttcaccaacagaactctctacgacacctggcacacagctgggtgttagtcgtagaatgtggtggctctgggttttgtctgctcattaccatggctctatttttttgtcttccggttcttatgtgtactcctctttcaatccttgtggtcccacagggtcgtcagagtgaggccccaccctccccccacagacaggaatgagcctgtgaccatgaatttatgtgcatcaccccgcagcaccagtgcttagtttagagaagggcgcaatgattcaaagccttagagtcaatggttagagaatccatctgagaaggaagccaagcaggacaggctgatgacatctttgaaaccactgaatccagctgtgcttcaggtccacaacggaacttcccattaagtcaaacaacacagtacctttatgtgtaggcaagtttcagttgaattcctataacttgcaaccaaaagagtcccaatgaatacaatatgtcatttgaaaagttaaaataatcatgatattaaccaatctgtcttgaaccccttcctttccttaacatttggggttttaatgtacagtttttaaaatgctgacaacttaaatgacatatctgagtgtgagacacacttagcctagaagctcatgtcaaacaattatttattttttatggtacaaattaaaagtgacagatctgaagctgttaagaaatacacaaagtgcagctttactgaccatacagatattgctctagattaagtacagttttttttttttttaaatattaagcaacctgtgcagataaaatcagctttggtttcaatgtcagagcaagtaaggagcttttaaatattcagtttggcttcttggtcacaagtctatcatgtcaacttcttgtcatgatgatttttccaaagcaacccagtcctgtttcctgccctccctcctgctgcctgctccgggcacggagaagcagatctctttgtggtgcctcataagtgaccccggtgaccagtctagatcacagcacataggacaaaaaaaaaaaaaaatcactttcttaacaacaaataaacaaatgtgcctcacataatttcaagttgaagacaagcaaatcacatgacaaaaagctcattacaaaatgttatccaaacagattttacagtcaaacattgaaatgaaaatcaatttcctttatctcaatttttttttaagcttggtcattaactgggtacaagtagagtgctgaggtaaaacattgatgaacagtttgtatttcttttttttttcttaaaata

SEQ ID NO: 667511 - DNA, 2285 bp, Homo sapiens
ttccaagcatagattctttattaaactcatcacccattgtcctgctacactgaatatattgtgtgcatatggttggtttagtagaaaattgttatcggaacagcttttggaatcatttaaaagatacttgtgattgtattctaagcttaggctgttcctacccatccattttcagttttgaagtcagcctcagaattgcttcctatcattttagttttgaaatttatttttgaaatattatactataagaaacatggaattattttactttttggagaaatatcactggtttttgcacaatgaatatgagtttactgaaggcaaagattctttttgtttatttctgagtcctcagcacacaggattttctgacacattaaatrcttagcagatatttgtggaatatggaatgattaaatgtaaatgatgtctgtcctttttaaagaagacattttagagtttcctaggtcaaacatatttcataataggcataatcataggcaggacctttgccaataatatttgtagaatattaaatatggaaagaaagccattgaaaatgactttattttttgttttttccccacccttcaaggcagaagtatcagcatttttttttcttttgccccttttaaagtcaggcttggagctccctggccccttcatggctcatttataatgcatggtcatttggatttttggttttgttgctcactccaaagcacttcttatcaatcacagtatgaagttgatacacagatttccatgtagcataaaaaatgtttgctaaaggtcactgaaagtatggcgattatgactctaaattttttttactggtattttagcaagatgatcctattttctgaattagtgaattatataacaacattcactctcccctcctacccacactaaacttcaagcaggaacatatgccaaatgtccaattttccagaacatgccattacagacattacttagactagcagatcactcttcaccaacagaactctctacgacacctggcacacagctgggtgttagtcgtagaatgtggtggctctgggttttgtctgctcattaccatggctctatttttttgtcttccggttcttatgtgtactcctctttcaatccttgtggtcccacagggtcgtcagagtgaggccccaccctccccccacagacaggaatgagcctgtgaccatgaatttatgtgcatcaccccgcagcaccagtgcttagtttagagaagggcgcaatgattcaaagccttagagtcaatggttagagaatccatctgagaaggaagccaagcaggacaggctgatgacatctttgaaaccactgaatccagctgtgcttcaggtccacaacggaacttcccattaagtcaaacaacacagtacctttatgtgtaggcaagtttcagttgaattcctataacttgcaaccaaaagagtcccaatgaatacaatatgtcatttgaaaagttaaaataatcatgatattaaccaatctgtcttgaaccccttcctttccttaacatttggggttttaatgtacagtttttaaaatgctgacaacttaaatgacatatctgagtgtgagacacacttagcctagaagctcatgtcaaacaattatttattttttatggtacaaattaaaagtgacagatctgaagctgttaagaaatacacaaagtgcagctttactgaccatacagatattgctctagattaagtacagttttttttttttttaaatattaagcaacctgtgcagataaaatcagctttggtttcaatgtcagagcaagtaaggagcttttaaatattcagtttggcttcttggtcacaagtctatcatgtcaacttcttgtcatgatgatttttccaaagcaacccagtcctgtttcctgccctccctcctgctgcctgctccgggcacggagaagcagatctctttgtggtgcctcataagtgaccccggtgaccagtctagatcacagcacataggacaaaaaaaaaaaaaaatcactttcttaacaacaaataaacaaatgtgcctcacataatttcaagttgaagacaagcaaatcacatgacaaaaagctcattacaaaatgttatccaaacagattttacagtcaaacattgaaatgaaaatcaatttcctttatctcaatttttttttaagcttggtcattaactgggtacaagtagagtgctgaggtaaaacattgatgaacagtttgtatttcttttttttttcttaaaata

SEQ ID NO: 667512 - DNA, 2285 bp, Homo sapiens
ttccaagcatagattctttattaaactcatcacccattgtcctgctacactgaatatattgtgtgcatatggttggtttagtagaaaattgttatcggaacagcttttggaatcatttaaaagatacttgtgattgtattctaagcttaggctgttcctacccatccattttcagttttgaagtcagcctcagaattgcttcctatcattttagttttgaaatttatttttgaaatattatactataagaaacatggaattattttactttttggagaaatatcactggtttttgcacaatgaatatgagtttactgaaggcaaagattctttttgtttatttctgagtcctcagcacacaggattttctgacacattaaatgcttagcagatatttgtggaatatggaatgattaaatgtaaatgatgkctgtcctttttaaagaagacattttagagtttcctaggtcaaacatatttcataataggcataatcataggcaggacctttgccaataatatttgtagaatattaaatatggaaagaaagccattgaaaatgactttattttttgttttttccccacccttcaaggcagaagtatcagcatttttttttcttttgccccttttaaagtcaggcttggagctccctggccccttcatggctcatttataatgcatggtcatttggatttttggttttgttgctcactccaaagcacttcttatcaatcacagtatgaagttgatacacagatttccatgtagcataaaaaatgtttgctaaaggtcactgaaagtatggcgattatgactctaaattttttttactggtattttagcaagatgatcctattttctgaattagtgaattatataacaacattcactctcccctcctacccacactaaacttcaagcaggaacatatgccaaatgtccaattttccagaacatgccattacagacattacttagactagcagatcactcttcaccaacagaactctctacgacacctggcacacagctgggtgttagtcgtagaatgtggtggctctgggttttgtctgctcattaccatggctctatttttttgtcttccggttcttatgtgtactcctctttcaatccttgtggtcccacagggtcgtcagagtgaggccccaccctccccccacagacaggaatgagcctgtgaccatgaatttatgtgcatcaccccgcagcaccagtgcttagtttagagaagggcgcaatgattcaaagccttagagtcaatggttagagaatccatctgagaaggaagccaagcaggacaggctgatgacatctttgaaaccactgaatccagctgtgcttcaggtccacaacggaacttcccattaagtcaaacaacacagtacctttatgtgtaggcaagtttcagttgaattcctataacttgcaaccaaaagagtcccaatgaatacaatatgtcatttgaaaagttaaaataatcatgatattaaccaatctgtcttgaaccccttcctttccttaacatttggggttttaatgtacagtttttaaaatgctgacaacttaaatgacatatctgagtgtgagacacacttagcctagaagctcatgtcaaacaattatttattttttatggtacaaattaaaagtgacagatctgaagctgttaagaaatacacaaagtgcagctttactgaccatacagatattgctctagattaagtacagttttttttttttttaaatattaagcaacctgtgcagataaaatcagctttggtttcaatgtcagagcaagtaaggagcttttaaatattcagtttggcttcttggtcacaagtctatcatgtcaacttcttgtcatgatgatttttccaaagcaacccagtcctgtttcctgccctccctcctgctgcctgctccgggcacggagaagcagatctctttgtggtgcctcataagtgaccccggtgaccagtctagatcacagcacataggacaaaaaaaaaaaaaaatcactttcttaacaacaaataaacaaatgtgcctcacataatttcaagttgaagacaagcaaatcacatgacaaaaagctcattacaaaatgttatccaaacagattttacagtcaaacattgaaatgaaaatcaatttcctttatctcaatttttttttaagcttggtcattaactgggtacaagtagagtgctgaggtaaaacattgatgaacagtttgtatttcttttttttttcttaaaata

SEQ ID NO: 667513 - DNA, 2285 bp, Homo sapiens
ttccaagcatagattctttattaaactcatcacccattgtcctgctacactgaatatattgtgtgcatatggttggtttagtagaaaattgttatcggaacagcttttggaatcatttaaaagatacttgtgattgtattctaagcttaggctgttcctacccatccattttcagttttgaagtcagcctcagaattgcttcctatcattttagttttgaaatttatttttgaaatattatactataagaaacatggaattattttactttttggagaaatatcactggtttttgcacaatgaatatgagtttactgaaggcaaagattctttttgtttatttctgagtcctcagcacacaggattttctgacacattaaatgcttagcagatatttgtggaatatggaatgattaaatgtaaatgatgtctgtcctttttaaagaagacattttagagtttcctaggtcaaacatatttcataataggcataatcataggcaggacctttgccaataatatttgtagaatattaaatatrgaaagaaagccattgaaaatgactttattttttgttttttccccacccttcaaggcagaagtatcagcatttttttttcttttgccccttttaaagtcaggcttggagctccctggccccttcatggctcatttataatgcatggtcatttggatttttggttttgttgctcactccaaagcacttcttatcaatcacagtatgaagttgatacacagatttccatgtagcataaaaaatgtttgctaaaggtcactgaaagtatggcgattatgactctaaattttttttactggtattttagcaagatgatcctattttctgaattagtgaattatataacaacattcactctcccctcctacccacactaaacttcaagcaggaacatatgccaaatgtccaattttccagaacatgccattacagacattacttagactagcagatcactcttcaccaacagaactctctacgacacctggcacacagctgggtgttagtcgtagaatgtggtggctctgggttttgtctgctcattaccatggctctatttttttgtcttccggttcttatgtgtactcctctttcaatccttgtggtcccacagggtcgtcagagtgaggccccaccctccccccacagacaggaatgagcctgtgaccatgaatttatgtgcatcaccccgcagcaccagtgcttagtttagagaagggcgcaatgattcaaagccttagagtcaatggttagagaatccatctgagaaggaagccaagcaggacaggctgatgacatctttgaaaccactgaatccagctgtgcttcaggtccacaacggaacttcccattaagtcaaacaacacagtacctttatgtgtaggcaagtttcagttgaattcctataacttgcaaccaaaagagtcccaatgaatacaatatgtcatttgaaaagttaaaataatcatgatattaaccaatctgtcttgaaccccttcctttccttaacatttggggttttaatgtacagtttttaaaatgctgacaacttaaatgacatatctgagtgtgagacacacttagcctagaagctcatgtcaaacaattatttattttttatggtacaaattaaaagtgacagatctgaagctgttaagaaatacacaaagtgcagctttactgaccatacagatattgctctagattaagtacagttttttttttttttaaatattaagcaacctgtgcagataaaatcagctttggtttcaatgtcagagcaagtaaggagcttttaaatattcagtttggcttcttggtcacaagtctatcatgtcaacttcttgtcatgatgatttttccaaagcaacccagtcctgtttcctgccctccctcctgctgcctgctccgggcacggagaagcagatctctttgtggtgcctcataagtgaccccggtgaccagtctagatcacagcacataggacaaaaaaaaaaaaaaatcactttcttaacaacaaataaacaaatgtgcctcacataatttcaagttgaagacaagcaaatcacatgacaaaaagctcattacaaaatgttatccaaacagattttacagtcaaacattgaaatgaaaatcaatttcctttatctcaatttttttttaagcttggtcattaactgggtacaagtagagtgctgaggtaaaacattgatgaacagtttgtatttcttttttttttcttaaaata

SEQ ID NO: 667514 - DNA, 859 bp, Homo sapiens
aataggattcatgataatgaaccttaggaataaaggaagcaatgtagtattgaaacttacaggtctaaatcaggatcataagcatgtaataatagtgatggagtagggttcaagtagaagataaaccaagcgatcatcaacaagtttcacactgtatttattctgtgctgttgaccatccactgtcataagagaagacattccagaaataagaccttcaaatattacgtctcatcactaaaacaccaactacccagaaaaagaacaatttcccgaagcttcagacagagacagtgcatgtgttttggtagaggagatgtaagaaggctagagtaatccggcgagggycagaatgcaaaggattttgaatgccacactaaggggcctaaattttatcctatgggtaatgaagtagtaccaatgatttatgagcaaaagacaaagagaagaaaatgtacttcaaaaaatcaggccggggccgggcgtggtggctcacacctgtaatcccagcactttgggaggccaggcgggcaaatcacttgaggacagaagttcgagaccagcctggccaacatagtgaaaccccatctctgctaaaaatatttttaaaacgctgggcatggtggtgcacacctgtaatctcagctacttggacggctgaagcataagaatcacttgagcctgggaggtggaggttgcagtgagccaagactgcaccactgcattccagcctgggagacaaagcaaggcactgcctcaaaaaataaacaaataaataaataataaatcaggctggggtaggcatggtggttcatgtctgtaatttcagcactttgggaggccaaggagggaggactggt

SEQ ID NO: 667515 - DNA, 991 bp, Homo sapiens
aaaaaaaatcttgtttttaatgcaaatacactacacacaataaaacaaagagagactgtatgtaagaagttcaatacacatcaatgtaattgtttctcattctaaattttaaagctatttcatgtcagctaaattcacgatggtcaaggaaaacggcaatcagttgcaaagcaatgctatggaaattgaaagaacaccaaattttgaggtagaagataattctgaacaatctcagctgtgctcatgggactcatttggcagaaacaagcatttctcttatacagttttggtttagtgctgaaggtggccgaattaaatgacttcaaacccccacccccaaagccttaagtttttagaaatacagttagcagtaataatggctttaattgtgtggatttaaaaaaataacaaatgccacaccaagtttttgattccattgaaagtcattaaaataaactttactgatgcttagggaacaaactcattattctgaaaactaataaagaaagaaaaagaatcatttatcccatcatgccagtagaagcagttttcgaggtaaccaaatagttgataagatacagtcctttttagaaaaattctagtcaatgagagaaatgacagaatattactaccttgcaacctataataaaacagtaaatctagactgtgatcaaagcctgctactctaggtataagactgatgaagaatattacaatgaataaatctgattgtcatagttccacctgcattttatttccccatcatttgttaarcctagtcatttgttctgtagatttttcaaattctgggttttgttgattacattcctgtggtagagcttaattaacatgttcacctatccctttttatttcctgatagttagatctagaatccatcaactattaatcttagtatcacaaaaagaaagaccagcacacataatgtacccaacaccaactgtgaaatattcttatcaaaattaaaaaaaa

SEQ ID NO: 667516 - DNA, 515 bp, Homo sapiens
gcatttatgttttcctcaaagaatggtgattcatgagaccaactcttctcattgaagactcagatgtggtaagattgctacacatgaaacattccacatggaaactgrtttaaaaaatttataatgatcagggaaatgcaaatcaaaaccacaatttgatatcactttactcctgcaagaatggccataatcaaaaaaccaaaaaacagtagatgttggtgtggatacggtgaaagggaaacacttctacactgctgcttggaatgtaaactaatacaaccactatggaaaacagtgtggagattccttaaggaactgaaggtagaactaccatttgatccagcaatcccactactaggtatctacccagaagaaaagaagtcattatatgaaaaagatagttgcacacacatgtttatagcagcacaattcacaattgcaaaaatgaggaaccaacccaaatgcccatcaatcaacaagtggataaagaaactgatatatatatataaatatat

SEQ ID NO: 667517 - DNA, 515 bp, Homo sapiens
gcatttatgttttcctcaaagaatggtgattcatgagaccaactcttctcattgaagactcagatgtggtaagattgctacacatgaaacattccacatggaaactggtttaaaaaatttataatgatcagggaaatgcaaatcaaaaccacaatttgatatcactttactcctgcaagaatggccataatcaaaaaaccaaaaaacagtagatgttggtgtggatacggtgaaagggaaacacttctacactgctgcttggaatgtaaactaatacaaccactatggaaaacagtgtggagattccttaaggaactgaaggtagaactaccatttgatccagcaatcccactactaggtatctacccagaagaaaagaagtcattatatgaaaaagatagttgcacacacatgtttatagcagcacaattcacaawtgcaaaaatgaggaaccaacccaaatgcccatcaatcaacaagtggataaagaaactgatatatatatataaatatat

SEQ ID NO: 667518 - DNA, 668 bp, Homo sapiens
tccatgtaagttttaaaatgcatttttattatgactcatatttcatcatattacagtatctagcacatggcttttccctcttagataaggcacaattgaattgggtcttaatcagttttttaaatctagagtagtgctttgcataaataaaatatgtgttgagtgaataatattaactcaataacaataaacatttatgagtgctttttaaaattttattatgttattgtactttaagttttagggtacatgtgcacaacatgcaggtttgtgacatatgtatacatgtgccatgttggtgtgctgcacccattaactcgtcatttagcattaggtatatctcctaatgctatccttcccgcctccccccaccccacaacaggccccagtgagtgatgttccccttcctgtgtccatgtrttctcattgttcaattcccacctatgagtgagaacatgcggtgtttggttttttgtccttgcgatagtttgctgagaatgatggtttccagtttcatccatgtccctacaaaggacatgaactcatacatttttatggctgcatagtattccatggcctatatgtgccacattttcttaatccagtctatcattgttggacatttgggttggttccaagtctttgctattgtgaatagtgctgcaatg

SEQ ID NO: 667519 - DNA, 620 bp, Homo sapiens
gcagaaacttctactctcatcacctgttgacctccttgctaagtctggaatctgaattggtgtgagcatctgtttttttttttattctgacttgattttctgattctcccaagttgaccaaacatactaatgcctctcactgtctgggtttcccaagtatttcccaggacattcagtacactggaatttgtgtgtgtgtgtgaaggtatttgagagccagccaactgctgtgacagtgattcatggtaggcactaatttatttgcaaagcttcttcccagtgatgtaagagtccttttggagaaaagcactgcctccttcctccattcagactaacttcccagggtgctatggaccagctttgtgtgcagtaagggaattacatccatgaggtggttctttctgtgggtaggtggttgctaggatacagatagtcacaacagcmtcacggcagctgccttgttcttcagcacatggtgtatcagttgagaaatagtgttttatttcattcactccaacacttttctggttaaaattttaaaagcttgaaggaggatctttctttttcacacacaccattcttgtataaacaggtcaaaaacagattagtcaaactgaaca

SEQ ID NO: 667520 - DNA, 611 bp, Homo sapiens
ataaatcctaaagcccctggagtaaatctttaatcttcactagcagaacattctgttggatgatacgggctcagacggcaccctggacatctgcagggtcccgagcactgtgggtgtacttataaaccacagaccctcgctctggcctagaacacttcccaaggcggagtcctgcatccttttctgcaggtgtggcccctcctcactgtcaggtatgcccgtggtccctgcccccctgacccagagcctgctgccagctggggccccacattcctcacagcacatctctcaaccctccttgctcacttgtgaggctaaaccagaaagtacgtccagatggtcaacttcaagcyagtaacgatgctaacggcacaaagtccacattagagaagggcttctcaagctaggggatgggacagggaagactttggtgccccactctcacccataggagccttctcttccaaatgcttgcccacccaagagggaggaagctgtgccaaacatcagtcgatgatctctttaaccgtggcatgggcagttgatgtaagtggactgagatggtcttcgtaaaacttgtgggttaacctattgggtcagcaagcttgaaa

SEQ ID NO: 667521 - DNA, 617 bp, Homo sapiens
aattaaatagtaagtgggtagggaaaaattcactgtaaagtaagcaagagcagcaagaataaaataaagccaaaaataaggcaaggtcaagtacaattgccagaggcagacatacaatttggctctgagcttcttaccagcaggaaggaaacttgattacttgagttacaatgtgtgtaagagaaaaaaacttaaaatttacatccatacataaagtcctgtacatttcttagaaaattatattataaaatatttagtgacgggtgaggatattaatgaatgaaaaattaacaaatggccaggcgtggtggctcacgcctgtaatcccagcactttgggaggccgaggtgggtgaatcacaaggtcctgagttcaagaccaaccaggccaagatggtgaaaccccgtctctactaaaacacaaaaattagccgggcgtggtggcgggcacctataatctcagctactcgggagrctgaggcagagaactgcttgaacccaggaggaggaggttgcagtgagccaagattgcgccactgcactccagcccagctaagactccgtctcaaaaaaaataaaattaacaaatcataaaacaataagtagtatgcgatagca

SEQ ID NO: 667522 - DNA, 617 bp, Homo sapiens
aattaaatagtaagtgggtagggaaaaattcactgtaaagtaagcaagagcagcaagaataaaataaagccaaaaataaggcaaggtcaagtacaattgccagaggcagacatacaatttggctctgagcttcttaccagcaggaaggaaacttgattacttgagttacaatgtgtgtaagagaaaaaaacttaaaatttacatccatacataaagtcctgtacatttcttagaaaattatattataaaatatttagtgacgggtgaggatattaatgaatgaaaaattaacaaatggccaggcgtggtggctcacgcctgtaatcccagcactttgggaggccgaggtgggtgaatcacaaggtcctgagttcaagaccaaccaggccaagatggtgaaaccccgtctctactaaaacacaaaaattagccgggcgtggtggcgggcacctataatctcagctactcgggaggctgaggcagagaactgcttgaacccaggaggaggaggttgcagtgagccaagattgcgccactgcactccagcccagctragactccgtctcaaaaaaaataaaattaacaaatcataaaacaataagtagtatgcgatagca

SEQ ID NO: 667523 - DNA, 617 bp, Homo sapiens
aattaaatagtaagtgggtagggaaaaattcactgtaaagtaagcaagagcagcaagaataaaataaagccaaaaataaggcaaggtcaagtacaattgccagaggcagacatacaatttggctctgagcttcttaccagcaggaaggaaacttgattacttgagttacaatgtgtgtaagagaaaaaaacttaaaatttacatccatacataaagtcctgtacatttcttagaaaattatattataaaatatttagtgacgggtgaggatattaatgaatgaaaaattaacaaatggccaggcgtggtggctcacgcctgtaatcccagcactttgggaggccgaggtgggtgaatcacaaggtcctgagttcaagaccaaccaggccaagatggtgaaaccccgtctctactaaaacacaaaaattagccgggcgtggtggcgggcacctataatctcagctactcgggaggctgaggcagagaactgcttgaacccaggaggaggaggttgcagtgagccaagattgcgccactgcactccagcccagctaagactccgtctcaaaaaaaataaaatwaacaaatcataaaacaataagtagtatgcgatagca

SEQ ID NO: 667524 - DNA, 604 bp, Homo sapiens
agcatgtcctcaaatcaacacctttggagtggatattggacatgatgagacaccatgaagaagaccaaaccacctccatgacaggtggtgctgttaatttaggagactgcccgcaggtacagataatgctgcaaagatacaaagcagsatcaaaagcaaaaatgtggtcagatggttgtgcagatttatgagttatgtgagtgcatttcatctcctactcgtattcttggaacacaaagttttgaatcatgttaagtttacagcatggcatccttcttgtaaaatatgacatttaaatgagggaggctggccaggagtggtggctcacgcctatgatcccaacactttgggaggctgaggtgggtggatcacctgaggttaggagtttgagaccagcctggacaacgtggtgaaacccggtctctactaaaaatacaaatattacccagacttggtggcccatgcctgtaatcccagctacttgggaggctgaggcagaagcagcacttgaacctgggaggtggaggttgcagcgagccgagatggtgccactgcactccagcctgggtgacagagctagactctgtctcaaaaaacaaacaaa

SEQ ID NO: 667525 - DNA, 649 bp, Homo sapiens
tttgttcagtgtccacatagtgccatgcagttggaagtctctatcctgacaggtgttctcagggtgcacaggtgcctagaggaggaggacacagcccaccctggaggagcaggagaggctcagtgtggtgtctacactgatgcttgaagggggagcaggaagtagccaggtggagaagagaacatagggtattcagggtgagggcacagatgcacacatggcccagactcacacacagcacagtcatctacatggcacagacacacacacgtacccatacatacattgatgcacatagcacatccacacacacagcacggacacacacgcacccatacttacattcatgcacatggcacaggcacatacatgacccagatgcacaaagggcaccagaggcacaagctgcccagggtttgaggtggggaaaatgtaagcagtttgctgttgccgtatatccyggttctccgttactgtgtaacaacccacccaagccagctgtgtggctttgttagtacctctggtggcttgttgggttgactgggccagacagagatccttgctggggatctctctggtggtcacagtcagatggtagctgggactggagtcgtctgagcagtcaactgggctgaacacctgagatgtg

SEQ ID NO: 667526 - DNA, 656 bp, Homo sapiens
ttgaactcctgacctcaggtaatccacctggctcagcctcccaaagtgctgggattacaggtgtgtgccactgcgtctggcctaattttttatatttttagtagagacggggttttgccatattgcccaggctcgtctcaaactgctgggctcaagtaatcctccctccttggcctcccaaagtgctgggattacaggggagccactgtgccttgcccccatttcttattctctcctttttaagtgatgatggaacgaaggccaggaaatggtaaaaaatctttttgaggtaacacagcaccttggacataggaggtgcttgataatttttttttttttttttttagacggagtttcrctcgttgcccaggctggagtgcaatggtgtgatctcggctcactgcaacctctgactcccaggttcaagagattttcctgcctcagcctccctagtagctgggattacaggcacatgccaccacgcccggctaattttgtgtttttaatagagacggggtttctccatgttggtcaggctggtcttgaactcccgacctgaggtgatccaccccagtctcccaaaatgctgggattacaggcatgagccaccgcgcccggccgataaatattaattatggtttacgaggggttttaaa

SEQ ID NO: 667527 - DNA, 1148 bp, Homo sapiens
tggaatcatctaacccacagtctgtaatcaaatttccacaactgtcttctgtaatcaaactgtctcaattagcacaaaaatgtcttttcgcagttggtttgttcaaatcagaattcaaatagtattcatgttcacagaaaaaatgaaaaaataacactttgtataatagctattaaacataaaaacctcaatgaaacacacatttctatttaaaagaaagctaattatcaaatctgactcaagatacacaacctaatagacaaccatagaaaaaataaaatgttgtcaaagagccagacttcaaaaaggtccagactttcctggacgaagtctctcaatctttaaaaaaataatttttggactacataaatcattccagaaaattaaggagcagaaattaaccaattattctttaatataaaagtttgatgacattatctgacaaacagaacccaaagaacagcatagaaaacttcagtctgatttcactccaattaaagagaatgctgagcaattagtagtagttatcgttaagttgggtcttttggcagtaagctctaagatgaggygcttgtgtcaaagtgatttattagaaagtattctatggaaaaccttgtagggaaacaggacaggaagggaaggaagctaagcaagggtaagacaccaaggaaggtcccatagagggtaattttagctcagtccctcagggtagttctggtgttaacgtaggtcacacctcagagtttactcatatcattagtcattggttaagggctgtcttcaggaagcaaattttccagacacttccacggcatgtacattggcaaaacaggctctggcatggtgagggtggccttgcaacaagccttaggagctagatgttgagaatcaacagacactaggagtctgacagcaggaaggaaacacaggcctatggagagagcactggcatcatctgctacagtttaagttttggatacagaaagttaaaaaccactttgtttggatttgcattatggaattcctaagaggttgagcaatatatcactccagtgggatcatcctacagttaaaaaccactggtgattagtcccaacaacttgtacagacatttcaattcgctttttattagctagtctaaattacca

SEQ ID NO: 667528 - DNA, 2061 bp, Homo sapiens
tgatttttatctataaatgttgcgaacttctctctgatctccagtagcggggggaagaatctctracatttagcactgtctgggtgaaatcttagttccaattagtaagcaatcccttcagataataatcagctcttggaaaaaagacagaaaaagagccttccacattttttatcttgagtatccccactgattcttccctaagatggcttctgtggatctggggggacaggtgtggtttttttatgcatcttctgggtggtggacctaatccacctggttggtactcacccagctggcacctgtggctgaattctgtggctgctgcacaatgtagagtgtccatgaagtccctgcctgcaggctgtggattgtcttcatgctcccctctattctccacacaagacttagcattcttcacattcttccggacctcttcttcgatgctgatggttgggaatcattaacacagtccctgagaataaatagttgtttctttgctcttcatgtggttacagcatgggctcatctgggatagggtaggggtgggaggactttgtggccactccgtcatcatcatctcgtctcttcttgactgattcagtcctgtcccggttcctcgggggctacagacacttctaatcctgggcctggtgacccactctgtaatgctctctacagggcaccccactgccactataacaacccccactgggctgctccgcaccagagactcagcagctgcaggatcctatataaataccacagagccacgtggggccaccacaatcttctcctggcctactgtactgccaagtgacacagcttctctctgggtggtgcagaacagcctatgagcctgtccccgaccagtcccaagggaactaggacaaaagcagccctacccatgcctaattctgcattctcttcagtcctctaagctgggcgggacaggggtggggtaaggtgggtggtgcttggaacacacatcatctctgtacttggctttcctagttcttttccattctgcttccttcttcccaccatcctttggggaaaaaaagggtgggttgtctattttgtgatgtcgtatcttctgccatgtagcagcaggtcttgaagctttgctgtcatagggagtaaaggtttcttctctagcccacaggaaaattctgtaagctagatcctccaggctgggactatggtatgttaaagaggagacagagtatttgggaaatctctcaaggaaataacctgacttgaaagtcttttttttttcctgcataatcttatttttttagtgccagaattggaaaaatataatatttttgcattctttctttcttcaattacatgggcacccaagacaactaagggaaggctaccctctcagaaggatgaaagagagaagtgcttcacttaattttcatcactttatctagttgcaaaataaacatgttgctgtgggaagccacctcatttctatatggaaatggatgtgtcagcttaccaattcctttaaaaaaaatcatggaagaggcaaagttttggatctttttcttggtggagtttttgttaccatataaagaagacagaacattatttgtttttgcaggcaaacttcttgcagcaagtgcacaatagtgcattatacaaatagctactcatttttctttattttgtattctaggcagcaaagcttgatgttttaccaagcatagcaggaggtaccatcagtaagaactgatccacacacatgaagtgttagctaatggttcaaaaagaaatcttggatgagattgaacacattgattcctttcatagttaactgaagcagttcacaagagaagaattcatctacactctcttccttagatactgcaaaaataacaacagctgactacagccattattatcacttggctcatcaagctgaatacctaaaggggaataggttttgcattctctataacttgcttctagatatcctggtttctcacttaaattttaaaacagatctcataattaaataacatgctgaggcttgtttgatacatctcc

SEQ ID NO: 667529 - DNA, 883 bp, Homo sapiens
aaggtccgagtcatatttgtatggaagccatttataagctcttctcactgccctaatacaatttacatgaatgcaaagttatgaaactacccctttcctttttcgttttccctttcatgttgcattttgtgatgttttgctcctaaagggaattttctaaaaactaaaagtaaatttattgaaggtttgcataacataaaattaaccaatttattaatttttttatttaaacatactcaatgtatttccatctagttttgttaatttcaaattgtcccaaattgttcctgggaaccttttcgcatagcatttttttttaatccttcacgcccttccacccttccccctaagtcctgaaagtccatggtatcattcttatgcctttgcatcctcatagcttagctcccacttatgagtgagaacatatgatgtttggttttccattcctgagttacttctcttagaagaatgatctccaactccatccaggttgctgtgaatgccattctttctttcctttttatggttgagtagtattccatgatacatatatatatrtgtgtgtatatatatatatatctcacattttctttatccactcagttaataggcatttaggctggttccatatttttgcaattgcgaattgagctgctataaacattcatgtataagtgtccttttcatatagtgacttattttcctctgagtagatacccagtagtgtgattgctggatccagtggtagttctacctttagttctttaaggaatctccatactgtcttccacagtagttgcactagtttacattcccaccagcagtgtaaaagtgttcccttttttatcatatccatgccaacatctgttattttttgattttt

SEQ ID NO: 667530 - DNA, 2020 bp, Homo sapiens
aaaattcccagtgtaattggaccggaaagcattaaaaacatcagaattttctctgggaattctttacttatttttaaggatggatcacattatcaattttttcttttttttttttttttgggatggagtcttgctgtgtcacccaggccagagtgcagtggtacgatcttggctcactgcaacctccacctcccaggttcaagcaattctcctgcctcagcctctcgagtagctgggattacaggtgcatgccaccacactaacttttgtatttttagtagagacggggtttcaccatgttggccagcctggtctcgaactcctgacctcaggtgatctgcccaccttgggctcccaaagtgctgggattacaggtgtgagccaccatgctcagcctacattgtcaatttaaaaagtattatttaccactttgtggtggtgaactttattttttactgagaaaatgtgatctttttcacagttttcatatattttatttaaaccttggttcaactagtgatttcaatttatctaatgtagctctctcatctttctaattgttgacactggaggaaactccccaccaggatctacttgtttctaattgctcacagtagtttatgtttccaaatttatgaaaacatttactgtggcccatctatttgattaggcatattctcatgatcataatagtgcttcaaagattaatttactaaacatataatctgatgcttttaattaatcacatgccatagtgtaaagctcatgacataacctaatggtcaagacctgcaattgatgagctattaattacccattaactcatccactcacacgacctgtagatccatcagcttgattgaaagtagagacctaaatgatcctaaaaggtattttatataactttcacaaagaattccaggaaaagttgattcttgcatgagcaagagcgcagaaaaaaaaatgacgaattttccatgcatgttcctgccctccactccagaacagggagctagtcattagaatagcatgatacctttcttagttattccctagtaacacggttaagtgacatgactaactcttttttcttatccttaagagaaggggaggaggaatcaaaagtgatttttttcaggtccttggaatgcatgatatcaagcataaattttaattggcttcatttactaagtgttgcattacctcatcctccagttttaactatggattttctataaatcttcatacgactaaacatgataaactgctcaacatatcacagaacaaggcagtgcttattagcacttgagaagttattgattctttgtcttgattaatcttttattggtctctggagtattaattccagagaagagactgtaggttttgccacaacagagctcattcagagtttctacttcaattacaagatttttgatgtcacagctattagtctaattatgacttttctggcacagatactttttgtgtctatcaacaatgagcacttttaaatttattttaagatgtgccaataaaatatagccaacaagtgtgttttatacttaaggattaaaaaataatttttacttctgttttaaaataaagtttgttgttcttgattacgtaaattacatgtatacatatgtaacaaacctgcacgttgtgcacatrtaccctagaacttaaagtatagaatatatatatatatatatatatatatatatatatatatataacttctggtgagtgggctttttaacacaaagaatcagctttattattttttgaacaatttgtgatactttgatgctgactttcactattgattctgcttgaatgctttctaaactagaaatctattatgacattatcagatgcatgtggaaattttaatatttttacaaatggtcctggatggtgcagtggaggctgcagaatttctagtacagaaagggttgggttgggggagccctctggtttggtggagagatcttggggaaatgatcttgaagctaca

SEQ ID NO: 667531 - DNA, 1150 bp, Homo sapiens
aaatataaatacggataatgagcattttcttttcttggtagtcagaaggcatttatgggtttgataatcttataattaattataaaaatcttcatttttattctgggtactatgacttaattactctagaatactgtatccaaaatatgactctgagatgtgtttcataaacaccaacaaaatcaataaaattaacttatcacatagtacattcccagatcatatcaggaggaccaaagaacatctaaaaattactagcaagaagacaagttcaatgactgatactcttctctgccacgaggcataagctacagttcactgatagcaatattggctatttacacttaactataacatccattcactcattcattaatctaaacaagatttactgagtttcagccacaggcagagttctgtggaagtaccggaacacccacaggcagaagggctcatggccccggtcatcaggagcccacaggcttcctgtccccctagtgaataaaccaccatcacccaagattactccttttggaatcaagtgtggaagcacagcctgtcattccagtgcatactaataagctctcttttacctgaaggaattagtattcttaaatagaattgtttaraaaagttccaggacaggttgaatgcatgtatttcaagagactattttttttacatgatacaaaatcatatgtgtatttaatccattaccttactattgcttcttttattaactttgaaaaatcccagaaattttttcttctctttatctgtctcatcattgccaagtgatgatttcctaaaggtttctggaaaaaaaaagcactaagttatttttcagcatctgaaacaagagattcaatactttacttaaaaaatcttaataaatgaatcctctactcttaaacttttagttcttgtaagagagggaaagccatcaactatttctttcaaagctgtccgagccacttcaagtcctcaggtccatttgggaaatcactacaggttcttacacagtcttttaggaatgatggaggcattttctctgggtgtggttgtgcccttttggagaatgacaaaataaataaagttctagggcagagctgtccaacagaaagctaaaccagaccacacatgtaatttt

SEQ ID NO: 667532 - DNA, 613 bp, Homo sapiens
tgggggatgtggagtcagggagcggttttataaatgtcatayatcacagtaccatttgtatgccaattatttccttatcatcatcctctttatatgcaggtcctatgcccggtcatgtagaggggacaccaaggacaatgctgggggtaggcagggggaaataaagctggcaacaatcctcaaaacgatttttttttccaatttcaaaaagctcatttctacaaaaataatttatattcaaaatagagggaaaacgtcattaagtagttttaagttttgatggcacaaggaattatgaataacggtaaagaaaaaaagaagtccttttgaggataaaaacttactgactgcgtcctgtggtttcttcagctcatctgtgtgttacaggaaagaggatgaggaatcacttgctgattgatttcatcagctctggtactgacggcactgatggcaaggtcttatatgtttaattttattctccccatcttttccccccttaacctagatctctgaattttaacaatgtgtagggctgagatttatgtttctccaactgctctgacttgaacccccaaagcaaaagcaaaagcagggaacatccatgcacgttaaa

SEQ ID NO: 667533 - DNA, 495 bp, Homo sapiens
gcaatacaccattaatgggactatgtatcacctaaattcttcaaaggcatttttttctgagatggaatagatcttcagagactgtaccctataatgatacatgaactttttactttgatgcaagaaaaacatcagcagaggcttgctgaggggtgcctgggaattaacactctctcctttaagaattaccctggagtcctaaataattagtcaactmtgcatgtttttctctagccttacaaactaactatattgcatataagattagaaggtaggcgggcaggattaagggctttgctattagatgacaatggcttgaatacctccggtgcctttgttagaaagataccatggttcccttgtgtgaagtccttaatggaggtgatcaaatgtgaactgcttgggaaaatgactgccttttcaaatgattgttgtaaaatgtatggcgatattcccgtttactgtatcttcttcttctaagcccagaattaacaa

SEQ ID NO: 667534 - DNA, 1888 bp, Homo sapiens
tttccaacagatgaggttgtagagatttctatcacttcaccagaatgggaaatctatgccattttcattaagtaactaaatgttaggccatgtccaattcttaaataatttcacactcttggcaaggggggaaaaaagattattcaaagttatttcaaagtttttacagaattgctaataataataacagtagcaatgccttattaatgcagaatactttatggtttataaatatgtataatatgtaatataacatgtgacataatgtagataaaatatatataatttcatttgaaataactctttagaaattttacttgctaggcctgttttattgcaacttaaagatgctaaggtgaaaaataaattgaaaacattttagttcattccaaacagaaacataaccctaattattttatttaaaaataaaatrtacctccaatcattgataactactgaaattataggtaaataagtgagtttcaggaattattctggggcacagtatttgtaatgaaataaaaaaatgggcatggtaaaaacttggaatctggcaatctgaacacatcgatttgtaaatcttctctgcccataatgggacaccattcatcttctgaaagttttggttttccaatccctgatgcacgtaggattccatattcctttacaaattttgcttctccctctccccacaaaggcagtgaagaggaattccctatatccttcatctcatttgtctttctttgtcttcactcctgatagggaagaagtttggtttgtttctttttctctctctctctttttttttttttttgatgataaatgcatttcactatttatttagatgtttaagctctcacactaagtttttacaagctgatgaacactgacaaattatttctcccacagaactaaaaccacacatccccagacagtataaatatatggttgaactaaccttaatacacatcaccattttatcaattacataataaaacaaattatcaagtatccaaatattaagttgcacagctcaaaaggcatataaaaattagatgtctgctcaattcattagcagaaacctgcttcttttttttgcaagaatggttaggaagagaaggaaataaaaaatcactttcaaacaaaaataagttggtaaacaacttctgataaatatggaaaaaattacaataattttagaaattttatgattaagaattgttttggctacaataacaaatcatctctacctttaaaaaatattttactaaattaaagggcatatcccacatgctctgcacaagacaaaggcaaaattttgctaaaaataatgaatagccccctcccattcttttctcagtccctgcctgtgaagttgcacctcagattgcaaacattaaatgaactgtaaggcctttctgtctgaagacattaaagacacatgcttctatacaatgtagattttttttaatggaggcttttcataacagcacaaagtaagatttattgaaacacattaaataatcactgtaagacatggtaaaaaaaaaaaaagaatcaatggttaaacaaatctgatatttgctagcatgaatgtgggagatgaaaacatggagtgagcaggcaaatcactatgtaggccctactttcaatgtttgaaatgattgaaggaataaactacataaggtctagagtgttcatagttcctgggattttagttctgtatggtactaaaaatacacaagtattgtgccgggtggcacctaatcttcctaattttcttatatattgataagattctggcaagcaaatagatttaaacaagacataactcaatactgcatgatttcgggaaaggtcagttggtacaaacgacaggcacatttta

SEQ ID NO: 667535 - DNA, 1888 bp, Homo sapiens
tttccaacagatgaggttgtagagatttctatcacttcaccagaatgggaaatctatgccattttcattaagtaactaaatgttaggccatgtccaattcttaaataatttcacactcttggcaaggggggaaaaaagattattcaaagttatttcaaagtttttacagaattgctaataataataacagtagcaatgccttattaatgcagaatactttatggtttataaatatgtataatatgtaatataacatgtgacataatgtagataaaatatatataatttcatttgaaataactctttagaaattttacttgctaggcctgttttattgcaacttaaagatgctaaggtgaaaaataaattgaaaacattttagttcattccaaacagaaacataaccctaattattttatttaaaaataaaatgtacctccaatcattgataactactgaaattataggtaaataagtgagtttcaggaattattctggggcacagtatttgtaatgaaataaaaaaatgggcatggtaaaaacttggaatctggcaatctgaacacatcgatttgtaaatcttctctgcccataatgggacaccattcatcttctgaaagttttggttttccaatccctgatgcacgtaggattccatattcctttacaamttttgcttctccctctccccacaaaggcagtgaagaggaattccctatatccttcatctcatttgtctttctttgtcttcactcctgatagggaagaagtttggtttgtttctttttctctctctctctttttttttttttttgatgataaatgcatttcactatttatttagatgtttaagctctcacactaagtttttacaagctgatgaacactgacaaattatttctcccacagaactaaaaccacacatccccagacagtataaatatatggttgaactaaccttaatacacatcaccattttatcaattacataataaaacaaattatcaagtatccaaatattaagttgcacagctcaaaaggcatataaaaattagatgtctgctcaattcattagcagaaacctgcttcttttttttgcaagaatggttaggaagagaaggaaataaaaaatcactttcaaacaaaaataagttggtaaacaacttctgataaatatggaaaaaattacaataattttagaaattttatgattaagaattgttttggctacaataacaaatcatctctacctttaaaaaatattttactaaattaaagggcatatcccacatgctctgcacaagacaaaggcaaaattttgctaaaaataatgaatagccccctcccattcttttctcagtccctgcctgtgaagttgcacctcagattgcaaacattaaatgaactgtaaggcctttctgtctgaagacattaaagacacatgcttctatacaatgtagattttttttaatggaggcttttcataacagcacaaagtaagatttattgaaacacattaaataatcactgtaagacatggtaaaaaaaaaaaaagaatcaatggttaaacaaatctgatatttgctagcatgaatgtgggagatgaaaacatggagtgagcaggcaaatcactatgtaggccctactttcaatgtttgaaatgattgaaggaataaactacataaggtctagagtgttcatagttcctgggattttagttctgtatggtactaaaaatacacaagtattgtgccgggtggcacctaatcttcctaattttcttatatattgataagattctggcaagcaaatagatttaaacaagacataactcaatactgcatgatttcgggaaaggtcagttggtacaaacgacaggcacatttta

SEQ ID NO: 667536 - DNA, 619 bp, Homo sapiens
aaagcaaagaaaatccctggttgcttggaaaacctgacccccagctagaattccctgcctatagatttttaatttctgagtacactttatggctctttgactcagattgcattttactccggtgggcagcagaagttactgccactctgccagctcctggcgactactggggaggkttgtgaagtcacctcattccagcagcaaatccatatggctctgcagcaatttgattcttgcctcctcagaggaaaaaatttggctaaggggcataaggcagagtgagagacaggggcaagttttagagcaagagtgaaagtttatttaaagttttagtacaggaatgaaaggaagaaaagtacacttggaagagggcccagcagaccacttgagagatccaagtgccccgtttgtcccttgacttggggttttctacattggcacggttctggggttggcatttcttcttccttgatttttcccttggagtgggcagtccatatgtgtgatggcccgccagcacttgggaggggctgcatgtgcagtgtgtttactgaagttgtgtgcatgctcacctggggcattttttccttaccagttgagcgttcctagaggaaggtca

SEQ ID NO: 667537 - DNA, 619 bp, Homo sapiens
aaagcaaagaaaatccctggttgcttggaaaacctgacccccagctagaattccctgcctatagatttttaatttctgagtacactttatggctctttgactcagattgcattttactccggtgggcagcagaagttactgccactctgccagctcctggcgactactggggagggttgtgaagtcacctcattccagcagcaaatccatatggctctgcagcaatttgattcttgcctcctcagaggaaaaaatttggctaaggggcwtaaggcagagtgagagacaggggcaagttttagagcaagagtgaaagtttatttaaagttttagtacaggaatgaaaggaagaaaagtacacttggaagagggcccagcagaccacttgagagatccaagtgccccgtttgtcccttgacttggggttttctacattggcacggttctggggttggcatttcttcttccttgatttttcccttggagtgggcagtccatatgtgtgatggcccgccagcacttgggaggggctgcatgtgcagtgtgtttactgaagttgtgtgcatgctcacctggggcattttttccttaccagttgagcgttcctagaggaaggtca

SEQ ID NO: 667538 - DNA, 2139 bp, Homo sapiens
ctgaggtgggaggatcacctgaacccaggaagtcgaggctacagtgagccttgatcgcgccactcaactctcgcctgggcgacagagcgagaccttgtctctgaaaaatgaaaagtaaaaggaaaaccccaattaatttaagaagatccaggacaggggctctgtgggtctccagggggacagcaaagtcaagacccctcggttccctactcctggaaaccatgttgaaaggagaatcagaaasaaactccctcggaagacaccaaagccacctggggtccccaactgtaacgcgtgaggggaaaggagggctgagcgacgtggtggaggcagaaggccatggaagggatgggagaggccggggcctagggcagtggggcacgctggaaacgcctcccaggcttataggagaggccgggcccagggcaacgctggaaacgcctcccagtcttacaggagagggcggggcctagggcaacgctggaaacgcctcccaggcttcctgcagccggtgggtagggtctgcggcttctgaaggaaaatgtactgcacccagaagtctttgcccagccccgctgccaccagcaggagcacaccaagacccttaacggacacacctctgatgctggagaactgccctgcctctctgaggttacgggagaatgtgccccacggaggagaccactggagggacaggatggctgagtgaactccacctccggggaacacaaagctccactgaaaaagaggaaagccacaggctctttcctaggaaggacctgccacagaccacgctgagggctgcaaatgacactgacccagcctcctgggatcctcggccaccatgatggcacccaaggcctgagagggagggcaggggaaggaccgggtctatcgacagggatgcgtggcccatgagagccaggcactgttacagcagccgctggggcgtggattttggcggggagggggcagggctgctgtggttggcttttagaccggggggggggggggtctcatctagggcaattctgcccccaggggactctgggcaacgtctggggacatctgcggttgtcaggactaggggtgctcctgaccctgggtggaggccagggacgttgctcagcacccagcagtgtccaggacggccccaccctagggaacggcccagcccgcatgtccgcagtgctcagggtagacgctttagagcatccccggtgaccatgtgtgtgcaaccacacggaggggggggaaacgtgattttaaaagcccatcaggttggaggggcacgaactgacgcacgggacaggtagcgccctgaagctgggctgcacggccttcaggccaggtggagcgagacttgctgtcaaacaggcagagccactgagagcactgaaacctgagcggaaagccccgtggctcccataaggccggcaccgccgagtcagcgttaacgggacgctgggtctggacgctgctggccctgcaccccagacagaggcccgccccactcatccctcccagggcctactgcccgctgctgccccctggtggctcggcccagaaggggaggccccagttggggaaaccgaggcctgcagagagcaccaggccccacagcaagtctgaggcttctgggtgaacactgtagcccccgcagctcccctggagcccaggcccatgcccgccgttacctggccccttgcccgaggcctccagcttgcggagcttggagatctcgtcctcggtgatggtggtcatgtcccgccagaagtcggcgttcttgccctgctccagctccatgtagacctgggggcagggggcaggggtcaggacacgggtgtggctggggtgggggtgagggtgcaggtcagaggagcatcgggtggggctgggtacctggatatcctccagcaggtcctccatgtcggccacggtgaggccgttgaggaacgtgtagggctcatgcatctccacggccagatcgtcatcctcagcgctgatgtacttggccagcaggtcgatgggcttggcccgcccgtcccggatgcggatcttggaactgtggggagcaggggaaggtggcatcagagcctgggctgtgccctccatgctaaagaccctgcccttggggtg

SEQ ID NO: 667539 - DNA, 2139 bp, Homo sapiens
ctgaggtgggaggatcacctgaacccaggaagtcgaggctacagtgagccttgatcgcgccactcaactctcgcctgggcgacagagcgagaccttgtctctgaaaaatgaaaagtaaaaggaaaaccccaattaatttaagaagatccaggacaggggctctgtgggtctccagggggacagcaaagtcaagacccctcggttccctactcctggaaaccatgttgaaaggagaatcagaaacaaactccctcggaagacaccaaagccacctggggtccccaactgtaacgcgtgaggggaaaggagggctgagcgacgtggtggaggcagaaggccatggaagggatgggagaggccggggcctagggcartggggcacgctggaaacgcctcccaggcttataggagaggccgggcccagggcaacgctggaaacgcctcccagtcttacaggagagggcggggcctagggcaacgctggaaacgcctcccaggcttcctgcagccggtgggtagggtctgcggcttctgaaggaaaatgtactgcacccagaagtctttgcccagccccgctgccaccagcaggagcacaccaagacccttaacggacacacctctgatgctggagaactgccctgcctctctgaggttacgggagaatgtgccccacggaggagaccactggagggacaggatggctgagtgaactccacctccggggaacacaaagctccactgaaaaagaggaaagccacaggctctttcctaggaaggacctgccacagaccacgctgagggctgcaaatgacactgacccagcctcctgggatcctcggccaccatgatggcacccaaggcctgagagggagggcaggggaaggaccgggtctatcgacagggatgcgtggcccatgagagccaggcactgttacagcagccgctggggcgtggattttggcggggagggggcagggctgctgtggttggcttttagaccggggggggggggggtctcatctagggcaattctgcccccaggggactctgggcaacgtctggggacatctgcggttgtcaggactaggggtgctcctgaccctgggtggaggccagggacgttgctcagcacccagcagtgtccaggacggccccaccctagggaacggcccagcccgcatgtccgcagtgctcagggtagacgctttagagcatccccggtgaccatgtgtgtgcaaccacacggaggggggggaaacgtgattttaaaagcccatcaggttggaggggcacgaactgacgcacgggacaggtagcgccctgaagctgggctgcacggccttcaggccaggtggagcgagacttgctgtcaaacaggcagagccactgagagcactgaaacctgagcggaaagccccgtggctcccataaggccggcaccgccgagtcagcgttaacgggacgctgggtctggacgctgctggccctgcaccccagacagaggcccgccccactcatccctcccagggcctactgcccgctgctgccccctggtggctcggcccagaaggggaggccccagttggggaaaccgaggcctgcagagagcaccaggccccacagcaagtctgaggcttctgggtgaacactgtagcccccgcagctcccctggagcccaggcccatgcccgccgttacctggccccttgcccgaggcctccagcttgcggagcttggagatctcgtcctcggtgatggtggtcatgtcccgccagaagtcggcgttcttgccctgctccagctccatgtagacctgggggcagggggcaggggtcaggacacgggtgtggctggggtgggggtgagggtgcaggtcagaggagcatcgggtggggctgggtacctggatatcctccagcaggtcctccatgtcggccacggtgaggccgttgaggaacgtgtagggctcatgcatctccacggccagatcgtcatcctcagcgctgatgtacttggccagcaggtcgatgggcttggcccgcccgtcccggatgcggatcttggaactgtggggagcaggggaaggtggcatcagagcctgggctgtgccctccatgctaaagaccctgcccttggggtg

SEQ ID NO: 667540 - DNA, 1619 bp, Homo sapiens
ttggggattagagagagggcaccccagaccctgaggtggaggtcctcagacaggcagaagaccctgtttctggagaggacacatccagtagctcaggtaaagagccccagctctgggctcggccggtccggggttcccgtctggtctctgccttgcttctctgaacaccagttttcccacctgtgaaatgggtctagtcacagctgcctcacatttttgcctgattcgggagccagacggcctgggtataaacctgtgcctgccattcaccagctacatgttccccacctctggcttcacctctctgggcctcattcccatccatgaaatggcaggcaggctcatttcttcctcagaaactgtaaagaagagtaagttaaatgagcctgtctgagccctggccaggtatgggcccagtcagtgaggcttgagtaggggacactgttactaatcctattccaccatggatttaacaatagtcattcagggaaaragataacgaattaaatctgtgggtgtataagaaaaaaaatacaggccaggtgcagtggctcacgcctgtaatcccagctctttgggaggctgaggtgggcggatcacttgaggccaggagttttgagaccagcctggccaacatggagaaacccagtctctactaaaaatacaaaaattagccaggcatggtggtgtgtgcctgtaatcctagctactcaggaggcggaggcacgagaattgcttgaacccaggaggcggaggttgcagttagccgaaatcacgccactgtactccagcctgggcgacagaggaagactgtctcaacaaaaaagaaaaaaaaatactgatgcaagatgaggtcttgctgtattgcccaggctggtctcaaactcctggcttcaagcgtcttcctgcctcagcctcccgaagttctgggattacaggtaggagtcaccgccccccactgaacagtttgttcttcactaactgttttcctggactgccttcacattcagcccctacagaggggtctttctggttctgggtcaggcaggcaacctgagtagctgccaggatccagccacatcctgctgagctgcatgaaggactgtggggctctctggggcctttgttccttgttacacttggagttgctggtctcccttaactggcttgtaggtcttagcccatctgggctgctgtaataaaataccttagactggaagccaggcacattgctcatgcctctaacctcagcatttaggaggctgagatgggaggattgcttgagcccaggagttcgagaccagcctgggcaacatagtgagacctcatctttacaaaaaaatttaattttaatttgtttttcacccgtgacacagccctcaggaggtcctgagaacatatgtctctcgtctttgcaaaaaattgttttaattagccgggcgtggtggcacacatccctagtcccagctactcaggaggctgaggtgagaggataacttgagcccaggagtttgacgctatagtgatccaagattgcaccactacgcttcagcctgggtgacagagcaagaccctgtctcaaaaaaacaaaacagactgggccattgataaacaacaga

SEQ ID NO: 667541 - DNA, 2503 bp, Homo sapiens
ggataaagtgaatgttcttaaagcttctggagagaaaaagagaggtcactcacagggaagataagcatactgacatccacttctggtcagcaatactgggttttaggcagaggaacaatatattcaaacttccaaggaaamctattttgaatatagaattctatacctagccaagctatcaaaaaaatacaggggccaaaaataaatgaaagaaagaggaaataaaatgaaagaaggaaagaaagagagagagaaagaaagagagaaagagagaaagaaagagaaagaaagaaagagagagaaagaaaagaaaaggcaagcaaagatgtagcaagtatatcacctgtatttcctatatattgaaggaaccacttaccaaactcctcccacagaatgaagaacaactgcaggaggaaggctggcatgaaacacacagacttgaggcattgaatgtaattcagaagtagaggaagcaagcaaaacatcaaaagagaaaatcttggactggagtgcttgaaaactaaaaaaaaaaatcatacacgtgattacttaaatttgtaaaagtttacgacgacaaaaagaagattgaaatataagtagcaaaaaagaaaaaaccatatttgtgtcatgtacaacaaagaactaatgttcttctcatataaaatgttttgataagacaatttgaaaaacagaaatagaaaaatgggcaaatatcctgaatgtgcaagtcacaaaggcaaggaagaaattaatgcagatgaacggtgacattcccttacacttcccataggctggtcctccctgtaaattcagcctgggcagaaaggttcaaccttccagggctcatgtgggcgtatggatcagccaaactgccttggctttgcaaaggaggccatgggggcagtggagggaccatgtgtagggagaggggacatttttcaacagctgcaacatgtgtgaaacttggaaagagaaagcttcccaaagggaatttgggagaatttttaggaagtttgattctgcttaagtgtgtgtggtgtgtttaataattgtcacatttattccttacctcccagtgacattattataatgacctcctggaattcagttagcttggcaatcagagcttggcgggttctcaacatccatcagctttgttcttcctataagtgtttttaagcacactctgttgaatctttttcccgtccccttggccacaacttgagcgaattgcacaaatttctggttgcttttctttatgaaaagtccaatctggtgtaaggctttaatcaaacatcctattttaaattctttgtctccaccatcatcagctttggggccctataactgtctagtggaaaggagacctgtgctttctttcactccttccctgcagtgtgggatgggaccatggtctcattccggattctcctcctcaccatgtttccaagtttgttcctctatgagggcagagacgagggagagggtcctaggagatgtccttatctaatcatcagatttctgtagcatcctagtctcgtggggtccatctcattctgagaggtgaagccagctggacttcctgggtcgagtggggacttgaagagcttttctgtagctagctagaggtttgtaaaatgcaccaatcagtgctctgtaaaaacgcaccaatcagcactctgtagctagctagaggtttgtaaaattcaccaatcagtgttctgtaaaaacgcatcaatcagcgctctgtagctagctagaggtttgtaaaattcaccaatcagtgttctgtaaaaacacatcaatcggggctctgtagctagctagaggtttgtaaaatggaccaatcagcacactgtaaaatggaccaatcagcactctgtaaaatggaccaatcagcaggacatgggcagggacaaataagggaataaaagctggccaccccagccagcagcggtaacacgtttgggtcctcttgcatggtgtggaagctttgttctttcgttcttcacaataaatcttgctgccacacactctttgggtctgtgccacctttaagagctgtaatgctcaccccaaaggtccgctgccccattcttgaagtcagtgagaccacgaacccaccagaaggaaccaactccagacacaattttatctgtttctatttggtctccagaaatgtggtggcacctgtggagatgtgagcaaggccttcctgggataatgtgcaagttcactacagcctcttttgtcactaacatcctgtttgtttccctttggacctgtcggtggtccataccgtcaacccttcctgaagggtatggctgtgcatgcctggctcagtcccgagcatatcctcagcatctgcctactcttctaacttagatgatcctctacaggatcgatagggtttggctgtgtcctcactcaaatctcatcttgagttgtagcttccataattcccacatgtcctgggagggatctggtgggaggtaattgaatc

SEQ ID NO: 667542 - DNA, 2503 bp, Homo sapiens
ggataaagtgaatgttcttaaagcttctggagagaaaaagagaggtcactcacagggaagataagcatactgacatccacttctggtcagcaatactgggttttaggcagaggaacaatatattcaaacttccaaggaaaactattttgaatatagaattctatacctagccaagctatcaaaaaaatacaggggccaaaaataaatgaaagaaagaggaaataaaatgaaagaaggaaagaaagagagagagaaagaaagagagaaagagagaaagaaagagaaagaaagaaagagagagaaagaaaagaaaaggcaagcaaagatgtagcaagtatatcacctgtatttcctatatattgaaggaaccacttaccaaactcctcccacagaatgaagaacaactgcaggaggaaggctggcatgaaacacacagacttgaggcattgaatgtaattcagaagtagaggaagcaagcaaaacatcaaaagagaaaatcttggactggagtgcttgaaaactaaaaaaaaaaatcatacacgtgattacttaaatttgtaaaagtttacgacgacaaaaagaagattgaaatataagtagcaaaaaagaaaaaaccatatttgtgtcatgtacaacaaagaactaatgttcttctcatataaaatgttttgataagacaatttgaaaaacagaaatagaaaaatgggcaaatatcctgaatgtgcaagtcacaaaggcaaggaagaaattaatgcagatgaacggtgacattcccttacacttcccataggctggtcctccctgtaaattcagcctgggcagaaaggttcaaccttccagggctcatgtgggcgtatggatcagccaaactgccttggctttgcaaaggaggccatgggggcagtggagggaccatgtgtagggagaggggacatttttcaacagctgcaacatgtgtgaaacttggaaagagaaagcttcccaaagggaatttgggagaatttttaggaagtttgattctgcttaagtgtgtgtggtgtgtttaataattgtcacatttattccttacctcccagtgacattattatmatgacctcctggaattcagttagcttggcaatcagagcttggcgggttctcaacatccatcagctttgttcttcctataagtgtttttaagcacactctgttgaatctttttcccgtccccttggccacaacttgagcgaattgcacaaatttctggttgcttttctttatgaaaagtccaatctggtgtaaggctttaatcaaacatcctattttaaattctttgtctccaccatcatcagctttggggccctataactgtctagtggaaaggagacctgtgctttctttcactccttccctgcagtgtgggatgggaccatggtctcattccggattctcctcctcaccatgtttccaagtttgttcctctatgagggcagagacgagggagagggtcctaggagatgtccttatctaatcatcagatttctgtagcatcctagtctcgtggggtccatctcattctgagaggtgaagccagctggacttcctgggtcgagtggggacttgaagagcttttctgtagctagctagaggtttgtaaaatgcaccaatcagtgctctgtaaaaacgcaccaatcagcactctgtagctagctagaggtttgtaaaattcaccaatcagtgttctgtaaaaacgcatcaatcagcgctctgtagctagctagaggtttgtaaaattcaccaatcagtgttctgtaaaaacacatcaatcggggctctgtagctagctagaggtttgtaaaatggaccaatcagcacactgtaaaatggaccaatcagcactctgtaaaatggaccaatcagcaggacatgggcagggacaaataagggaataaaagctggccaccccagccagcagcggtaacacgtttgggtcctcttgcatggtgtggaagctttgttctttcgttcttcacaataaatcttgctgccacacactctttgggtctgtgccacctttaagagctgtaatgctcaccccaaaggtccgctgccccattcttgaagtcagtgagaccacgaacccaccagaaggaaccaactccagacacaattttatctgtttctatttggtctccagaaatgtggtggcacctgtggagatgtgagcaaggccttcctgggataatgtgcaagttcactacagcctcttttgtcactaacatcctgtttgtttccctttggacctgtcggtggtccataccgtcaacccttcctgaagggtatggctgtgcatgcctggctcagtcccgagcatatcctcagcatctgcctactcttctaacttagatgatcctctacaggatcgatagggtttggctgtgtcctcactcaaatctcatcttgagttgtagcttccataattcccacatgtcctgggagggatctggtgggaggtaattgaatc

SEQ ID NO: 667543 - DNA, 511 bp, Homo sapiens
tgctatgtgatcttaaaaattatgtgccagagaatgtttagtgacatagataaagcaattatgcaattgctctgaccagagaaagagactagacacttcaatatggcagcttgagatcacatgtttcccttccctgacttcccaaattccctggaaaccataaacatgggacctatggtgacgcaagaactagacagagtgaggtggccctcctgggtcccacctgtgtctcagtgggtggtgacgacatttgcccgaacactggaactagaaagatgtttactgaagacactgacccatcttmcagagggagatccagggatcgtagtgggctgttttttcccttcaggatagccctactcatgttggcgttgggaagggattgaccagtctccctctaagctccactcctacacattctaaagcaaagcctcacagatgacacccccaacacacacacaccccacaaacatccctccaattcagaagggaggtctggtggggaaacaga

SEQ ID NO: 667544 - DNA, 511 bp, Homo sapiens
tgctatgtgatcttaaaaattatgtgccagagaatgtttagtgacatagataaagcaattatgcaattgctctgaccagagaaagagactagacacttcaatatggcagcttgagatcacatgtttcccttccctgacttcccaaattccctggaaaccataaacatgggacctatggtgacgcaagaactagacagagtgaggtggccctcctgggtcccacctgtgtctcagtgggtggtgacgacatttgcccgaacactggaactagaaagatgtttactgaagacactgacccatcttacagagggagatccagggatcgtagtgggstgttttttcccttcaggatagccctactcatgttggcgttgggaagggattgaccagtctccctctaagctccactcctacacattctaaagcaaagcctcacagatgacacccccaacacacacacaccccacaaacatccctccaattcagaagggaggtctggtggggaaacaga

SEQ ID NO: 667545 - DNA, 1421 bp, Homo sapiens
tgcattggttaacttttcttgagagttaagactggactaggcaacaccaaaaaatgaaataatcgatcaaattttaattactgtcatcatacatagattatatgtatttattttttaattaccatgtttaagagtgcaatcttggaggaataccaccagaagttgaaaaatgttttctcggctaggtgcagtggctcatgcctgtaatcccagcactttgggaggccgaggtgggcrgatcacgaggtcaggagttcgagaccagcctgaccaacatggtgaaaccccatcgctactaaaaatacaaaaattagctgggcctggtggcgcacgcctgtaatcccagctactcgggaggctgaggcaggagaatcgcatgaacccgggaggcggaggttgcagtgagctgagatcgcaccattgcactccagcctgggcaacagagtgagactccatctcaaaaacaaatacataaataaataaataaaataaagtttagaaaaatgttttctctaagacaaaggaaaatgtccagattactggactgtttctgttgatgtggtgacccaactgggtaataaaaaataattaaaataggatgctaatacatgtgatgggttacctctgggaagtctctgcccaatctgtcttttcagtagactggatatcagtaacagaaaggtattccaacacattctgacctgcaggactacaagcagagaggttttgacttctctctcaggtatctgagggaaactgactataaacaataatcagacttctgggattagaagacaggtctttcactgagttgtggcctcctctgtatgccttcagtaatcattgatatgataataaatcaggtatgtagaaaaggtgatggtaagacatattttaacaaaggaaatttccaagactcaagatatgttgaaatttccatcaaatctaatctttgtttaagaggcccctttttaccaagtgacatctagatatcggtggatggaaagacagggaacaatgttgtgtaatggcagaagaaatgagtacctacagaaatcagatcgctcagcctacatctaagtgaaaaggctgcaaagatttggagtaataatgtgttttggcttttcctctcatcatgaaaaaagataaattcaggaaagaattagcctatttacatgaagaaatgaaagtaaatacaaataataatttaggtatttaaaaggttggaaaacctgattgcctttatagtgcagaggtataaaataaaacagaaggcactttaaatgataaagatattaatattcaccctcagacatgaatattttcttctcacctgatgcaattatttctaatagactcgagggagctgccattaaattgagagaaaaaccaagaggtcatggaacaaaagaaataaaaaa

SEQ ID NO: 667546 - DNA, 1421 bp, Homo sapiens
tgcattggttaacttttcttgagagttaagactggactaggcaacaccaaaaaatgaaataatcgatcaaattttaattactgtcatcatacatagattatatgtatttattttttaattaccatgtttaagagtgcaatcttggaggaataccaccagaagttgaaaaatgttttctcggctaggtgcagtggctcatgcctgtaatcccagcactttgggaggccgaggtgggcggatcacgargtcaggagttcgagaccagcctgaccaacatggtgaaaccccatcgctactaaaaatacaaaaattagctgggcctggtggcgcacgcctgtaatcccagctactcgggaggctgaggcaggagaatcgcatgaacccgggaggcggaggttgcagtgagctgagatcgcaccattgcactccagcctgggcaacagagtgagactccatctcaaaaacaaatacataaataaataaataaaataaagtttagaaaaatgttttctctaagacaaaggaaaatgtccagattactggactgtttctgttgatgtggtgacccaactgggtaataaaaaataattaaaataggatgctaatacatgtgatgggttacctctgggaagtctctgcccaatctgtcttttcagtagactggatatcagtaacagaaaggtattccaacacattctgacctgcaggactacaagcagagaggttttgacttctctctcaggtatctgagggaaactgactataaacaataatcagacttctgggattagaagacaggtctttcactgagttgtggcctcctctgtatgccttcagtaatcattgatatgataataaatcaggtatgtagaaaaggtgatggtaagacatattttaacaaaggaaatttccaagactcaagatatgttgaaatttccatcaaatctaatctttgtttaagaggcccctttttaccaagtgacatctagatatcggtggatggaaagacagggaacaatgttgtgtaatggcagaagaaatgagtacctacagaaatcagatcgctcagcctacatctaagtgaaaaggctgcaaagatttggagtaataatgtgttttggcttttcctctcatcatgaaaaaagataaattcaggaaagaattagcctatttacatgaagaaatgaaagtaaatacaaataataatttaggtatttaaaaggttggaaaacctgattgcctttatagtgcagaggtataaaataaaacagaaggcactttaaatgataaagatattaatattcaccctcagacatgaatattttcttctcacctgatgcaattatttctaatagactcgagggagctgccattaaattgagagaaaaaccaagaggtcatggaacaaaagaaataaaaaa

SEQ ID NO: 667547 - DNA, 1421 bp, Homo sapiens
tgcattggttaacttttcttgagagttaagactggactaggcaacaccaaaaaatgaaataatcgatcaaattttaattactgtcatcatacatagattatatgtatttattttttaattaccatgtttaagagtgcaatcttggaggaataccaccagaagttgaaaaatgttttctcggctaggtgcagtggctcatgcctgtaatcccagcactttgggaggccgaggtgggcggatcacgaggtcaggagttcgagaccagcctgaccaacatggtgaaaccccatcgctactaaaaatacaaaaattagctgggcctggtggcgcacgcctgtaatcccagctactcgggaggctgaggcaggagaatcgcatgaacccgggaggcggaggttgcagtgagctgagatcgcaccattgcactccagcctgggcaacagagtgagactccatctcaaaaacaaatacataaataaataaataaaataaagtttagaaaaatgttttctctaagacaaaggaaaatgtccagattactggactgtttctgttgatgtggtgacccaactgggtaataaaaaataattaaaataggatgctaatacatgtgatgggttacctctgggaagtctctgcccaatctgtcttttcagtagactggatatcagtaacagaaaggtattccaacacattctgacctgcaggactacaagcagagaggttttgacttctctctcaggtatctgagggaaactgactataaacaataatcagacttctgggattagaagacaggtctttcactgagttgtggcctcctctgtatgccttcagtaatcattgatatgataataaatcaggtatgtagaaaaggtgatggtaagacatattttaacaaaggaaatttccaagactcaagatatgttgaaatttccatcaaatctaatctttgtttaagaggcccctttttaccaagtgayatctagatatcggtggatggaaagacagggaacaatgttgtgtaatggcagaagaaatgagtacctacagaaatcagatcgctcagcctacatctaagtgaaaaggctgcaaagatttggagtaataatgtgttttggcttttcctctcatcatgaaaaaagataaattcaggaaagaattagcctatttacatgaagaaatgaaagtaaatacaaataataatttaggtatttaaaaggttggaaaacctgattgcctttatagtgcagaggtataaaataaaacagaaggcactttaaatgataaagatattaatattcaccctcagacatgaatattttcttctcacctgatgcaattatttctaatagactcgagggagctgccattaaattgagagaaaaaccaagaggtcatggaacaaaagaaataaaaaa

SEQ ID NO: 667548 - DNA, 1421 bp, Homo sapiens
tgcattggttaacttttcttgagagttaagactggactaggcaacaccaaaaaatgaaataatcgatcaaattttaattactgtcatcatacatagattatatgtatttattttttaattaccatgtttaagagtgcaatcttggaggaataccaccagaagttgaaaaatgttttctcggctaggtgcagtggctcatgcctgtaatcccagcactttgggaggccgaggtgggcggatcacgaggtcaggagttcgagaccagcctgaccaacatggtgaaaccccatcgctactaaaaatacaaaaattagctgggcctggtggcgcacgcctgtaatcccagctactcgggaggctgaggcaggagaatcgcatgaacccgggaggcggaggttgcagtgagctgagatcgcaccattgcactccagcctgggcaacagagtgagactccatctcaaaaacaaatacataaataaataaataaaataaagtttagaaaaatgttttctctaagacaaaggaaaatgtccagattactggactgtttctgttgatgtggtgacccaactgggtaataaaaaataattaaaataggatgctaatacatgtgatgggttacctctgggaagtctctgcccaatctgtcttttcagtagactggatatcagtaacagaaaggtattccaacacattctgacctgcaggactacaagcagagaggttttgacttctctctcaggtatctgagggaaactgactataaacaataatcagacttctgggattagaagacaggtctttcactgagttgtggcctcctctgtatgccttcagtaatcattgatatgataataaatcaggtatgtagaaaaggtgatggtaagacatattttaacaaaggaaatttccaagactcaagatatgttgaaatttccatcaaatctaatctttgtttaagaggcccctttttaccaagtgacatctagatatcggtggatggaaagacagggaacaatgttgtgtaatggcagaagaaatgagtacctacagaaatcagatcgctcagcctacatctaagtgaaaaggctgcaaagatttggagtaataatgtgttttggcttttcctctcatcatgaaaaaagataaattcaggaaagaattagcctatttacatgaagaaatgaaagtaaatacaaataataatttaggtatytaaaaggttggaaaacctgattgcctttatagtgcagaggtataaaataaaacagaaggcactttaaatgataaagatattaatattcaccctcagacatgaatattttcttctcacctgatgcaattatttctaatagactcgagggagctgccattaaattgagagaaaaaccaagaggtcatggaacaaaagaaataaaaaa

SEQ ID NO: 667549 - DNA, 622 bp, Homo sapiens
gacatatataaagaaatactgtcagggatattaatgatacttgatgccatcctgagagctttaaaagcaggcactgctatraatctttcctatgtatacaaatttttaatcttatctttttaaaaactcttcactgctggtcacaatatagctgcatcttcgtagttgaaccattattataaaagtgcaaaatgataaatatcaatttttgatacatttttgaccatgtagggaaagtttctagaaccacttatttcattctaaaaaagtgagatgatacaggcaaatatatccccttgttcagcctaataataaacatctccatttagactgaaataaatgtagttacataaattattattggttttatgcatcaaagaaattgctgatgtagactattattttaatagaaatagttttcaggccacaattaatttcaattatgattatctgtagcagcaacattgtgatatagatttaaagacaatccacgccaaaactgctgaagctattcctggaataaacacagcaatgtaaattattttgagagagtcctattccacttagcaatcaaagaaagatgtacaatggccaccgtgtatctgaaatcctattttatata

SEQ ID NO: 667550 - DNA, 612 bp, Homo sapiens
acttgggcactggcatgttgaaatgctgcggtttccaagccaaagggcttttctctcccggcaggcctttccagcttcctcggctgcgcggttcttcctttgtggcaggaaggctgggacttayggtggggttaattctgatcgtgtatcactggaacattctttcattcatgtgctagtgttcacagctcactgttgcttcaaagaagctcagtgcgtgagtatttgatattttctttatcgagatgctcagttctctgagtcgctagagcgtctccctttacatccaaattccagccccaccacagttctctccctcttcacagccactgccctctcatctgtcagtcactcagctctcatcagagtaaaagaacagccctggggctgccacaaaaagggctcttcactggagcccagccagcagatcccaactccaagtccctggaattagactcagctcagtggccaggctaagccccagcttgtgccggtgacaaatgagcgctgggcagagcaggccaggagggctccactgttgcttgaaagaaactccgatgaggtgagaatgatggaaaagcaaaagaatgccgtgcaatgcgtgtgtgcata

SEQ ID NO: 667551 - DNA, 676 bp, Homo sapiens
agaccaaagggtccactttacagcaagaaaaacatagaggcgggcacacagccatggcatccactggtcctaccatgtgccacaccacacaggaactgctgggggataagcaatgggatagcctattgaagacatagctgaagaaccagcttagagatgacactctgcaaagagagtggcaccctttaaaatgtggtatacactttgaacaaagggccattatatgatgctcggtccccaagaggcagaatgcttgggtcaggagagtggaggctagccactgaaaccaatggaagtgccagcctcaccaagagacagggagattctgaaagcctgatggagaaggtggatgatgagtatgaggcatggcttcaggagtggcaacagtggagggctatggtttgtccctatttctcttcttrtgagtttccccagaaatggtgatcaaccagaagcctggagaagctgtgtgccaaggaggagtacttgaaatatatatacgctggtgattctgatctccaaggataaagttaaaattcccaagaacttttataaaagtaaaagttcaggttaccttaaaaagaataaaaatctgactgccatcaaactgctcatttgcaacatggtattctggaaataataaaactttgtcttccaactttttatggaaaattat

SEQ ID NO: 667552 - DNA, 640 bp, Homo sapiens
tgtagacatgctcatcagccaggagagctgtgagaaaaatgattctttgctaacatccgtagattttcaggaatgtaaagaaaacctgccaagtattcaggtgagcccagcccttcctttatttccatgaggaatttatttgcatgatatttctctattattttgcaaaacaaatgttttgaaaatagggatttaaaaaactttatagargtaaaaatgagtttaccagtttccttcagtggtgacactttaatatagaacacataggatatagtatttctttagtgaaagcctatggacaagattatgaatatgtggactatcacattttataatttccacctactttccaatctatgttccaacctactttcttaactcatatattttatacattggaatgaatcgagtctttcatattgcacaaggttagcaggaataaaacacacctcagctgtcttctcaggattctctttagcattcaaatatgtaaaaggttctgaaagatttcttccatgtgaagatttttttctgtggctgattctgcctccatgtacctcagcttggtggtcctaaaaaatcttgattgcttcttgacctatttacagtataatcatttattaatggggtggtagtagaa

SEQ ID NO: 667553 - DNA, 1497 bp, Homo sapiens
ttcttgaaattcattcatgttcctgtgtgtatcagcagcgtgttccatttgattgttgagcagtattgcattgtgtggatatatcacaatgtgttcattcattcaactgttggtggacatttgagttgtgtccagtttagtgctattctgaattaaagtgatgtgaacaatcatgtacaagtatttttgtaggcatattttttttatttctcttggataaataccccaaaacagaattgttttgggggtcatatgaaatgggaagtatatgcttaactttataagaagctgccaaactatttttcaaaatggtaatatcactttacattttcatgagcaatgcataaagcgttccgcttgctacattttctcaccaatgcttcctattgtcaattttttaaattttagcaattctagtgggtgtgtgatactatctcattgaagtttcaactgtttttccctgttgactagagacactgagcaacttttcatgtgttgtctatttgtatatcttcttgaagcattcgttcatctttaactgagctgaacgccttcttaaaattgagctatgggagttttaaaatatatccttgtagctgggcgtgatggcaggtgcctgtaatcccagctactcaggaggctgagacaggagaatcgcttgaacccaggaggcggaggttgcagtgagccgagactgcaccactgcactccagcctgggcaacagagtgagacttcatctaaaaaataataattatacatgtaattatatatgatttttatatatgtaatatatatattcttgatgtgagctctttgtcacatacatattttgtggatattttatcccagactatgacttgtcttttcattttcttagttgtgtcttttgaagagcagaagatgtaattttgataaagcccaatttattttttcttttatagtttgtatttcttatgtcctattcaaaaactccttgcctactgaaaacttatgatgattttctcctatattttyttttagaagttttatagttttaccatttataatttggtctatgaatccttttgagttgatgtttatgtatggtgtatggtgtgaggtaacaatgaagattcatatttttttccaaaggaatatccaattgtctctttggaaaaatatgctgagaaggctatcttttccccaccaaataatcttagcaccttaatcaaaaatcatttggccatggacatatgtaggtgtgggttttttctgggctctctgtgttagatggatagatagacagatacagatatataactgtgtttacacatatgtaactgtaaacacagttatatatctatatatccaccaacagttgaatgagaataaactattgttataagcatatatacacattgtatatatatgtgtacatatacatattgcatatgtatgtatacatatatacacacaaagtatatatatgtatgtatacatatatacacacttaaagt

SEQ ID NO: 667554 - DNA, 1497 bp, Homo sapiens
ttcttgaaattcattcatgttcctgtgtgtatcagcagcgtgttccatttgattgttgagcagtattgcattgtgtggatatatcacaatgtgttcattcattcaactgttggtggacatttgagttgtgtccagtttagtgctattctgaattaaagtgatgtgaacaatcatgtacaagtatttttgtaggcatattttttttatttctcttggataaataccccaaaacagaattgttttgggggtcatatgaaatgggaagtatatgcttaactttataagaagctgccaaactatttttcaaaatggtaatatcactttacattttcatgagcaatgcataaagcgttccgcttgctacattttctcaccaatgcttcctattgtcaattttttaaattttagcaattctagtgggtgtgtgatactatctcattgaagtttcaactgtttttccctgttgactagagacactgagcaacttttcatgtgttgtctatttgtatatcttcttgaagcattcgttcatctttaactgagctgaacgccttcttaaaattgagctatgggagttttaaaatatatccttgtagctgggcgtgatggcaggtgcctgtaatcccagctactcaggaggctgagacaggagaatcgcttgaacccaggaggcggaggttgcagtgagccgagactgcaccactgcactccagcctgggcaacagagtgagacttcatctaaaaaataataattatacatgtaattatatatgatttttatatatgtaatatatatattcttgatgtgagctctttgtcacatacatattttgtggatattttatcccagactatgacttgtcttttcattttcttagttgtgtcttttgaagagcagaagatgtaattttgataaagcccaatttattttttcttttatagtttgtatttcttatgtcctattcaaaaactccttgcctactgaaaacttatgatgattttctcctatattttcttttaraagttttatagttttaccatttataatttggtctatgaatccttttgagttgatgtttatgtatggtgtatggtgtgaggtaacaatgaagattcatatttttttccaaaggaatatccaattgtctctttggaaaaatatgctgagaaggctatcttttccccaccaaataatcttagcaccttaatcaaaaatcatttggccatggacatatgtaggtgtgggttttttctgggctctctgtgttagatggatagatagacagatacagatatataactgtgtttacacatatgtaactgtaaacacagttatatatctatatatccaccaacagttgaatgagaataaactattgttataagcatatatacacattgtatatatatgtgtacatatacatattgcatatgtatgtatacatatatacacacaaagtatatatatgtatgtatacatatatacacacttaaagt

SEQ ID NO: 667555 - DNA, 576 bp, Homo sapiens
tggcccctcccctgtccccggctgacccatccctaccctttggccccctcagggacccagacagcgtggtcctctgcctcttggccattgacgaggaggaggaggatgacatcgccctgcaaatccacttcacgctcatccagtccttctgctgtgacaacgacatcaacatcgtgcgggtgtcgggcatgcagcgcctggcgcagctcctgggagagccggccgagacccagggcaccaccgaggcccgagacctgcattgtctcctggtcacggtgagtcgggcctctgccctgccccgcyacgcccgggcacctgggccggtgtttgtcaacaaagtcgggctgactggtcctgcacagctcagcgctcagccacgtttggcatgtcccgtgggcagccgggctggggcctcctcacccaggaagctattttgagcctgactgttttccccacacaggggccccgggagagggaggctccactaaaccccttcttttccctcctacagaaccctcacacggacgcctggaagagccacggcttggtggaggtggccagctactgcgaagaaag

SEQ ID NO: 667556 - DNA, 1247 bp, Homo sapiens
aatattagcgggatatggctggccagctagtcaggtcccagctacatgagaggctgaggcaggaggatcccttgagcctacgagatcgaggctgcagtgagctgtgatagtgccaccactacactccagcctgggcaacagagtgagacttcatctcaaaaaaccaaaccaaaacaaaattaaaaaacaactactactaaacaaacccccactgaaataaagccatttcaagtcttctatttgctcagctcagttgagccttgatgtcccacatgctgttgctgggcagaacactttgatttactttcatcctcccagctcagaaaacattcttaggcccatacgagccatgcctgatgaccarcatgcaattataaatgctaagattgtaaaaataggaggggctttttcgctcaggagtttcccctttctccttccaggccagtcgctcaatttcttttttttttttttttttttgagacagagtttcgctctatcgcccaggctggagtgcagtggtgtgatctcggctcactgcaagctccacctcccaggttcataccattctcctgactcagcctcctgagtagctgggactacaggtgcccaccaccatgcccggctaatttttgtatttttagtttcactgtgttagccaggatggtctcgatctcctgacctcgtgagccgcctgccttggcctcccaaagtgctaggattataggcatgagccactgcacccggcccagtcactcaatttcttaatgtatagtttccataagtaagtagtgtcccagccaggcgcggtggctcatgcctgtaattccagcaatttgggaggccgaggcaggcagatcatctgaggtcaggagttcgagaccagcgtgggcaacatggagaaactcccactctacttaaaatacaaaaattagctgggcatggtggcatgtgcctgttgtcccagctatctaggaggcttaggcaggaggatggcttgaacccaggaggtggaggttgcagtgagctgagattgcaccactgcactccagcctgggcgacagagtgagactccacctcaaaaaaaaataaaaaaaaaagggaagtgtccttatgaagccatccagtcagacttttccaagcacagaaatgcaacacacagacacacagagcaagacactagtcagggctcaaatcctggcaccaccattgggcagcagaatgactttcaggaagtgacttaacttctg

SEQ ID NO: 667557 - DNA, 1247 bp, Homo sapiens
aatattagcgggatatggctggccagctagtcaggtcccagctacatgagaggctgaggcaggaggatcccttgagcctacgagatcgaggctgcagtgagctgtgatagtgccaccactacactccagcctgggcaacagagtgagacttcatctcaaaaaaccaaaccaaaacaaaattaaaaaacaactactactaaacaaacccccactgaaataaagccatttcaagtcttctatttgctcagctcagttgagccttgatgtcccacatgctgttgctgggcagaacactttgatttactttcatcctcccagctcagaaaacattcttaggcccatacgagccatgcctgatgaccagcatgcaattataaatgctaagattgtaaaaataggaggggctttttygctcaggagtttcccctttctccttccaggccagtcgctcaatttcttttttttttttttttttttgagacagagtttcgctctatcgcccaggctggagtgcagtggtgtgatctcggctcactgcaagctccacctcccaggttcataccattctcctgactcagcctcctgagtagctgggactacaggtgcccaccaccatgcccggctaatttttgtatttttagtttcactgtgttagccaggatggtctcgatctcctgacctcgtgagccgcctgccttggcctcccaaagtgctaggattataggcatgagccactgcacccggcccagtcactcaatttcttaatgtatagtttccataagtaagtagtgtcccagccaggcgcggtggctcatgcctgtaattccagcaatttgggaggccgaggcaggcagatcatctgaggtcaggagttcgagaccagcgtgggcaacatggagaaactcccactctacttaaaatacaaaaattagctgggcatggtggcatgtgcctgttgtcccagctatctaggaggcttaggcaggaggatggcttgaacccaggaggtggaggttgcagtgagctgagattgcaccactgcactccagcctgggcgacagagtgagactccacctcaaaaaaaaataaaaaaaaaagggaagtgtccttatgaagccatccagtcagacttttccaagcacagaaatgcaacacacagacacacagagcaagacactagtcagggctcaaatcctggcaccaccattgggcagcagaatgactttcaggaagtgacttaacttctg

SEQ ID NO: 667558 - DNA, 1247 bp, Homo sapiens
aatattagcgggatatggctggccagctagtcaggtcccagctacatgagaggctgaggcaggaggatcccttgagcctacgagatcgaggctgcagtgagctgtgatagtgccaccactacactccagcctgggcaacagagtgagacttcatctcaaaaaaccaaaccaaaacaaaattaaaaaacaactactactaaacaaacccccactgaaataaagccatttcaagtcttctatttgctcagctcagttgagccttgatgtcccacatgctgttgctgggcagaacactttgatttactttcatcctcccagctcagaaaacattcttaggcccatacgagccatgcctgatgaccagcatgcaattataaatgctaagattgtaaaaataggaggggctttttcgctcaggagtttcccctttctccttccaggccagtcrctcaatttcttttttttttttttttttttgagacagagtttcgctctatcgcccaggctggagtgcagtggtgtgatctcggctcactgcaagctccacctcccaggttcataccattctcctgactcagcctcctgagtagctgggactacaggtgcccaccaccatgcccggctaatttttgtatttttagtttcactgtgttagccaggatggtctcgatctcctgacctcgtgagccgcctgccttggcctcccaaagtgctaggattataggcatgagccactgcacccggcccagtcactcaatttcttaatgtatagtttccataagtaagtagtgtcccagccaggcgcggtggctcatgcctgtaattccagcaatttgggaggccgaggcaggcagatcatctgaggtcaggagttcgagaccagcgtgggcaacatggagaaactcccactctacttaaaatacaaaaattagctgggcatggtggcatgtgcctgttgtcccagctatctaggaggcttaggcaggaggatggcttgaacccaggaggtggaggttgcagtgagctgagattgcaccactgcactccagcctgggcgacagagtgagactccacctcaaaaaaaaataaaaaaaaaagggaagtgtccttatgaagccatccagtcagacttttccaagcacagaaatgcaacacacagacacacagagcaagacactagtcagggctcaaatcctggcaccaccattgggcagcagaatgactttcaggaagtgacttaacttctg

SEQ ID NO: 667559 - DNA, 1247 bp, Homo sapiens
aatattagcgggatatggctggccagctagtcaggtcccagctacatgagaggctgaggcaggaggatcccttgagcctacgagatcgaggctgcagtgagctgtgatagtgccaccactacactccagcctgggcaacagagtgagacttcatctcaaaaaaccaaaccaaaacaaaattaaaaaacaactactactaaacaaacccccactgaaataaagccatttcaagtcttctatttgctcagctcagttgagccttgatgtcccacatgctgttgctgggcagaacactttgatttactttcatcctcccagctcagaaaacattcttaggcccatacgagccatgcctgatgaccagcatgcaattataaatgctaagattgtaaaaataggaggggctttttcgctcaggagtttcccctttctccttccaggccagtcgctcaatttctttkttttttttttttttttgagacagagtttcgctctatcgcccaggctggagtgcagtggtgtgatctcggctcactgcaagctccacctcccaggttcataccattctcctgactcagcctcctgagtagctgggactacaggtgcccaccaccatgcccggctaatttttgtatttttagtttcactgtgttagccaggatggtctcgatctcctgacctcgtgagccgcctgccttggcctcccaaagtgctaggattataggcatgagccactgcacccggcccagtcactcaatttcttaatgtatagtttccataagtaagtagtgtcccagccaggcgcggtggctcatgcctgtaattccagcaatttgggaggccgaggcaggcagatcatctgaggtcaggagttcgagaccagcgtgggcaacatggagaaactcccactctacttaaaatacaaaaattagctgggcatggtggcatgtgcctgttgtcccagctatctaggaggcttaggcaggaggatggcttgaacccaggaggtggaggttgcagtgagctgagattgcaccactgcactccagcctgggcgacagagtgagactccacctcaaaaaaaaataaaaaaaaaagggaagtgtccttatgaagccatccagtcagacttttccaagcacagaaatgcaacacacagacacacagagcaagacactagtcagggctcaaatcctggcaccaccattgggcagcagaatgactttcaggaagtgacttaacttctg

SEQ ID NO: 667560 - DNA, 1247 bp, Homo sapiens
aatattagcgggatatggctggccagctagtcaggtcccagctacatgagaggctgaggcaggaggatcccttgagcctacgagatcgaggctgcagtgagctgtgatagtgccaccactacactccagcctgggcaacagagtgagacttcatctcaaaaaaccaaaccaaaacaaaattaaaaaacaactactactaaacaaacccccactgaaataaagccatttcaagtcttctatttgctcagctcagttgagccttgatgtcccacatgctgttgctgggcagaacactttgatttactttcatcctcccagctcagaaaacattcttaggcccatacgagccatgcctgatgaccagcatgcaattataaatgctaagattgtaaaaataggaggggctttttcgctcaggagtttcccctttctccttccaggccagtcgctcaatttcttttttttttttttttttttgagacagagtttcgctctatcgcccaggctggagtgcagtggtgtgatctcggctcactgcaagctccacctcccaggttcataccattctcctgactcagcctcctgagtagctgggactacaggtgcccaccaccatgcccggctaatttttgtatttttagtttcactgtgttagccaggatggtctcgatctcctgacctcgtgagccgcctgccttggcctcccaaagtgctaggattataggcatgagccactgcacccggcccagtcactcaatttcttaatgtatagtttccataagtaagtagtgtcccagccaggcgcggtggctcatgcctgtaattccagcaatttgggaggccgaggcaggcagatcatctgaggtcaggagttcgagaccagcgtgggcaacatggagaaactcccactctacttaaaatacaaaaattagctgggcatggtggcatgtgcctgttgtcccagctatctaggaggcttaggcaggaggatggcttgaacccaggaggtggaggttgcagtgagctgagattgcaccactgcactccagcctgggcgacagagtgagactccacctcaaaaaaaaakaaaaaaaaaagggaagtgtccttatgaagccatccagtcagacttttccaagcacagaaatgcaacacacagacacacagagcaagacactagtcagggctcaaatcctggcaccaccattgggcagcagaatgactttcaggaagtgacttaacttctg

SEQ ID NO: 667561 - DNA, 2854 bp, Homo sapiens
tgcaatgacaagaactaaacactagccactaccaccagggttactcctggttcagggctgaatacagtgagtaagtgggaggtgctggcagagggggtagatattactttgtaatatctgttccctagacactcagttatcttggcctcagagctattccctggctcatgcaaaatctgttaacaggccaagaacactgttaaaatattttggtaacttctgtgggaggagttaccaaaatctgttaacagtattcattgcatttccacaggtccactgggcaatgatcagcaattctgacttcaagatccaatcacccagtgaaagctacaagagaactcagtacaaggtagtattcccttttctctctcagtctctacacccagctttggtcatgactgtaattatcacttttataatacacaattcatgtaaatggggtgtttaattgcagaaatttgactgagagtacccatatgtttcaagccatattcccttccaagtctctgatctagaataactatattgttaccattaaagtgtgacccatatgggtattgtccagaggcaggacatgaattttccaggctgacagagggataatggtggggacagagctttgtgttttttatagtgctgtttccctgaggaactaaaatgactattatgagtagatgtggcttttgtccacactggctccccactcagtctcacataagaagggaggaaattgaggtacaagtgcctgaaagtgggacgtttgtgacccaagtcacaaactctgttgtttgagtggcaggaaaggcttagtcctccaggttttcttctaccccaggtagaaccatgtaaagaccctgaggccatgtttagtgttccaaacaaattagttctgaacccaaactaattgggttcacatcctggtactgccacatactagctatgtgaccttgtgccaattccatgattttcctgtgcctgtctcctgccctagataaatgggaatgacagttgcacccacctcaaggtgttatgaggctagatgagtttctgcatgtcaagccctcagagaagtgcctggcaagcagacagtgctcagctgaggagggtgagtaatgttcgtattgctggtgttgttattcttctcattactgtattactggtaaaacagaggatgccaaggaagcctaagggactagacaatagatgtcttcacctcttcactttcccaatgcaaggagaacctcttaaagtcacagacagggttgacaattttccctggctacgtctgttctctttccttgaactccattgacaggttcattgtctatgtttttgtgggtttttggttttggatgacttccctctgaccacgctccttgtgtaacaattcctttggaagaaataggtgagacaatgactgtaggtcaacttgccttagtgttgcctgtccatgtctcaaatctgtacctctgaagaatcttgtttcatttaaataccactgacagaattggcttgcacacatattctcatgcttttttgtggaaatacactcaaaaatgacacttatacaactgatagtcccaactcctttcttacagtcctccaacttacatttctataccagaacttccatcatcactatgctgtaaattcttctagaccttgttttctgcatttacttttatatatggctccatgaagaaacaaaaataggatgataaaatgcataatgttttgcaagtttctttcttcaattaccactttttagagatatttttcatgcctttttaaaaattatttatttatttatttattgagacggagtcttactctgtagcccaagctggagtgcagtggtatgatcttggctcactgcaaccgctgcctcttaggctcaagtgatgcatcagcctcccgagtacctgggactacaggcacatgtcaccatgcccagctaattttttgtattttagtagagatggggtttcaccattttttccagggtgttctcaaacgcctgagcccaggctatctgcctgtctcggcctcccaaagtgctgtcatgcctttaaatagagaaccccatcatctttttcaatggctgctttttatttcacattattgatataacaatctattaacaataggaattcagaaaaattgcctctgtcaaccaaggaaatcacccagtttgacaaaaatgtaaggtagacacaagctaaacacataaaagaagatattgtatgctcctctaagaataaattatgaaataataggaataatatatccagttcacactggccatcagatatacctgaatatgatttttttaaatactgagaattattcatgaaacatttttatatgtttcctgtttgacactattataccattatttctagattgaaaaattaattactatatcatttctgccaccattttaatctgtgaactcagtgcaagcacagtcatgaacctccatatgaatttgacatgaaacaaaatgagctgattattcaattaaaaggacaagaacacatatgggaataaccttgatagggagcttggcctacaagacatgaaaacctacataatagatttagaaattaaaacagggatgaaaattgcctcaataaaacagagcagattctagatacagacccgtgtgtatgacagaatgaaagaaatagtatcgttggcaytttaaatcagatcatggcccaaagcaatctcttatgactgctgctggtagcagagtgtgttagtatgtgtctgtgtgggtatgggtgtgcgtgtgtgggggtgatgtgatagggatgtgatagtggacagtgaggaaaagacccctgggtcc

SEQ ID NO: 667562 - DNA, 1504 bp, Homo sapiens
tctgtgcaccataagttgtttagcaacatctttggcctctacccagaagacggcaggagcacctgacacccagttgtgacaaccaaaaatgtctccagacattgccaaatatctgtgggggtgcagggtgcaaagttccctcatttaagaaccactgacctagggtgaaccgtggttccactacttacttttcacatgaccttggacaaacaaccttgtcctcaaggtcctctgtgcccccatgtcctcacctgtaaaatggaaaaataataacatgtgaggttaatgtgaggaataaataagaatccaggaaagcaattggcccatcatgtaagagctactttgcccataaccctagggtgccttccctccaaacacaaagctgtgcacagaggaggtacacagtgaagatctgctgttgtatagctgtggggatgaatcaattaaccatttcagtaacaaatgaacaaaaaactgaatgtcctgatctgtgcactagtgcatttgctgactgaagatgtcctggcatcctctctcaccatcaaagagcagttaggattaaagactccacagccaggctacctgggttcaagttgagctctgccactcaggagttatgtgaccacaggctggttatttagcctgccaatgccttcatttccttatctgtaaaatggggtaataaaagtgcttacctcacagggcaatgagagtgaaatgaattaatacatgtattgtacccagcacaggctgggtctccatcatgcctgctgcaattgctgctacagcaattaacattaatcctatcacactcctcttttatagccctccagccacactcctctgagggtgccaagaacaatcccatttccaagcctttgcacttgccactccctctgcctggattgctctccttcccagacattagcagccctccaatccttacttcatcaaggtctctcttcatgtggctctttggaaagtcctcccctgaccaccataaataaaacagcagcttcaccaccctactcaccctgggctttttgcaacatagcaattacccctgcctggcattatctatcctggtcagtacagcacagtgcaatgcagtgcagtatagtacagatctctttattggcttatctctcccmcagctcacataaatgttccaagagagcagagaatttgattgacaactatattcccagcatctagaacaatgcctagagcatagtacgtaattataatgaatggtgagtgatattttacagaaggaaattccaaagtcctcacataacccattttccataacacagaacttatttaaactggagcctagaacagtgtttttcacaaaagattttgcttatagcaacccatgctttagaacagaatattgtaaagacttccagatcagttagatttgagtttctcaagtagtgactgtggactccagtgaaacagtaacaggaattccaccaaacaaggttcacaaagtgaatgg

SEQ ID NO: 667563 - DNA, 1504 bp, Homo sapiens
tctgtgcaccataagttgtttagcaacatctttggcctctacccagaagacggcaggagcacctgacacccagttgtgacaaccaaaaatgtctccagacattgccaaatatctgtgggggtgcagggtgcaaagttccctcatttaagaaccactgacctagggtgaaccgtggttccactacttacttttcacatgaccttggacaaacaaccttgtcctcaaggtcctctgtgcccccatgtcctcacctgtaaaatggaaaaataataacatgtgaggttaatgtgaggaataaataagaatccaggaaagcaattggcccatcatgtaagagctactttgcccataaccctagggtgccttccctccaaacacaaagctgtgcacagaggaggtacacagtgaagatctgctgttgtatagctgtggggatgaatcaattaaccatttcagtaacaaatgaacaaaaaactgaatgtcctgatctgtgcactagtgcatttgctgactgaagatgtcctggcatcctctctcaccatcaaagagcagttaggattaaagactccacagccaggctacctgggttcaagttgagctctgccactcaggagttatgtgaccacaggctggttatttagcctgccaatgccttcatttccttatctgtaaaatggggtaataaaagtgcttacctcacagggcaatgagagtgaaatgaattaatacatgtattgtacccagcacaggctgggtctccatcatgcctgctgcaattgctgctacagcaattaacattaatcctatcacactcctcttttatagccctccagccacactcctctgagggtgccaagaacaatcccatttccaagcctttgcacttgccactccctctgcctggattgctctccttcccagacattagcagccctccaatccttacttcatcaaggtctctcttcatgtggctctttggaaagtcctcccctgaccaccataaataaaacagcagcttcaccaccctactcaccctgggctttttgcaacatagcaattacccctgcctggcattatctatcctggtcagtacagcacagtgcaatgcagtgcagtatagtacagatctctttattggcttatctctcccacagctcacataaatgttccaagagagcagagaatttgattgacaactatattcccagcatctagaacaatgcctagagcatagtacgtaattataatgaatggtgagtgatattttacagaaggaaattccaaagtcctcacataacccattttccataacacagaacttatttaaactggagcctagaacagtgtttttcacaaaagattttgcttatagcaacccrtgctttagaacagaatattgtaaagacttccagatcagttagatttgagtttctcaagtagtgactgtggactccagtgaaacagtaacaggaattccaccaaacaaggttcacaaagtgaatgg

SEQ ID NO: 667564 - DNA, 608 bp, Homo sapiens
agttgcaagtgacaggcaatttgattcacagtgtcttcagtcttaacaatgtttaattatctcatgagaattccggaggttggctgcttggggttggcctggcagctgaaccatgtcatcaggcatccaggcactgttcatcttgtcacttgggtsgtgtggtgtttgttgtgacatggtcatgagatggctgcagctgcaccaggcatcacatctgggttcaagacagaaagcagtggggaagggctggtgccagacaatgtctctcatgtgggcacccctcactgcaagggaggctggggaagtagagggtttgcttcccagcctctctgatggaaggtagcaagggagaggaaggtgtacagtcactcacccatctgtctgcatcagcaaggaatgactggaagttcaccaggttatcaaggcggggaaaagcatttcaggcagagacacacaatatgtgaagacacagaggcaaaagacaccatggcatgttttgagagcaccaagtagtttggcataaattccatgtgtgttaagcagagtagcagaatgggaaataggagagagggcccaggtaggtggactctggcttgagcagggcttcc

SEQ ID NO: 667565 - DNA, 608 bp, Homo sapiens
agttgcaagtgacaggcaatttgattcacagtgtcttcagtcttaacaatgtttaattatctcatgagaattccggaggttggctgcttggggttggcctggcagctgaaccatgtcatcaggcatccaggcactgttcatcttgtcacttgggtggtgtggtgtttgttgygacatggtcatgagatggctgcagctgcaccaggcatcacatctgggttcaagacagaaagcagtggggaagggctggtgccagacaatgtctctcatgtgggcacccctcactgcaagggaggctggggaagtagagggtttgcttcccagcctctctgatggaaggtagcaagggagaggaaggtgtacagtcactcacccatctgtctgcatcagcaaggaatgactggaagttcaccaggttatcaaggcggggaaaagcatttcaggcagagacacacaatatgtgaagacacagaggcaaaagacaccatggcatgttttgagagcaccaagtagtttggcataaattccatgtgtgttaagcagagtagcagaatgggaaataggagagagggcccaggtaggtggactctggcttgagcagggcttcc

SEQ ID NO: 667566 - DNA, 625 bp, Homo sapiens
atatcctaaggataaaaagtttttgtttcttttcataggatatttttgtatctggtttggaaggatgacttgacttggattgtactgttaaagacaaaatgaactattgtatttattatgtatttaaccttattaaagcattaagtatgacagcactagttatagagaattgtgtgtgtatgcacacatatacacacatatacatatatacacacaccatatatatattttttttgagacttggtctcgctctgtcatccaggctgaagtgcaggagtgagatcttggctcactgcagcctcgaccttccaaccccagtgatccttccacctcagcctcccaagtasctggggccgtggggatgtgccatcaccaccagctaatttttttatcttttattttttgtagagacggcgtctctcgatgttgcccaggctgacctcgagctcctgggttcaagtgatccacctacctcaacctcccaaaatgctgggattataggcgtgagtcactgggcccggctgagatgtatatattatatatacatctcatatacatatacatatatacataatctcatatataaaaattatacattatatataatatttataatataatatat

SEQ ID NO: 667567 - DNA, 635 bp, Homo sapiens
tggtctcgcactcctgagctcaagtgatccactcacctcagcctcccaaagggttgggattacaggcataagccactgcacccggccataaattttgttttttaataacatttccagcaaacatgataaagatttgacttcagtgttgcttattttccttccaaggaacctctaatattctctactttcagaactccaatcaaattagccagaaagagcaaacgaagccaataaatccaggagggcaatagatctgattttaacccttgtttcacatgcacaattgtcttcagagaaaagctgaagaaagtaccccctcacctccatgccccaatgctccttttctctgacttcaagtgggcctctgatgctgcccacatttccctcaccaggtttctttcctttccaaaacatctgtaaaactttctgcaccttyttccttctcccaccactaccagtggatgaccttatagatttctgctccatgagaaacagaagccatttgacagcaccctcagcaagagctaacattttagctcctaacaagagctagtgggcaactgatccaagcagtttacatatgtttatcatgtcatttcgtgttcaacacaatcctattagttataacttgataa

SEQ ID NO: 667568 - DNA, 614 bp, Homo sapiens
gcgtgccgggcaccacgctcagtacgggggacagagggaggaggctctaggctctgacttgcccttgcagagcttggaatccaggagtgtcagacggtggtagagataaaaagctgtgtgtctgagaggtgagggcgtgggctttggggccctaaacttgcttgggacgcccgggagggcccccgtggaagcggcgtttcagtggagccctgaagatgggtttctatttgtcaggtgaagataatggcagctccaggcagaaagggacgaccagcggaaaggaccctggtgagagcagccaccacgacggaacaggcagaagcaccagctggcaaaggcactgtcaggggcagcgggagatgggattggaagggcaacagggttggcgcccgwggtggcaaaaggaaggggggccttcgccaacaaaccccaacagggttttttttttttttttttttttttgagacagagtcttgctctgtcacccaggctggatgcagtggtacaatcttggctcactgcagcctctgcctcctaggttcaagctattctcctgcctcagcctcctgtagctgggattacaggcacgcaccaccacaactggctaatttttg

SEQ ID NO: 667569 - DNA, 614 bp, Homo sapiens
gcgtgccgggcaccacgctcagtacgggggacagagggaggaggctctaggctctgacttgcccttgcagagcttggaatccaggagtgtcagacggtggtagagataaaaagctgtgtgtctgagaggtgagggcgtgggctttggggccctaaacttgcttgggacgcccgggagggcccccgtggaagcggcgtttcagtggagccctgaagatgggtttctatttgtcaggtgaagataatggcagctccaggcagaaagggacgaccagcggaaaggaccctggtgagagcagccaccacgacggaacaggcagaagcaccagctggcaaaggcactgtcaggggcagcgggagatgggattggaagggcaacagggttggcgcccgtggtggcraaaggaaggggggccttcgccaacaaaccccaacagggttttttttttttttttttttttttgagacagagtcttgctctgtcacccaggctggatgcagtggtacaatcttggctcactgcagcctctgcctcctaggttcaagctattctcctgcctcagcctcctgtagctgggattacaggcacgcaccaccacaactggctaatttttg

SEQ ID NO: 667570 - DNA, 966 bp, Homo sapiens
cactgctagcttttttcccaagagaaacaaaaacttatggccgggcgtggtggctcacgcctgtattcccatttgagatcagcctggccaacacggtgaaaccctgtctctactcaaaatacaaaaattagccaggcctggtggcgcatgcctgtagtcccagctactagggaggctgaggcaggagaacagcttgaacctgcgaggcagaggttgcagtgagccgagatcgtgccactgcactccagcctgggtgacagagcgagtctccgtctcaaaaacaaacaaacaaactaactaactaacaaaaacaaatggaacagaatagagagtccagacatatatgaaaaattaatatgaaatgtgactttcttttaggttatctcaacatattatttaaaaataattatttttgggaggctgaggtgagcagaccaygagttcaagagatcaagaccatcctggccaacatggtgaaaccccgtctctactaaaaaatacaaaaattagctgggcgtggtggtgcatgcccagctactctggaggctgacgcaggagaatcgcttgaacccgggaggtggaggttgcagtgagctgagattgcgccactgcactccagcctggcaacagagtgagactctgtctctaaataaataaataaatatctcattaaaaataattttaagacgtttaaggccaggcgcggtggctcacgcctgtaatcccagcactttgggaggctgaggtgggtggatcacgaggtcaggagatcgagaccatcctggctagcacggtgaaaccccgtctctaccaaaaatacaaaaaaattagccgggcgtggcagcgggggcctgtagtcccagctactcgggaggctgaggcaggagaatggcgtgaacctgggaggcggaacttgtagtgagccgagattgcgccactgcactccagcctgggcgacagagctag

SEQ ID NO: 667571 - DNA, 642 bp, Homo sapiens
attgacaggtgaccagctggtcaatgttggtgccagttagaattccgacttctgaccataacacagaaatactcctactcattcacatattggtctcgcattagtattctattgtccatataccctatacgagagcatcagattcacctcaattatttcctgcagttcacaccaaaagcaggagatggaccagcccagcacaccaggctccgggtgccatgcaccttctgctatctaagctgagccaagaaaccccaaactgtccatctctagtcactcggctgtcttggatgattcctgacctgccctccttcaggctaatctcagccagaccccaagaacttgactccaagtttttgctaaaacaagcttgcctctgttctctggtctctccagcatctgmctcttggcttttccagatagactttggcttggtcttgcttcctggtaccagaaaacagggtgcaatgggtctctacataaattaattaatgttttcaaggtgcttggaacagtggctggcacatagtaaacacaatataagtgtttgctattgttatacctgcttagaatactacatcccaaacacttaatccaggcttcccaatcccttggtataaagtcccaaaccattgcacagct

SEQ ID NO: 667572 - DNA, 586 bp, Homo sapiens
atttagagtcttgtcattgcagaggtatttgtttcttcccattttgcctcagaactatcctttacaaacacaaagcatgacaccatatgtagagctgttcacattccctactaggtgggaatcaatcatgccatatgtagttttgtttcacttgtatccaccaataacagcagcttctcagcaaatgcttgtgaaaagaacaggtaaataaagtcctccatcagtggttgaaaatttgtgtccaatcagctaccattagacagaaaacatactttgtttcatgtacacagatgttgactaaagtaaactggttgccaacatttaaatattgggcatttccacataaaaacccacatttctaggctcttgaaaatttgaagaaaatttgacttctrgtcccacatgagagcagtcaactgaataattactgtatcctaatttgccacgaactccaccattcttgtctatacattcatgcattttcatttacttataacatttacatttgcttcctggtctatgcacacatttgatattatgtgatttctgtgttaacctgtaacacattatatagctttcaatgaaa

SEQ ID NO: 667573 - DNA, 656 bp, Homo sapiens
tgcttgggtggggccagaaatgcagcattagtgactctcagtgcaccctggaaagctaataatggcaataataaaaactgacatttttattgggcacttactgtctgccatgcactatgctaagactttccacaacactatcgtagtcacagcaaccctgcaatagggaactatttatcacctctattaagtgaagtggaggtatagaagggttaaagaaaagtgcccaaggtcccatggctatcaagtggtataacmaggagctactatattcaaatgtattggctcccagccagggggttctgaccaaaaaacaccttgacaatatccaaggacatgtattagcaattagctttgttaatcaatgtgatcttgtgcatgtttcttcaataaaatggcaatcttaatcatgcccattgtgaggaagcaatgagcggacgcataaaaagcatcaggtggagcatcacagcataaaaagcaccacagcacccaggtggagtcataatttaccaatttatgttttggcactgtgtcccacagatctcggttgcagaacccttcccaacagggctccagagatcaccaccaatgaacgcgagctgatatggtgaactgatgtatttgctatccctgtgctactatttcctaggtgatct

SEQ ID NO: 667574 - DNA, 658 bp, Homo sapiens
tgacattattggcagacacaccacccttcttgtagtgttttatctatcagcactgtccaatagggctttctgcaatgatgggaatattctacatcttatctgtctgaatgacagccactagccacgtgcggctattgaacactgaccagagcaccccatgaaaatttagggcactaaagcttagcaaggttatatagttgttgaatgtgatgcagtcagaatagggcaaatctgaacctaaaccaagatctgttcattctcagtgatcttttctctatacaatgaatgggtggtctcatgcaacaattcatttgcaaagtcttacagaacacctattacatgtaatggtcattttggggatgccaagaaataaatagctccaatgggtcaaaaggggtgaccaagaagaaaggaagagagaatcgctttgttgatctccacgagcagagaagaaacaaaggagggtccctgtgttgacctctgagaagatggaagaaggaagggaggggagcccttttgttcaccttctgaagtccaggggtgttaccattactgttrtacagtgtagccacgttctgcgtctatgttcaacaagcaagatccttgatcactggagggtcttcatcgtttgacacatacaggctacatgtaggaaatc

SEQ ID NO: 667575 - DNA, 627 bp, Homo sapiens
gcccttagtgaagggatcatttccctcctgggccactctcatgctgctgaaccctagcggcctctctgtatgggttgctctgcatggccttgctgtatgggtcgatggtcattgcccatccaccccagcatgttccaaaaggctcgtcaagtatccaaacggccatgcagtagcaaaaaccccactggatctgcttggataatgataatttgagctcagataagacagatccaagyttaaattaaaatatagatttatagcctggctaacatggtgaaaccccatctctactaaaaatacaaaattagtcgggtgtggtggtgtgtgcctgtaatcccagctactccagaggctgaggcaggagaatcacttgaacccgggaggcagaggttgcagtaaactgagatctcaccattgcaccccagcctgggcaaaaagagagaaactcggtctcaaaataaataaataaataaatctagatttaggtagcagaggtcaaaccggttgttctgttctctgtgtgtcagttttctcatctgtaaaatggagctcatagcctcaagttgttgtggggctaagatgtaacgtccaagaagcaactaacatctctcatgaaacaagactctg

SEQ ID NO: 667576 - DNA, 592 bp, Homo sapiens
aaaaattcttataatgttaaatttgaaatggaaatattaaaatgaacttattagttaaaataacgcaatcctttctctgacccaccggtattgagtgaggccatgtatcctgcattggccttatagagaccacagtatacttgttcagccttgatttggagctcaaccatgtgatttgtcttagccaatgggatgctatcagatgtgagggaaacagaaacgttatgcttgcatgtttagcttggtcctgttgtacttttgccatcaccacaagaagctctttctctagtatgtgctacctccctttcagcctgagccccagagtaaatgcattgtagcagacacagcccaacagacagcctggagcttgtttgtttcagccaacagacaaaccaatgaaaatatacactgttgtgttaatctgttgagcttggaagagaattggtacatgacattattgtggcaacaattcactaagacactatattatctgaattgacaktttgcaaagacagacaaagggtatgcactgcaaatgatagaatatacataattagggtctggagaaaatcaataacattttgaagtagaa

SEQ ID NO: 667577 - DNA, 611 bp, Homo sapiens
gtgtacacgtccttctcatgtgctatgtgagagtagggacagagtcttaatcttttgttctrtctcctccagttctgaagttggtgttcagtgagtcatactgagtttacttagaagggtcaggaatgctggctgtagcatgtatctgttcttactgacacagaatctatgtgtgtcctggcaccaggtttctaatttcctttgagatactgagcaggtaccctgactcagtcttcattccatgtgattgaggcaggtcaaccccattctcctggatcccatgcaacctgaaattagccaatcagaatattctatcccattggccacagtgatccatcagcattaggtccatgacactagccagatcgatagagttagctttggagcttttgttgggactgttgacaaagaggagttctctttcctggggcaggctgagctgggaaaataaaatcctgaagctgcctgtggctactttgtcaagagcctaccaaggaataaagccaactcagaggaaagcaaaactatgggatggggaaaagtagagtcaaaatgacatcatttggccaggcgcagtggctcatgcctgtaatcccaacattttgggaggc

SEQ ID NO: 667578 - DNA, 587 bp, Homo sapiens
gagagagtgtctccttatgttgaccaggctggtcttgaaytcctgacctcaagcaatcctcctgccaaggcaatcctctcaaaatgcagggattacaggtgtgagccactgtgcccagcctgttcatacgttttaaagagaggtgcagacaaaactgggttggtgcatccacatccctctctgtgtgatgctgggtaatttgcttaccctctctgggtatcctggagattgtcagccccagccaaggatggttaaaaggcattaaacaatacctaggacagagcctgacatctggagctcattaaaccatccgtacatgcagatgtcgttataattattatcaatgctattctgtcactccacaccctgactcccacctcagtggccccaggtgggggtgctctgaaatttctctggcctggctgagcgggaggggccggggttctgctggaataaagaacagaggaggaagccttgaaggatttgttctgtcccagctgtccccagtatcacagttagccacacggatggcagaagggacctttgacagtggacacaggggctggaagggcccagcctggggctca

SEQ ID NO: 667579 - DNA, 629 bp, Homo sapiens
ccctgacctcaagtaatcctcctgcctcggcctcccagagtgctaggattacaggtgtgagctctactgcgcccggccaagtgcttggttctttctcgactcaatcctattttgttctacacaggtcaggtctgcctccactcccccaaccccatgccccatttcacccattggcctctgaagcccagagatgggcaggggtttgtctgagaccacacagcaagaggggcagcagaggaggaygggaacccagatctgcttccctcccaggctacacccctgtagccccccaacccctgcaaacttgttatttaagcctcctcattacaggggtttggagccgaggaagccctgctgccttttcgtaaatgctctccctagacagcaatctttgatggaggctctgggagaagttgttcagtgatgtgcatttgtcgagcacctactgtatacctggtgccagtatagggttgggtggaagggtcttgtccactcaacacccctttttctgccctattattgccttccctggccaggcgaggtgactgacacctgtaatcccagcactttggatggctgaggcaggaggagcgcttcagccctggagtttgagttcagcctggccaaca

SEQ ID NO: 667580 - DNA, 629 bp, Homo sapiens
ccctgacctcaagtaatcctcctgcctcggcctcccagagtgctaggattacaggtgtgagctctactgcgcccggccaagtgcttggttctttctcgactcaatcctattttgttctacacaggtcaggtctgcctccactcccccaaccccatgccccatttcacccattggcctctgaagcccagagatgggcaggggtttgtctgagaccacacagcaagaggggcagcagaggaggatgggaacccagatctgcttccctcccaggctacacccctgtagccccccaacccctgcaaacttgttatttaagcctcctcattacaggggtttggagccgaggaagccctgctgccttttmgtaaatgctctccctagacagcaatctttgatggaggctctgggagaagttgttcagtgatgtgcatttgtcgagcacctactgtatacctggtgccagtatagggttgggtggaagggtcttgtccactcaacacccctttttctgccctattattgccttccctggccaggcgaggtgactgacacctgtaatcccagcactttggatggctgaggcaggaggagcgcttcagccctggagtttgagttcagcctggccaaca

SEQ ID NO: 667581 - DNA, 1207 bp, Homo sapiens
ttatcagccctgcagccaaacccttctaagcytccactcctgcgccacccagaccgtaagccccggggggcagaacttgcacttctgaacagaaaccccataaagttatacaaagtcagcaactctgcctacaactgtatggatggctgggttcagtggctcatgcctgtaatcccagcacgttgggaggccgaggcatgtggatcacttgaggaaaggagtttgagaccagcctgggcaacatggtgaaatcgtgtctctacccaaaatacaaaaattagctgggcctggtgggatatgtaatcccagctactcgggaggctgagacccaagcatcacttgaacccaggaggtggaggttgcagtgagctgagatagcaccactgcactccagcctgggcgacagagtgagactctgtctccaaaaaaaaagaaaagaaagaaaaaagaaaaaactgcgtggagagatggaggatccagctttaacggcacttttctgttccgccactaggtggtgtgacaccaacacagctgaggcaacatgcaagtggctgaagactcgggaaagttccagtagagacaacaggaatcccctcctctctacacggaagcttacaggaaggaaatccaagaactacagaatttatgctgaggcagcagagcaaaactgatgatactggagagcgcgggctctggtctttgtgtgtgttcaaacctgccctggccacttacttgcggttgggatcccagataagacaatgtacctctggcacaatgtcttcatttgcatatcagggctgttatttcaccccaggcagcttcggcaaggatgaaatgaaatgctgcacatgccgtgtttggggaagtggttggcacacaggatgattccacactggcactggtagcattattatgctcggaagattgcaaacatattgatgccaccttaaagcataggccttggattcaaggacagctgccagtgcccggcaacgacaaatgcgtcagagtctgaccccttttagggggtggaatggttggatccaagagctgcctggacgcctgggacactcaaggcaaacgctcaggtgctcggaatgcctgagcccttctgaggtcacaggaaacaggtgggatctgaaggcaggccgagccgagcagccaagccttgctctcaccagcaggatctaccaagcacagacttgtg

SEQ ID NO: 667582 - DNA, 1203 bp, Homo sapiens
ggctcaagcaatcctcccatcccagcttcccgagtagggctagccttgggtttttcttaaaaaatcacctaaccatcatttgctcagaattttaaggctaaacaatcaggatttttcatggtaaaaatccattacgcactgattaatcaagcagcgccacatccccagagtccccaggcaagcaytgactcattagaaatcccagttgtcatgttcctgagcttgatgcattccagtgtccctcaactgtcaaaagactcagaaatgctaaatgctgcactctggattcaactccctgctcctggggttcatcttcccttttgaaagcttttcctgtctgtggtacttgcaagcacaaaccttgaggtatttttccagcatcttcactatatgtctgttgttcaaaacactcttagccacatggagactggttttcttgaactgttcagcagccaactgcaaagggaaccaaatgtgagctcttaaaaatggcaaagattaaggaagagaataaaccagccaggctctgccgagtcatcctgagatcagccctatgcagagaagcgaatctcaaaacgccagcctccaagaatagaaggctccagagactgtgcaaccaagactaacaaactggaaaagctaggcaatcttaagagataaatgcaaagatgcaccactgatacccatgtagcacatgcagaattgggggtgaaacaagagcatttacaaatgaaaggctgtgtggactcagtggaggaaaaggacaagctctttcttttcagtttttggggttacattgatttcataagttcaacaacaaaagtatgaatatgctgggtgtggcagctcatgcctgtaatcctagcacgttgggaggctgaggcatgtggatcacttgaggccaggagttcgagacaagcctggccatcatggtgaaaccctgtctacaaaatataaaaattagctgggtgtggtggtgcacacccgtaatcccagctactcaggagactgaggcatgagaatttgggagatggaggttgcaatcagctgagattgtaccactgcattccagcctgggcaatggagtgagactctgtctcaaaaaataaaattaaaaacaaaaacaaaaacaaaaaacaaacacacaaccatgactgcaccaagtctctgttttagagcctgacttgtttgcacaatggtccc

SEQ ID NO: 667583 - DNA, 1692 bp, Homo sapiens
tctttgttggctacaaagggagcatatctaactcctctcaaagagaaaagcaaccaatggcatcatgtccatagggcaaaggcttagctctcccttttyagggaaacaagattcctaatacattgagagagcgttcagtgttagtcttgagccttgggctgcaaacctgtttttttaactttatgtaacatcttggctctttttccaaaaagaagtgtttcaaaattgtttgacgtccctgctctgggatgtctacaaagagacaaattgtcctttcatatgagttgacctggcaatgaagcatggcctgtcccttttgctgtccagaaatctcccaaacttgtggccggtaacctcttcctttctatcctttccgaagattccctttggatggaagtcagctgtgaatgctctcctgatttgcattcaattgtataaattgtcataggtacgactctttgttcagaagcttgagtgtatgagaaaaacaacttataatgtatttttgaaattcaatctaatttatatttcaatctcctatttctctagggcggaaaaatgtaatctcagttaatttgaggtttcttcctgccctggcattgtatttaaattcaggggaactggatgtctcatgggtttttctactttttaatataatctggttatatgggcattgggtaagatatctgccgcctgatttgatccttcctcattggcccaagcatgtcaccacggagacttccttgttcgtgtctatatggttcatacatggccttccccttaattaaagatgtcttccgaggaacattttgtctaaggtaagaatcctttccagactcctaacatcataggcttttaaaacattggagccaggaaaaatattgtttgtttctctgcttccttctttaagctcaaccttatgccctaaccaataaacataaattagctttgctgttaaaaatggagaaaaggccaaaaaagagataccatagatacatatttaaaaaatatcactttgctacaaaatctaatgtcccagatgaattgccatgcaatttgtgcagatctatgtacgtttctattctttttccatgctgcacctgtttaaatgatagatcattctcctaaatgctcttccttgtacttgtccttctctgctatggttcactcagcctctggcaaagaagtatggaactgggagaggtggaagattcggagctagaggagaaggaaggaggataatgaagcacacctgagaactttgctgcatcgtggttttgaaagtgtggcttttactgttgcccatcatatgcaactgagttcagagggcacataaagttggatacaaaccactttggtgaaccagacatttggcgattagatccagcgcagatgcatctatatgcaagtttttagtgagatgagacatagtaatggtgattaactcgattgttgatataatactggtggtaagctcattttaatgtgtagtttattggagttgttaaggacattattttcagagtaagaaagccacatttgattcctggctttggcacttccacatagttgacttgggcaagctactaaaccttcccaattattgcaatgggaataacagtggtgtctatatggtaggattgctgtaagatttgaataaggtgatgtaatgcacactaagagctaagtata

SEQ ID NO: 667584 - DNA, 1692 bp, Homo sapiens
tctttgttggctacaaagggagcatatctaactcctctcaaagagaaaagcaaccaatggcatcatgtccatagggcaaaggcttagctctccctttttagggaaacaagattcctaatacattgagagagcgttcagtgttagtcttgagccttgggctgcaaacctgtttttttaactttatgtaacatcttggctctttttccaaaaagaagtgtttcaaaattgtttgacgtccctgctctgggatgtctacaaagagacaaattgtcctttcatatgagttgacctggcaatgaagcatggcctgtcccttttgytgtccagaaatctcccaaacttgtggccggtaacctcttcctttctatcctttccgaagattccctttggatggaagtcagctgtgaatgctctcctgatttgcattcaattgtataaattgtcataggtacgactctttgttcagaagcttgagtgtatgagaaaaacaacttataatgtatttttgaaattcaatctaatttatatttcaatctcctatttctctagggcggaaaaatgtaatctcagttaatttgaggtttcttcctgccctggcattgtatttaaattcaggggaactggatgtctcatgggtttttctactttttaatataatctggttatatgggcattgggtaagatatctgccgcctgatttgatccttcctcattggcccaagcatgtcaccacggagacttccttgttcgtgtctatatggttcatacatggccttccccttaattaaagatgtcttccgaggaacattttgtctaaggtaagaatcctttccagactcctaacatcataggcttttaaaacattggagccaggaaaaatattgtttgtttctctgcttccttctttaagctcaaccttatgccctaaccaataaacataaattagctttgctgttaaaaatggagaaaaggccaaaaaagagataccatagatacatatttaaaaaatatcactttgctacaaaatctaatgtcccagatgaattgccatgcaatttgtgcagatctatgtacgtttctattctttttccatgctgcacctgtttaaatgatagatcattctcctaaatgctcttccttgtacttgtccttctctgctatggttcactcagcctctggcaaagaagtatggaactgggagaggtggaagattcggagctagaggagaaggaaggaggataatgaagcacacctgagaactttgctgcatcgtggttttgaaagtgtggcttttactgttgcccatcatatgcaactgagttcagagggcacataaagttggatacaaaccactttggtgaaccagacatttggcgattagatccagcgcagatgcatctatatgcaagtttttagtgagatgagacatagtaatggtgattaactcgattgttgatataatactggtggtaagctcattttaatgtgtagtttattggagttgttaaggacattattttcagagtaagaaagccacatttgattcctggctttggcacttccacatagttgacttgggcaagctactaaaccttcccaattattgcaatgggaataacagtggtgtctatatggtaggattgctgtaagatttgaataaggtgatgtaatgcacactaagagctaagtata

SEQ ID NO: 667585 - DNA, 1432 bp, Homo sapiens
ctccacccgaagaatcaattatcaaagatgaatgtactctacaaaccaaggggaaggggagtgaaaagtctccctctctctgtagaaaaattgcttagtgattagattctgtttcacccaaagaataacagcttcttgaaagatacatgtcaatacagaacaattttactttctgtgcctggttatattgattcaaaagcggtggtggtggcagtggcagtgggggtgggcaggtggaaggtgaggaagactattttcttgccttgggcaaaacccagaagtaggcaaaggagagagatttggagtcatttagccatgacagagtgagaccaaatagactataaatatcaccttaaagcaaaaccaccctggggcaagaaaggctcctgcctgggactccacgctttagagggctctgctctagctcctcctcctcacagggcaaggggtccaaggtagcaggagatgtgtcctagcagagccgtacttctcccttctagagcagtgctgttccacagaaatgttatgggagccacaaatggaagctacacatagaactttaaacttgttagtagctatattagaaaaaaacagttagaactaatttaattatatattttatttaacccaatagtatatccaaaacactaccgtgtcagcacataatcaacataaaaattattgatgagatatcttacgccctttattttttgtattaagtcttcgaaattggttgtgtactttacatttaaggaacatctcgaccagtgctctggagccaatgtgcggctgctgtgctgcccagcacagttctagaccatgctctgggtcacaggaccctgggattccccgccatcaggattccacgtccactctcagggcctgaaggagcctttcctgagcctacattcctaatggtagaccttgccacattccgaggcctgcgggggaccatctgtttgaggggtgtttacgtggatcctcgacatgtaggctgggtcacctgagtgtgcaccaggtgctgcmtgaaagggatggggcagggatggaaaaagaaggggagtagaatgcaggcctggagatagctctcctgaccccatgaactggctccaaccttgaaagcatttgagaatttttaattcttttaactatttagccatagagtattaggtaataaaaatgtcttagtaaatagtgactgctgggatcccctagggttctccgcaattactgctcagcccctcttcccagaatccccaccagagacctccccactattcagcaactgatgggttaaccaggcacagcaaggacttctaggcaggtgctccaatagggccagagtaattgattgacatgccctctgtacagaggctgctcattattccaactctcacccccagctatttaatattagctattatatttgata

SEQ ID NO: 667586 - DNA, 533 bp, Homo sapiens
tctctcctgccaccttgtttgcttccccttccaccatgattgtaagtttcctgaggcctcaycagccatgctgaaccatgagtcagttaaacctctctcctttataaataacccagtcttgtgtatttcttcatagcagcatgagaatggactaatacacccctcagccatggccctgtcccccagcagatcctgacagccaagaggggtagaggtgccccgaaagccgtggggagtcccatgccattcagcatctcaagaagcggtgcagcagagaaaccagctacgaggtccctcacctgtttttcctcaaatggcaagcccaggaagggggcagaggccacgttcagtggggtgatgctgtccgaggtgaagggctttctagctctggcaaagaggtgagcagaaggccccaccagggcctccctagatcctgaagtgatgctcccaagccacctcattcccctgccaggctcggtcctccatcttctctgccacctgtcttggtcccatgcctcctttaagggctccca

SEQ ID NO: 667587 - DNA, 533 bp, Homo sapiens
tctctcctgccaccttgtttgcttccccttccaccatgattgtaagtttcctgaggcctcaccagccatgctgaaccatgagtcagttaaacctctctcctttataaataacccagtcttgtgtatttcttcatagcagcatgagaatggactaatacacccctcarccatggccctgtcccccagcagatcctgacagccaagaggggtagaggtgccccgaaagccgtggggagtcccatgccattcagcatctcaagaagcggtgcagcagagaaaccagctacgaggtccctcacctgtttttcctcaaatggcaagcccaggaagggggcagaggccacgttcagtggggtgatgctgtccgaggtgaagggctttctagctctggcaaagaggtgagcagaaggccccaccagggcctccctagatcctgaagtgatgctcccaagccacctcattcccctgccaggctcggtcctccatcttctctgccacctgtcttggtcccatgcctcctttaagggctccca

SEQ ID NO: 667588 - DNA, 533 bp, Homo sapiens
tctctcctgccaccttgtttgcttccccttccaccatgattgtaagtttcctgaggcctcaccagccatgctgaaccatgagtcagttaaacctctctcctttataaataacccagtcttgtgtatttcttcatagcagcatgagaatggactaatacacccctcagccatggccctgtcccccagcagatcctgacagcmaagaggggtagaggtgccccgaaagccgtggggagtcccatgccattcagcatctcaagaagcggtgcagcagagaaaccagctacgaggtccctcacctgtttttcctcaaatggcaagcccaggaagggggcagaggccacgttcagtggggtgatgctgtccgaggtgaagggctttctagctctggcaaagaggtgagcagaaggccccaccagggcctccctagatcctgaagtgatgctcccaagccacctcattcccctgccaggctcggtcctccatcttctctgccacctgtcttggtcccatgcctcctttaagggctccca

SEQ ID NO: 667589 - DNA, 533 bp, Homo sapiens
tctctcctgccaccttgtttgcttccccttccaccatgattgtaagtttcctgaggcctcaccagccatgctgaaccatgagtcagttaaacctctctcctttataaataacccagtcttgtgtatttcttcatagcagcatgagaatggactaatacacccctcagccatggccctgtcccccagcagatcctgacagccaagaggggtagaggtgccccgaaagccgtggggartcccatgccattcagcatctcaagaagcggtgcagcagagaaaccagctacgaggtccctcacctgtttttcctcaaatggcaagcccaggaagggggcagaggccacgttcagtggggtgatgctgtccgaggtgaagggctttctagctctggcaaagaggtgagcagaaggccccaccagggcctccctagatcctgaagtgatgctcccaagccacctcattcccctgccaggctcggtcctccatcttctctgccacctgtcttggtcccatgcctcctttaagggctccca

SEQ ID NO: 667590 - DNA, 1205 bp, Homo sapiens
gtgctttagaagcaaaccttaacaacgatgttcctgtcatttaacacttaaaaaagcctaccttttgattctaatgaattgatgtatctttttgatggtcgtttctaacagagatgaagagctctatccttctggcaagataaaatgaggataattaacctctaggaaaaataggggtacagttttaaaacgcataaaaagcagtttttttgttttttttttttgagatagggtctcactgtgtggcccaggctggagtgcagtggtgcgatctctgctcgctgcagtctccacctcctgtgctcaagtgatcctcccaccgcagcctcctcagtagccggaactattagtgtgtaccactacgcccagctaattttggtatttttgtagagatggggtcttgctatgttacccaggctggtctcaaactcctgggttcaagtgattcacccactttagcctctcaaagttctgggactgcagatgtgagccacagtgtctggcctagcaattattcttaactgcagtgtagtttctgagggcaaagtcagttttggacttaatttatgtttatttaaaaaggatatttttctactttttcctttctcacctcaagtgccagcaaactagagctgaaaagtcttcaaatctattggcctcctgtgcttttcactgtttattgtctcttcaacaggcactctccctcttccttctatgacaaggaccctgattcgacacggctgcccatgttcccagctccaggagataaacgaagtcaaacctaagccactcatgacaaatttgtctcctgtgtaattggtctaggcacaagcacatgacccatttatagacaatgagacaggtgggacgtcttaaagcactggaaatatttttctccttgacacatagaaagtagtcacacttggtaaagaccttcaactgcgctcacattctgtcctgctttctggggaccacatgatggtgcctgaatcagaggcagccacctagggaccatgaacgactaagccttaaataagctaaagaaggcaggagaggatggaaaaagacctccaggaatttccaagtcaaccctgggagtgtccaccatggtaggytaaacaatggcctatcaaagatgcccatgttctaattcccaggactgctaggtcactccctacatataattgaacctctgtggaattgaa

SEQ ID NO: 667591 - DNA, 428 bp, Homo sapiens
aggttgcctggttactggacatgcggacattcactttgattatgctccattcgagaatgctagaatgaaaatgtgggtaaatggtgaaggaattcaaggaaaagaaaatgcacccaccatgtttatgttataataccatgctggaccagacattttgtcattcaaggatgaatgtgttacaggggtccttgctcccagagctcccaagatggtggtggctgcttccaagatggcrgtggcttccaagatggtgggtggcttccaagatggtggcaagccttgtgttctctgacctggagttcttggcctcacagattccaaggaatggaatcttgggccatgtggtgagtgttatagctctattagaagcagtgggtcatggaagagaaccatggaacccagtaattagtgtttagctcaattaggac

SEQ ID NO: 667592 - DNA, 428 bp, Homo sapiens
aggttgcctggttactggacatgcggacattcactttgattatgctccattcgagaatgctagaatgaaaatgtgggtaaatggtgaaggaattcaaggaaaagaaaatgcacccaccatgtttatgttataataccatgctggaccagacattttgtcattcaaggatgaatgtgttacaggggtccttgctcccagagctcccaagatggtggtggctgcttccaagatggcagtggcttccaagatggtgggtggcttccaagatggtggcaagccttgtgttctctgacctggrgttcttggcctcacagattccaaggaatggaatcttgggccatgtggtgagtgttatagctctattagaagcagtgggtcatggaagagaaccatggaacccagtaattagtgtttagctcaattaggac

SEQ ID NO: 667593 - DNA, 3337 bp, Homo sapiens
gatccatccagaaagacagagacaactcaaagcaagcttccccctcccacactgagagctttcaggtcacaggtaggtgagagacaaatggttgcattattttgggtttctgataagtttttccaaaggaggcaatcagatacgcatctatctctgtgagcagaggggtgactttgagtagaatgggaggcaggtttgccttaagcagttcccagcttgaaagggcccaggatattttccgttcacatttcttagacagcccagactttatacccacaaataggctgcccctgtgggcagaggtaagagagttttctttcttttcactgaggcacctgagcagcttagctgtaaatattgtctttggtcctcatctattttggaactgaaggaattaaggagagaaacctgggcaaaaatttaagaagctgaaaacagttaagttgagtgacagtactcaatttctcccatctcctgtgtgtattattaaagtaaaaggttgaggtagataaaagcgttcactctggcccagaaactcccctgtttttgtgatagtgaataagtctcatgagatctatatagttttataaagaggagttcccctgcacacgctttctcctgcttgctgccatgtaagacatgcctttcaccttctgccatgattctgaggcctttccagccatgtggaactgtgagtccattatcctctttttctttataaattacccagtcttgagtatgtctttattagcagcatgagaagagactaatacatcccctccaccccctctgctgcctcatttttcaccaatatcctgtcttgaagccttcacaaagtataaaattgattcttccaaaggcatgggttatatacaccatgtagctaagagaaggtagggaggagagtgttttctcacaaattagcacatcccagaaaacacgtggaacaaatgaatccagagatacccagaacatctgcagtgaagcttgtttagaaacttaatcaygaaagttctccatggagagaatttctggagtcaggcaggcattttttttttctttttttttcctccctgtaattgtgcctcttattccagagacaaatggaatttttctttggggttctaaggccaaggtaagttctgtgccttaggatcaggcattgccattgatgtcagcagcaaagatggattcattattaatgctcccatagatacttaaaattcagaagtcagaaaccaaagaggacccttaaaaaatctccatgctgtcaagccagcacttagacattttctttctttggttaccatcatggaaatgaaaaaaaaaataaaaatctcaaaatagctacaaaattggacctgctcaaaatatcaataatttacattaaaaatggattctggaagtcaacttctgattttaaggtggcttatttcatcctggtgtaccctttctcccatttgtttttcttttttcttttcctgctctcttcaaggcctgatacaaagctctgtcataatcagtaaccgtttttctgtgtgtgagtactttaatccttttctgtgcaaccacactgaagtctttagcaattaattagcaattcagatgcagaccacccataaagagctcagcatggaataggtgctccatgaatatgaactgttattacatacacatgcatgatttaagaaatagccagttcttgatcagcacagtggctcacgcctgtaatcccggcactttgggaggccgaggtgggtggattgcctgaggtcaggagtttgagaccagcctggccaatatggtgaaatccagtctccactaaagatacaaaaaaataaaaaacaaaaaaaaatagccgggtgtggtggcgcaagcctgtagtcccagctactcaggaggctagggtaggagaatcgcttgaaccctagaggtggaggttgcagtgagctgagatcacaccactgtactcaagactgggtaacagagtgagactccatcttaaaaaaataaatgaataaataaaaaagaaatagccagttttagtaagaaagcagaacttgttctttccctgcaatcattgttggttattctctgatgaagaaatgttaaaattcaaaacatgggtcacagaaatcatagtaaaacaaatacaaactgtgactcaccccactcaaatggacatttgaggagtttagaataatgctgatgagtttcacagggcaaattgggagctcacatattctaaaaggtccagtgtgttaactatttgtttctgacattggcttgaaagtaataatgcctcattttcagtatttctctatattctgtgtttgccacatgcatcgcctttttcaagaggctgtgtagtgtagtgaagtgactttccagatctgccatttactgtctgagggatcctggatcaagcatacagatcttctaagcctagttttctcacctgcactgtaagaaatagagcagcaccggccgggcgcggtggctcacgcccataatcccagcactttgagaggctgagatgggaggatcacaaggtcaaaagattgagaccatcctggctaacatggtgaaaccccatctctactaaaaacacaaaaattacctgggcgtagtggttcatgcttgtagtcccagctactcgggaggctgaagcaggagaatcgcttgaactggggaggcggaggtgcagtgagctgagattgtgccattgcactccagcctgggtaacagagtgagactctgtctcaaaaataaataaataaagaactggaacagcacctgttcaagaggtgaaacacacaaagcacgatgcctatccagagtccacagttatgaggatctgttattattcttcacgatagtcctatcaccagcttattttttaaccatgctcagaaacaagttgccagctctttagcatggcggcaataccctccatgctaacacctgcccatttatccatgagtaggtgtgactcttctattttcctacttactccttttaatcccaaaatttgggacaattcaggttctgcctgaggccatgctattccacgccttgtctggaagccactcctactgctgtctttggaacactgttactcatcctacaaggcctcaatcaagaatcttaggaggtcattggtgcctacctgcccatggcagagaccaccaacaccttctgagagctgccacagtgctgctttctaacatgtctacactagctcctcacagtgtgcggtgattgttgggtgaaagctctgtttctcatagtgaatgcatgccatctgcaaggggtatgcacatgcctttcttgtctt

SEQ ID NO: 667594 - DNA, 3337 bp, Homo sapiens
gatccatccagaaagacagagacaactcaaagcaagcttccccctcccacactgagagctttcaggtcacaggtaggtgagagacaaatggttgcattattttgggtttctgataagtttttccaaaggaggcaatcagatacgcatctatctctgtgagcagaggggtgactttgagtagaatgggaggcaggtttgccttaagcagttcccagcttgaaagggcccaggatattttccgttcacatttcttagacagcccagactttatacccacaaataggctgcccctgtgggcagaggtaagagagttttctttcttttcactgaggcacctgagcagcttagctgtaaatattgtctttggtcctcatctattttggaactgaaggaattaaggagagaaacctgggcaaaaatttaagaagctgaaaacagttaagttgagtgacagtactcaatttctcccatctcctgtgtgtattattaaagtaaaaggttgaggtagataaaagcgttcactctggcccagaaactcccctgtttttgtgatagtgaataagtctcatgagatctatatagttttataaagaggagttcccctgcacacgctttctcctgcttgctgccatgtaagacatgcctttcaccttctgccatgattctgaggcctttccagccatgtggaactgtgagtccattatcctctttttctttataaattacccagtcttgagtatgtctttattagcagcatgagaagagactaatacatcccctccaccccctctgctgcctcatttttcaccaatatcctgtcttgaagccttcacaaagtataaaattgattcttccaaaggcatgggttatatacaccatgtagctaagagaaggtagggaggagagtgttttctcacaaattagcacatcccagaaaacacgtggaacaaatgaatccagagatacccagaacatctgcagtgaagcttgtttagaaacttaatcatgaaagttctccatggagagaatttctggagtcaggcaggcatttttttttyctttttttttcctccctgtaattgtgcctcttattccagagacaaatggaatttttctttggggttctaaggccaaggtaagttctgtgccttaggatcaggcattgccattgatgtcagcagcaaagatggattcattattaatgctcccatagatacttaaaattcagaagtcagaaaccaaagaggacccttaaaaaatctccatgctgtcaagccagcacttagacattttctttctttggttaccatcatggaaatgaaaaaaaaaataaaaatctcaaaatagctacaaaattggacctgctcaaaatatcaataatttacattaaaaatggattctggaagtcaacttctgattttaaggtggcttatttcatcctggtgtaccctttctcccatttgtttttcttttttcttttcctgctctcttcaaggcctgatacaaagctctgtcataatcagtaaccgtttttctgtgtgtgagtactttaatccttttctgtgcaaccacactgaagtctttagcaattaattagcaattcagatgcagaccacccataaagagctcagcatggaataggtgctccatgaatatgaactgttattacatacacatgcatgatttaagaaatagccagttcttgatcagcacagtggctcacgcctgtaatcccggcactttgggaggccgaggtgggtggattgcctgaggtcaggagtttgagaccagcctggccaatatggtgaaatccagtctccactaaagatacaaaaaaataaaaaacaaaaaaaaatagccgggtgtggtggcgcaagcctgtagtcccagctactcaggaggctagggtaggagaatcgcttgaaccctagaggtggaggttgcagtgagctgagatcacaccactgtactcaagactgggtaacagagtgagactccatcttaaaaaaataaatgaataaataaaaaagaaatagccagttttagtaagaaagcagaacttgttctttccctgcaatcattgttggttattctctgatgaagaaatgttaaaattcaaaacatgggtcacagaaatcatagtaaaacaaatacaaactgtgactcaccccactcaaatggacatttgaggagtttagaataatgctgatgagtttcacagggcaaattgggagctcacatattctaaaaggtccagtgtgttaactatttgtttctgacattggcttgaaagtaataatgcctcattttcagtatttctctatattctgtgtttgccacatgcatcgcctttttcaagaggctgtgtagtgtagtgaagtgactttccagatctgccatttactgtctgagggatcctggatcaagcatacagatcttctaagcctagttttctcacctgcactgtaagaaatagagcagcaccggccgggcgcggtggctcacgcccataatcccagcactttgagaggctgagatgggaggatcacaaggtcaaaagattgagaccatcctggctaacatggtgaaaccccatctctactaaaaacacaaaaattacctgggcgtagtggttcatgcttgtagtcccagctactcgggaggctgaagcaggagaatcgcttgaactggggaggcggaggtgcagtgagctgagattgtgccattgcactccagcctgggtaacagagtgagactctgtctcaaaaataaataaataaagaactggaacagcacctgttcaagaggtgaaacacacaaagcacgatgcctatccagagtccacagttatgaggatctgttattattcttcacgatagtcctatcaccagcttattttttaaccatgctcagaaacaagttgccagctctttagcatggcggcaataccctccatgctaacacctgcccatttatccatgagtaggtgtgactcttctattttcctacttactccttttaatcccaaaatttgggacaattcaggttctgcctgaggccatgctattccacgccttgtctggaagccactcctactgctgtctttggaacactgttactcatcctacaaggcctcaatcaagaatcttaggaggtcattggtgcctacctgcccatggcagagaccaccaacaccttctgagagctgccacagtgctgctttctaacatgtctacactagctcctcacagtgtgcggtgattgttgggtgaaagctctgtttctcatagtgaatgcatgccatctgcaaggggtatgcacatgcctttcttgtctt

SEQ ID NO: 667595 - DNA, 3337 bp, Homo sapiens
gatccatccagaaagacagagacaactcaaagcaagcttccccctcccacactgagagctttcaggtcacaggtaggtgagagacaaatggttgcattattttgggtttctgataagtttttccaaaggaggcaatcagatacgcatctatctctgtgagcagaggggtgactttgagtagaatgggaggcaggtttgccttaagcagttcccagcttgaaagggcccaggatattttccgttcacatttcttagacagcccagactttatacccacaaataggctgcccctgtgggcagaggtaagagagttttctttcttttcactgaggcacctgagcagcttagctgtaaatattgtctttggtcctcatctattttggaactgaaggaattaaggagagaaacctgggcaaaaatttaagaagctgaaaacagttaagttgagtgacagtactcaatttctcccatctcctgtgtgtattattaaagtaaaaggttgaggtagataaaagcgttcactctggcccagaaactcccctgtttttgtgatagtgaataagtctcatgagatctatatagttttataaagaggagttcccctgcacacgctttctcctgcttgctgccatgtaagacatgcctttcaccttctgccatgattctgaggcctttccagccatgtggaactgtgagtccattatcctctttttctttataaattacccagtcttgagtatgtctttattagcagcatgagaagagactaatacatcccctccaccccctctgctgcctcatttttcaccaatatcctgtcttgaagccttcacaaagtataaaattgattcttccaaaggcatgggttatatacaccatgtagctaagagaaggtagggaggagagtgttttctcacaaattagcacatcccagaaaacacgtggaacaaatgaatccagagatacccagaacatctgcagtgaagcttgtttagaaacttaatcatgaaagttctccatggagagaatttctggagtcaggcaggcattttttttttytttttttttcctccctgtaattgtgcctcttattccagagacaaatggaatttttctttggggttctaaggccaaggtaagttctgtgccttaggatcaggcattgccattgatgtcagcagcaaagatggattcattattaatgctcccatagatacttaaaattcagaagtcagaaaccaaagaggacccttaaaaaatctccatgctgtcaagccagcacttagacattttctttctttggttaccatcatggaaatgaaaaaaaaaataaaaatctcaaaatagctacaaaattggacctgctcaaaatatcaataatttacattaaaaatggattctggaagtcaacttctgattttaaggtggcttatttcatcctggtgtaccctttctcccatttgtttttcttttttcttttcctgctctcttcaaggcctgatacaaagctctgtcataatcagtaaccgtttttctgtgtgtgagtactttaatccttttctgtgcaaccacactgaagtctttagcaattaattagcaattcagatgcagaccacccataaagagctcagcatggaataggtgctccatgaatatgaactgttattacatacacatgcatgatttaagaaatagccagttcttgatcagcacagtggctcacgcctgtaatcccggcactttgggaggccgaggtgggtggattgcctgaggtcaggagtttgagaccagcctggccaatatggtgaaatccagtctccactaaagatacaaaaaaataaaaaacaaaaaaaaatagccgggtgtggtggcgcaagcctgtagtcccagctactcaggaggctagggtaggagaatcgcttgaaccctagaggtggaggttgcagtgagctgagatcacaccactgtactcaagactgggtaacagagtgagactccatcttaaaaaaataaatgaataaataaaaaagaaatagccagttttagtaagaaagcagaacttgttctttccctgcaatcattgttggttattctctgatgaagaaatgttaaaattcaaaacatgggtcacagaaatcatagtaaaacaaatacaaactgtgactcaccccactcaaatggacatttgaggagtttagaataatgctgatgagtttcacagggcaaattgggagctcacatattctaaaaggtccagtgtgttaactatttgtttctgacattggcttgaaagtaataatgcctcattttcagtatttctctatattctgtgtttgccacatgcatcgcctttttcaagaggctgtgtagtgtagtgaagtgactttccagatctgccatttactgtctgagggatcctggatcaagcatacagatcttctaagcctagttttctcacctgcactgtaagaaatagagcagcaccggccgggcgcggtggctcacgcccataatcccagcactttgagaggctgagatgggaggatcacaaggtcaaaagattgagaccatcctggctaacatggtgaaaccccatctctactaaaaacacaaaaattacctgggcgtagtggttcatgcttgtagtcccagctactcgggaggctgaagcaggagaatcgcttgaactggggaggcggaggtgcagtgagctgagattgtgccattgcactccagcctgggtaacagagtgagactctgtctcaaaaataaataaataaagaactggaacagcacctgttcaagaggtgaaacacacaaagcacgatgcctatccagagtccacagttatgaggatctgttattattcttcacgatagtcctatcaccagcttattttttaaccatgctcagaaacaagttgccagctctttagcatggcggcaataccctccatgctaacacctgcccatttatccatgagtaggtgtgactcttctattttcctacttactccttttaatcccaaaatttgggacaattcaggttctgcctgaggccatgctattccacgccttgtctggaagccactcctactgctgtctttggaacactgttactcatcctacaaggcctcaatcaagaatcttaggaggtcattggtgcctacctgcccatggcagagaccaccaacaccttctgagagctgccacagtgctgctttctaacatgtctacactagctcctcacagtgtgcggtgattgttgggtgaaagctctgtttctcatagtgaatgcatgccatctgcaaggggtatgcacatgcctttcttgtctt

SEQ ID NO: 667596 - DNA, 653 bp, Homo sapiens
tccttgactttccctacttggcaactgctttaattcaggatcttatcaaagattgcaataacccacatactagttgtattagtccattcttgcactactataaagaactacccgagactgggtaatttattaaaaaaraagaagaagaagaagagagatttacttagctcatggttctggaagctatagagggagcatggctggggaggcctcagaaaacttaaaatcgtggtggaaggcagaggggaagcaggaacatcttacatggccagagcaggaagaacagagagaagcaggaggtgctacatacttttaaacaaccaaatctcatgataactcactcaatgtcatgagaatagcaccaaaggggaaacctgcccccatgagccaatcacctcccaccaggcccaacctccaacattaaggattacaatttgacacgacatttgcatggggacacagacccaaaccttcactagtgttcctgaaataaaactctctccactccactgtgtaaacttattcctagcttctcctggattgttagaggattagggcaccaatcctaacccctactgtagcttccatcacaatgtgctgtaaatgtctgcttacatattttcttcctccactttttattgttatatcttcaa

SEQ ID NO: 667597 - DNA, 619 bp, Homo sapiens
tgaataagatgaaattactatttgtcggggaatttaattatactctttttcttggtgttggttttcaagtttcttaatgcctttagttaatagcaggtagctatagcaattttaaagtatctctttcagttataacactctctgttgacttttttaaagcacctaacaattgacaaagctttttaaaaatctcacttgaaaaaamaaaaaagactcacttgactcttgcagctactatgtgaggtggtgagagcagcctttactacccaaactttacaaatgacaaaactaaggttctgagagttaagagacttgcttgaggacacaaagtagctatgtcatgttagccggtgcaagaagtgaacatctaaacactgactcctgggctcttggtaatacagggaacacctctccaattggtttgctttccacgctccgctccaccctcaccccggcgtgcttttcactggggggattttctcatgagctcaggtgggctctgggctgtatcatgctcatccatatgcactcatctatgagatgctcattcctctttattaaggaactatgacaaataaaatctgttaaaaaaaagttctagatctccagttctctctcc

SEQ ID NO: 667598 - DNA, 619 bp, Homo sapiens
tgaataagatgaaattactatttgtcggggaatttaattatactctttttcttggtgttggttttcaagtttcttaatgcctttagttaatagcaggtagctatagcaattttaaagtatctctttcagttataacactctctgttgacttttttaaagcacctaacaattgacaaagctttttaaaaatctcacttgaaaaaacaaaaaagactcacttgactcttgcagctactatgtgaggtggtgagagcagcctttactacccaaactttacaaatgacaaaactaaggttctgagagttaagagacttgcttgaggacacaaagtagctatgtcatgttagccggtgcaagaagtgaacatctaaacactgactcctgggctcttggtaatacagggaacacctytccaattggtttgctttccacgctccgctccaccctcaccccggcgtgcttttcactggggggattttctcatgagctcaggtgggctctgggctgtatcatgctcatccatatgcactcatctatgagatgctcattcctctttattaaggaactatgacaaataaaatctgttaaaaaaaagttctagatctccagttctctctcc

SEQ ID NO: 667599 - DNA, 612 bp, Homo sapiens
agttgaacatcatagaagactgagtcattcattgataactgttgggcctaagtggtgggtggatttggtttgattatattgctctctctacttttatgtatgtttgaagatgtctaaaagggaagtttaaaaaaaatcctatcggccagttgcaagcctggggcacattatttgaatgtttcttagtttttcaactatagattggaaatggaatctgttagcagggtgtagtggtattaaaaatatagacataaattgcctggtgatacttatagtagatgttcagtaaacattaattcttaggaatagcatcatgaattatacaaattgttaatcctcatagccattctctgaagtaggcagctttatcccagttttcatatgagaaaactgagaattggagcwgctaagtattatgctttgaagtatacaagaagcaaatgatggagctaaaatttgagtccaatttctgacctcaaagtctaggacacttgaagcctccttgaaaaaggaaggctactattgacaaagctttgtttctgttacattatattttctcagatttaatcttcatcataactgcaaggcatattgaatatctgtaacctttta

SEQ ID NO: 667600 - DNA, 1972 bp, Homo sapiens
tgcatgatgaagagggtttgtgttaagtatctttgggaaccaacctccaccctgacgagtgagacctgaatgaacagggaactggtcaacctgttcagcagtggtggttttttttttttttcccctgagacagttttgctcggtcacccaggctggagcacaatggcacgatctcagctcactgcaacctccacctcccgagttcaagccattctcctgcctcagcctcccaagtagctgggattacaggtgattgctaccatgcctgggtaatttttgtatttttagtagagatggggtttcatcatattggccaggctggtcttgaactcctgatctcgtgatccacctgcctcagcctcccaaagtgctgggattacaggcgtgagccaccgtgcccagcccaccagtgttttttatgggctctctaaacttgagtggagctcagcttttcaggtagtgttctgggctgctctatgaccttgttatcacaggggtgccgtatgacctccaaggtaggcaccaccatttctggaacttggattcctcataacctcttcaagatgaagccagagacatttacacttcttctctttcagaatattttcttttttttcttcttcttctttttttttttttgagatggagtcttgctcttatcacccaggctggagtgcagtggtgcaatctgggcttactgcaacctctgcctcctgggttaaagtgattctcctgcctcagcctcccaagaagctgggactacaggtgcataccaccacgcccagctaatttttttgtatttttagtacagatggggtttcaccatgttggccaggctgtacttgagctcctgatctcaggtgatccacctgccttggcctcccaaagtgccgggattacaggtgtgagccactgtgcccgccctcagaacatgttcttgatattgaactgctcagtgttggaaggcagcagtgttgggatctcagttgctggaatttctgagcaagcaggatgaggacaagattctcctgcttcctgctctctctctggggtctcagggaggtgctctgtcatgggaccttgcaaagttctgctatgaaaggttggtgctttgtttccccaagtgagaaatcatatatgctcttgataaaatattcagacagtatgaaaagatatttttttaaaaatctaacattctaatatctaacattctacttcctggtgataacaactgttaatattttgaatatccttatggacttttaaaatgcatacacacacaatttaacaaaattgaagctttgctgttcatcctgttttgtaataatttttttctcctgtaccatgggggcctttacataacaatatcattacttttaatgactgcctggaatttctttgttctcttttttgacagayaccatttttaggatgcttctaaattttttgttttaataaataatgctgtgttgaatattcttctacatacattccaataatttctctcgggtcaaagggcagcacatttaaactttgtatacattgccaaattaccctctggaatggttctagaaatttctattctcaccaacaattcatgaaaatcacaatcataggatattttttctaattacattataatagggtaaaagaagcaggtgatatccaccaacagagaaaggaagctccttctccagccccctaattcttcatcggagccttccttgaaccccacctccaactgaaaatctctcgtgacttggtggaatcgagatttttttaaaaattatcataacatgagcaaaaaatgcaaaccttcttaacatgatggaaaaaaaaaaacaggaaaaccctattagtgtattaaaagaaaaacagaaaaggatgggagagattttatccaagtgataactctctttgctttgttttgaaatttggttctctaaaggcaggaccatatcatgacactaac

SEQ ID NO: 667601 - DNA, 1972 bp, Homo sapiens
tgcatgatgaagagggtttgtgttaagtatctttgggaaccaacctccaccctgacgagtgagacctgaatgaacagggaactggtcaacctgttcagcagtggtggttttttttttttttcccctgagacagttttgctcggtcacccaggctggagcacaatggcacgatctcagctcactgcaacctccacctcccgagttcaagccattctcctgcctcagcctcccaagtagctgggattacaggtgattgctaccatgcctgggtaatttttgtatttttagtagagatggggtttcatcatattggccaggctggtcttgaactcctgatctcgtgatccacctgcctcagcctcccaaagtgctgggattacaggcgtgagccaccgtgcccagcccaccagtgttttttatgggctctctaaacttgagtggagctcagcttttcaggtagtgttctgggctgctctatgaccttgttatcacaggggtgccgtatgacctccaaggtaggcaccaccatttctggaacttggattcctcataacctcttcaagatgaagccagagacatttacacttcttctctttcagaatattttcttttttttcttcttcttctttttttttttttgagatggagtcttgctcttatcacccaggctggagtgcagtggtgcaatctgggcttactgcaacctctgcctcctgggttaaagtgattctcctgcctcagcctcccaagaagctgggactacaggtgcataccaccacgcccagctaatttttttgtatttttagtacagatggggtttcaccatgttggccaggctgtacttgagctcctgatctcaggtgatccacctgccttggcctcccaaagtgccgggattacaggtgtgagccactgtgcccgccctcagaacatgttcttgatattgaactgctcagtgttggaaggcagcagtgttgggatctcagttgctggaatttctgagcaagcaggatgaggacaagattctcctgcttcctgctctctctctggggtctcagggaggtgctctgtcatgggaccttgcaaagttctgctatgaaaggttggtgctttgtttccccaagtgagaaatcatatatgctcttgataaaatattcagacagtatgaaaagatatttttttaaaaatctaacattctaatatctaacattctacttcctggtgataacaactgttaatattttgaatatccttatggacttttaaaatgcatacacacacaatttaacaaaattgaagctttgctgttcatcctgttttgtaataatttttttctcctgtaccatgggggcctttacataacaatatcattacttttaatgactgcctggaatttctttgttctcttttttgacagacaccatttttaggatgcttctaaattttttgttttaataaataatgctgtgttgaatattcttctacatacattccaataatttctctcgggtcaaagggcagcacatttaaactttgtatacattgccaaattaccctctggaatggttctagaaatttctattctcaccaacaattcatgaaaatcacaatcataggatattttttctaattacattataatagggtaaaagaagcaggtgatatccaccaacagagaaaggaagctccttctccagccccctaattcttcatcggagccttccttgaaccccacctccaactgaaaatctctcgtgacttggtggaatcgagatttttttaaaaattatcataacatgagcaaaaaatgcaaaccttcttaacatgatggaaaaaaaaaamcaggaaaaccctattagtgtattaaaagaaaaacagaaaaggatgggagagattttatccaagtgataactctctttgctttgttttgaaatttggttctctaaaggcaggaccatatcatgacactaac

SEQ ID NO: 667602 - DNA, 1972 bp, Homo sapiens
tgcatgatgaagagggtttgtgttaagtatctttgggaaccaacctccaccctgacgagtgagacctgaatgaacagggaactggtcaacctgttcagcagtggtggttttttttttttttcccctgagacagttttgctcggtcacccaggctggagcacaatggcacgatctcagctcactgcaacctccacctcccgagttcaagccattctcctgcctcagcctcccaagtagctgggattacaggtgattgctaccatgcctgggtaatttttgtatttttagtagagatggggtttcatcatattggccaggctggtcttgaactcctgatctcgtgatccacctgcctcagcctcccaaagtgctgggattacaggcgtgagccaccgtgcccagcccaccagtgttttttatgggctctctaaacttgagtggagctcagcttttcaggtagtgttctgggctgctctatgaccttgttatcacaggggtgccgtatgacctccaaggtaggcaccaccatttctggaacttggattcctcataacctcttcaagatgaagccagagacatttacacttcttctctttcagaatattttcttttttttcttcttcttctttttttttttttgagatggagtcttgctcttatcacccaggctggagtgcagtggtgcaatctgggcttactgcaacctctgcctcctgggttaaagtgattctcctgcctcagcctcccaagaagctgggactacaggtgcataccaccacgcccagctaatttttttgtatttttagtacagatggggtttcaccatgttggccaggctgtacttgagctcctgatctcaggtgatccacctgccttggcctcccaaagtgccgggattacaggtgtgagccactgtgcccgccctcagaacatgttcttgatattgaactgctcagtgttggaaggcagcagtgttgggatctcagttgctggaatttctgagcaagcaggatgaggacaagattctcctgcttcctgctctctctctggggtctcagggaggtgctctgtcatgggaccttgcaaagttctgctatgaaaggttggtgctttgtttccccaagtgagaaatcatatatgctcttgataaaatattcagacagtatgaaaagatatttttttaaaaatctaacattctaatatctaacattctacttcctggtgataacaactgttaatattttgaatatccttatggacttttaaaatgcatacacacacaatttaacaaaattgaagctttgctgttcatcctgttttgtaataatttttttctcctgtaccatgggggcctttacataacaatatcattacttttaatgactgcctggaatttctttgttctcttttttgacagacaccatttttaggatgcttctaaattttttgttttaataaataatgctgtgttgaatattcttctacatacattccaataatttctctcgggtcaaagggcagcacatttaaactttgtatacattgccaaattaccctctggaatggttctagaaatttctattctcaccaacaattcatgaaaatcacaatcataggatattttttctaattacattataatagggtaaaagaagcaggtgatatccaccaacagagaaaggaagctccttctccagccccctaattcttcatcggagccttccttgaaccccacctccaactgaaaatctctcgtgacttggtggaatcgagatttttttaaaaattatcataacatgagcaaaaaatgcaaaccttcttaacatgatggaaaaaaaaaaacaggaaaaccctattagtgtattaaaagaaaaacagaaaaggatgggagagattttatccaagtgataactctctttgctttgttttgaaatttggttctctaaaggcaggacyatatcatgacactaac

SEQ ID NO: 667603 - DNA, 1295 bp, Homo sapiens
tccaactaatctgtatctgtccaaccgatatttattgggcatctatatgtgccaggactgactgaggtggatgctggggatgcagtgtgctataagaccaaccaggtctttgctctcacatagtgtatggtcaggactgtcgctctgtgcctcagtttctccagtgtataagccagtggaagtagcccaggcattttcatgtggcgttttctgaaacccatgggcagatcggagtctcttatccctgatttggtctgagtagctttgctttgctatgttttatatttggcttcttataatgttttgtttgaatacagaagtccataattaaagacagaaagggtggggtagaactgaacaccactgaccaaggattccctaaggtttttccaggtggaatgttctgtgatgttgccagctaagaggactgtaggttctctgggctgctaggccacaacamgggggctgatatacgggaccgggtcagttgcatttaggatgtaaacctgcctgagatgattgacatctgccttcattttaaataatgcaacaagagagcaaatcctgccatgtttctcactgaggtgaccaagggcttcatttccaaaggcatcttccctctcacactccggatcctacctgggcctcaaggccccaccatcaccccttgctcccagagctccttcagggccagcagccttcagggacgatgcccttttccgggatgcccctgccccagctgctcttgatgcacccactctgtgatgatgtggggtcctggcctctctctccagctgggctgtgtgttcttcaagcgtgaggcttgttgaagggatgttaggtgaggtaccggttggtcttccttattccctgaaatgcaggtgggagaagctagtagcagcccagtgggccagccctctgccacctttccctcccttctcagcaccctccctccttccttctcaacaggtgactgagggacaccaggctctgatgacaaagacatcctgactcttttccaaaagccacatacaatgtctgggcagggaaacaagaagtgggaccgtgcattttatggataatcttttgttttgaaagcttcagcaaagcacttattgacacagccaaatcagacaactgtcatgtgccgcctgctgcctgggcctgctccaggtcccagctgtcactctcccctaggctgagctgtcttgtgtttgtttctttgggatgcacattccttctctccctgaaggctaaattcatgcaaagagcaaggaaagcttcggggctgcaga

SEQ ID NO: 667604 - DNA, 1295 bp, Homo sapiens
tccaactaatctgtatctgtccaaccgatatttattgggcatctatatgtgccaggactgactgaggtggatgctggggatgcagtgtgctataagaccaaccaggtctttgctctcacatagtgtatggtcaggactgtcgctctgtgcctcagtttctccagtgtataagccagtggaagtagcccaggcattttcatgtggcgttttctgaaacccatgggcagatcggagtctcttatccctgatttggtctgagtagctttgctttgctatgttttatatttggcttcttataatgttttgtttgaatacagaagtccataattaaagacagaaagggtggggtagaactgaacaccactgaccaaggattccctaaggtttttccaggtggaatgttctgtgatgttgccagctaagaggactgtaggttctctgggctgctaggccacaacaagggggctgatatacgggaccgggtcagttgcatttaggatgtaaacctgcctgagatgattgacatctgccttcattttaaataatgcaacaagagagcaaatcctgccatgtttctcactgaggtgaccaagggcttcatttccaaaggcatcttccctctcacactccggatcctacctgggcctcaaggccccaccatcaccccttgctcccagagctccttcagggccagcagccttcagggacgatgcccttttccgggatgcccctgccccagctgctcttgatgcacccactctgtgatgatgtggggtcctggcctctctctccagctgggctgtgtgttcttcaagcgtgaggcttgttgaagggatgttaggtgaggtaccggttggtcttccttattccctgaaatgcaggtgggagaagctagtrgcagcccagtgggccagccctctgccacctttccctcccttctcagcaccctccctccttccttctcaacaggtgactgagggacaccaggctctgatgacaaagacatcctgactcttttccaaaagccacatacaatgtctgggcagggaaacaagaagtgggaccgtgcattttatggataatcttttgttttgaaagcttcagcaaagcacttattgacacagccaaatcagacaactgtcatgtgccgcctgctgcctgggcctgctccaggtcccagctgtcactctcccctaggctgagctgtcttgtgtttgtttctttgggatgcacattccttctctccctgaaggctaaattcatgcaaagagcaaggaaagcttcggggctgcaga

SEQ ID NO: 667605 - DNA, 642 bp, Homo sapiens
tgcaatagctttatgcaacttactttgccataaattcttaaactattccaaaaaatcaagaaggggctcctccttaacttattctggcagagacacaacaacaaaaagaagaaaaattcaagctaatatccctgatgaacatagatgcaaaaatcttcaacaaaatgccagcaaaccaaatccaggaacacatcaaaaagttaattcaccacaataaagtaggctttacccctgggatgtaaggtttattcracatacacaaatcaataaatgtgaatcatggcacaagcagaataaaaaacaaaaatcaaatgatcatgttaatacatgcagaaaaagactttaataaaatccaacacctcatcatgataaaaacccttaacagagtaggcatcaaaggaacatacattaaaataataagtaccatctatgacaaacctacagcaaatatcatacagaacagacaaaaactataaccatccacttgggaactgaaatgagacaaggatgcccactctcaccactcctgttcaacacagtactggaagtcctagccagagcaatcaggcaagataaataaataaaattcatccaaataggaaaagaagaagtaaaactatccctcttcattgatgatatgat

SEQ ID NO: 667606 - DNA, 630 bp, Homo sapiens
tgagcaatatattctgagccatgctcagggcaattgactgctatataaaaggagatagtggaacaacagccaaattcagtgtgctgcaggccayaaagcatcaacgatgactgatatatctgtactaggacattgtgaaaaacagagagttcttaattcaccaatggtaactgagtatcttgtaaggatgtaccaggctctgtactagacactagaaatatgaggttgacacagctcctgatactcatagactcattgtctgtttaaaggtatttacaaataaatcattcaatcaaattagaacaaagataatatcaccatctgtaccatgtctagcttctgctcttcttccaatcccaaatgtctttaccaaggagacatttgacattctgggtctagaattctgtccaagaaagaggtgggttgtgccagagaaagaatcatgtatttagtttaattttaaaaatatattttcagcaggtcaacaagacactggaagaacaaacatgatagaaagtagaatgttattgagtatgtgtgctcctacaatctctggtggtttgagccaagatagagttgatattttaccaagtataaaaggaggtctggccctatttgagctgcagtcag

SEQ ID NO: 667607 - DNA, 623 bp, Homo sapiens
tatacacatatatatacatatatatacatatatatgcatgtgtatatgtaatattaactttgacatttccaatatatgggttttgtggtcacccttaaaaaggaataaaatgcttttctcacctttcgcaactggactgacatcctgcaagttagttccgatttctgagaaatgaactctaaaaagcacttgtttactttgtctctactaattcttcaaaagtgcaagtggaggaaacattarctacagtagcttcctgattttgaggacagtgtctgccttgccctatactctattgggcccagcacatagtaggtaaaacaaatgaataaatgattataaattgtatttgtattattgtattataattgcatttgtaatgcaggaaggtgacaatatattattctattggttggaaacaaaaagcctaagaatgcaatcatcttttttgccacaaatttcaaactttgccctacaactgcaatctaacatgtgttagattgaacccagttcctcagtgccatcacaaaaccatcatttttatcccctgcataaacatgattcacctcttagacatctgtccagagtctaagacatctgtccagagtccagacctaagagtg

SEQ ID NO: 667608 - DNA, 613 bp, Homo sapiens
tttaaaccatgtgggcagatgcccatgaatgccggaaggggccttcttggtattttattggcaataactcaaagcttattaaaatccagatggaaggacctgcagcatatttaagtccatatgcccaaatgagtactgcagtatttaattgcttgcatttcagtcataattcctttcccttgtcttactttttctccaaagtgcttatatagtctttcagttgatgtccccctgaattatctttaaaacctgttctaatgctcatttgtaaagcacttaggttaaattctatgtatratgttttactatttttttattggtgttaaatgaacattgagccatgaagaggcaattgggtgagtcatttgtgactctttctattgtagctctattaaattaaaaatgtctggtttttaatccaataatattttcctgaacacattaaggctattacgtacacatggcatgccatctctgcagtttggagaattagtaagagagtcctactcttgcaaatattgtgtccattaactgacacctagaacatacctcatgttactcaagtcaataatgctatttatggttttaatagcatgaaatcaaaataatgata

SEQ ID NO: 667609 - DNA, 2621 bp, Homo sapiens
ttgctagctagtgtcagagtcaggattcaaactcaggcaatctgatttttgtctggagatcattctcctaatcttttttcattctcctggatatagataaattagactgagccacaaaataaaaatatacttctaattaaacataagatttgaaataaaaatcgtgcttgaaagtgctgacttgtatgttttaaactctgtgtgtatttgtatatttctgtcattttcaaaaatatgaagtaatttctaactatatattattaaacatatacagttattgcttatagtgttatatgccaaaactgcttttaggtgagaatgattttaacactgcatttgctgttggcatggataggaaaaaaatgttattaacacaaactttaaaaattaagaagtctttgttaaagaggttaaacatttccctgccatctttatcctaacttccattgaaaagtttcccctccatatatagcacaaatgtaaattttagcttatcttttctaaatttttataatttcataattaggaagatccaactagatgggatttaactgtaatttttctattaaggcttcgaaaacctcagaatatatcagacgaattagttataaaatttaatactctatatatagtctctggagacgcaaacaaatattgagctttaaatgatgtgttctaagtagattttttatatgtgagtgttttactgtgctgctatataatatcatttgtcatatatgaaataaacagtattctatatatgtggttagcagacaagagtttcagatctcatctgtacaatggaattatgatgaccttttgaaataacattccactctttaatcttaaaattaataatgtcatacggattaaaacattattcatttcttttctttaccatggctcatgtatcttggagtcacaaaaccacttattaccagggatgtattggtctttgaagttcatataattacaggagaaatttaactcactcacctttagtgggttttatatattatagcagaagattattataattctatttaattagcagaatgaaaaggtarcttgaaaaatattttccaattcttgtttggatgactcaggggccattgtcaatcttccaccatggtaatttaatgtcccctgaaatgttgtatgccaaaatgattaagtatcattacaaggagaaatttttatacaaaggcaaataccacagcagatcatgttcactcaatcacaattaaaatgaacgcactttaatagcactctagttttgtttattaagcacaatgaagcaggtgctttacgctagaaaaattcatcttgtttatacctgagacatgtaactgaaatcatcctgctgtccatattctttgtgggagcttcatttatttggtaagctttagagagaaataaaaataagcatatcacataacatgacaatgccaacctctttcagcacagccttgaattgtctaagcaccttcatgtattacaaataaattccctgggcaacatttcctctggagtctaattagattccactccatgtatttacaaacaggaagcaacaaggctgtgacttcatatttccactcaaaggcctcctcaattaacatatgacattggtgttatttgggaatgaacactgagttcgttgtaagttccccgtataacaaagaaaaatggcctattttttgttatctcaaagatgacaatcattatattatttccatattattacttgacaaatagagacagtttaatactaaaatgtttctggtgcctttgaaaaatgggcaggtaataggtgggaatcataatttagggattaaatatctggagtacacttggagaatgaactctttgataaataatggcatagaaaagatcccattacaccagaagatgtggacagaggtaaagtgtcataaaagcatgcaccttcgtaaagtattgagaaagcagtgcccacctgataccatcagtgctcaaactgctaccatctttatagttttaaaaaaatacttatgcatgtaaatatctctatatgaaacagattccaagatgattcaagagaaccaaaaatatttttctgttgtttaggtatttggtattattttaatagagccaatttcaattctccacaaccaaaaatattcttagtacaaaaaatctaatttaattgaaagccattttagttcaatttcccgttaaatgttcttttaggccatagtatatctatatattgttagggataattttttttcttttggcattaacaagaatatatgtatgcaagcattggaaagcatgaatagcactcttagtgattacatgactataaattaaaataaccatacagctgttggtaatatttatcattctatattcataattgtgtccctaataaagcactgcaggcctcagaacagggtattctcctttctgttccactccaagtggaacaaatagtgacatgccgtttccgacccttgagtattaacccggcagtgattattttgcctgtcgttaaaataacaagaatgccgatctctattggattcggttactgtatggactgctggagattcaatgtggttcaacaatatcactga

SEQ ID NO: 667610 - DNA, 2621 bp, Homo sapiens
ttgctagctagtgtcagagtcaggattcaaactcaggcaatctgatttttgtctggagatcattctcctaatcttttttcattctcctggatatagataaattagactgagccacaaaataaaaatatacttctaattaaacataagatttgaaataaaaatcgtgcttgaaagtgctgacttgtatgttttaaactctgtgtgtatttgtatatttctgtcattttcaaaaatatgaagtaatttctaactatatattattaaacatatacagttattgcttatagtgttatatgccaaaactgcttttaggtgagaatgattttaacactgcatttgctgttggcatggataggaaaaaaatgttattaacacaaactttaaaaattaagaagtctttgttaaagaggttaaacatttccctgccatctttatcctaacttccattgaaaagtttcccctccatatatagcacaaatgtaaattttagcttatcttttctaaatttttataatttcataattaggaagatccaactagatgggatttaactgtaatttttctattaaggcttcgaaaacctcagaatatatcagacgaattagttataaaatttaatactctatatatagtctctggagacgcaaacaaatattgagctttaaatgatgtgttctaagtagattttttatatgtgagtgttttactgtgctgctatataatatcatttgtcatatatgaaataaacagtattctatatatgtggttagcagacaagagtttcagatctcatctgtacaatggaattatgatgaccttttgaaataacattccactctttaatcttaaaattaataatgtcatacggattaaaacattattcatttcttttctttaccatggctcatgtatcttggagtcacaaaaccacttattaccagggatgtattggtctttgaagttcatataattacaggagaaatttaactcactcacctttagtgggttttatatattatagcagaagattattataattctatttaattagcagaatgaaaaggtagcttgaaaaatattttccaattcttgtttggatgactcaggggccattgtcaatcttccaccatggtaatttaatgtcccctgaaatgttgtatgccaaaatgattaagtatcattacaaggagaaatttttatacaaaggcaaataccacagcagatcatgttcactcaatcacaattaaaatgaacgcactttaatagcactctagttttgtttattaagcacaatgaagcaggtgctttacgctagaaaaattcatcttgtttatacctgagacatgtaactgaaatcatcctgctgtccatattctttgtgggagcttcatttatttggtaagctttagagagaaataaaaataagcatatcacataacatgacaatgccaacctctttcagcacagccttgaattgtctaagcaccttcatgtattacaaataaattccctgggcaacatttcctctggagtctaattagattccactccatgtatttacaaacaggaagcaacaaggctgtgacttcatatttccactcaaaggcctcctcaattaacatatgacattggtgttatttgggaatgaacactgagttcgttgtaagttccccgtataacaaagaaaaatggcctattttttgttatctcaaagatgacaatcattatattatttccatattattacttgacaaatagagacagtttaatactaaaatgtttctggtgcctttgaaaaatgggcaggtaataggtgggaatcataatttagggattaaatatctggagtacacttggagaatgaactctttgataaataatggcatagaaaagatcccattacaccagaagatgtggacaraggtaaagtgtcataaaagcatgcaccttcgtaaagtattgagaaagcagtgcccacctgataccatcagtgctcaaactgctaccatctttatagttttaaaaaaatacttatgcatgtaaatatctctatatgaaacagattccaagatgattcaagagaaccaaaaatatttttctgttgtttaggtatttggtattattttaatagagccaatttcaattctccacaaccaaaaatattcttagtacaaaaaatctaatttaattgaaagccattttagttcaatttcccgttaaatgttcttttaggccatagtatatctatatattgttagggataattttttttcttttggcattaacaagaatatatgtatgcaagcattggaaagcatgaatagcactcttagtgattacatgactataaattaaaataaccatacagctgttggtaatatttatcattctatattcataattgtgtccctaataaagcactgcaggcctcagaacagggtattctcctttctgttccactccaagtggaacaaatagtgacatgccgtttccgacccttgagtattaacccggcagtgattattttgcctgtcgttaaaataacaagaatgccgatctctattggattcggttactgtatggactgctggagattcaatgtggttcaacaatatcactga

SEQ ID NO: 667611 - DNA, 552 bp, Homo sapiens
ccaacagtagacaagcagaaagccaaatcatgaatgaattcccactcacaattgctacaaagagaataaaatacctaggaatagagctaacaagagaaataaaagacctcttcaaggagaactacaaaccactgctcaaggaaatcagagaggacacaaataaatggaaatacattccatgctcatggataggaaaaatcaatatcatgaaaatagccatactataaagttattttaacatatgtttaacataggtcctttgamgtctttgctaaatccaaaatcagtgggttggtggtggtggggtgttcagtcacacattttccattgattgctttgttttttcctgagtatgagtcacactttcttcttcacataattttaattgaggattatatttttagataatatagcagtataatattgctttttgattcttttaatatttgctattgatttttacttttttccttcattagtgtttttttggcttttatttgtttctcatttttaaatcggagaggtctgtctctgccaaaatgtatggctgct

SEQ ID NO: 667612 - DNA, 661 bp, Homo sapiens
gcaaaaatatttaaagatgcttcttgtgttgtggggttatgtagaaatgatcctggtcttgtcccaggggtcatttgggtacagggaaaactggagcagcatgaagaaagacaaaatacaacatttgaaagagaaacagccagttaaataggacacatgtaccatacatgtttatgttgtctcccccaccactagcctctttaaaataatggcaaaacaacataaaaagaaggaataaccccacaaagacaaaagggaattgaagtagactcaactacaattcagaaatttcagcagactttgattaaatcacaaatgcaggagaggaactgactcagcagggaataagaatctayaatattaggtgtctgatgggaatttgataaagaagtaggccaccagaccctaaaaagctcatgcaaactcagcctcttagagaaaacaggtaattcctagggtgagttaaggtgtaatactgaatatatagaaagtggttgcacttgacagaaaacctttgaaattccaaagcttgcagaatcaggtaatggtctttcgccctcctccccaacccaaccctgaccaagaggctagagtttcatatttgaacaaatctgagaggctctaagaatgcaggggtggaactcaaatccaaaaatggaga

SEQ ID NO: 667613 - DNA, 315 bp, Homo sapiens
gaaccatattttatttaaccaatatcttatagtcatgcatttatgttgtttctagtttatcaatattataataatgtgatgaatatccttaarcatacatttttaaaaattagttttcattgtttctttaaaacaaatccctaagacagaaattactgggtcagggagtataaataatttatggatttggcacatattttcaaattgtcttctagaaagattgtactaccagtgatttatctattgctctaaattctcaataatgctgagtattacaagtttttaaaagatcaatgttaacataatttttaaaaa

SEQ ID NO: 667614 - DNA, 579 bp, Homo sapiens
ctggtcttaaactcctggcttcaagcaatcctttggcctcaagcaatccttctgcctcagcctcctaaagtgctggaattacaggcatgagtgaccacgcccacccagcattgtgaattattttctagttgttgtgtaggtactttgtttctttatttctcttgctgtcttcctttgtgatttgatggtttcytgtagtggtatgccttgaggcctttctatgtttgttatgcactgcactgtaatttaaatatttttcttttggatcttattcactagattgtgaagcgatgctttctccaaaaaatttctttcaagttttagagcaacaaatttacagcagattcagatggcaatacttgaaagtagtaacttttaggtaacattatagtggttgcttcttattcatctgcttccctcagcctgaattctaatagtgcaagagcactgacttcattatagtttaattattagcccatttacagaagtatagaaaacgagttgcctttttcgcctacagttaatctattcaggaaaagaatgaaacatatagttgaatttgtgtgaataagtttatac

SEQ ID NO: 667615 - DNA, 579 bp, Homo sapiens
ctggtcttaaactcctggcttcaagcaatcctttggcctcaagcaatccttctgcctcagcctcctaaagtgctggaattacaggcatgagtgaccacgcccacccagcattgtgaattattttctagttgttgtgtaggtactttgtttctttatttctcttgctgtcttcctttgtgatttgatggtttcctgtagtggtatgccttgaggcctttctatgtttgttatgcactgcactgtaatttaaatatttttcttttggatcttattcactagattgtgaagcgatgctttctccaaaaaatttctttcaagttttagagcaacaaatttacagcagattcagatggcaatacttgaaagtagtaacttttaggtaacattatagtggttgcttcttattcatctgcttccctcagcctgaattctaatagtgcaagagcactgacytcattatagtttaattattagcccatttacagaagtatagaaaacgagttgcctttttcgcctacagttaatctattcaggaaaagaatgaaacatatagttgaatttgtgtgaataagtttatac

SEQ ID NO: 667616 - DNA, 607 bp, Homo sapiens
gtgggagctaaatgatgacaatacatgaacacaagagaacaacagacactgtggcctacttgagggtggatggtgggaggagggagaagtgcagaaaaagtaactattgggtaccaggcctagtaccagggtgatgaaataatctgtacaacaaacccctgtgacacaagtttaacgatataacaaacctgcacatgttaccccaaaccaaaaataaaatatttttaaaaaagaatatttcaaaattgaatattatttactcttaaaaaaagaacaaatttaccaaccaaaacccaggaagagggtgtggggaagggtgatagccacaaaggcaaagttacgagcatgtccagagggaataaatcctatatgagcatcttcacatatctccatgccaccctcaccctgtgatccttggaggatgaacttgtagaaacttcatgcttatcacatcacagcagtttacccagaaagtttcatatcaaattttctcttttgytttcctcattaatgtaacacaggagtctaaacaatatcacttcatatagtgaaagtgtgacattttaaaactcgagaggtgtagggattctcgatcattttctgtcta

SEQ ID NO: 667617 - DNA, 727 bp, Homo sapiens
gtggatcctgtgcaagaaaggatgtggttactgtggcaaccctacctggcagggtttctgctccaagtgctggagggaagagtagcacaaagccaggcagaagcagattcaggagtactgggagctggtggaacggtaaaaggacttaactaggggcggttgatcagtgatgtgactggatacatagctctgtcaccgtgcaaatacattttttctcttctgcattcagctatcagcaagtcagtttaatattaaggaaaaggatgttttcccctcttcttctcagtcaacctttaatgaacagctttcagtagtttcttcattttgtgtttgtcttaacttctggttattttctttggattgtgttagtcttagttctcaaatttaracaaattccttggagtggaagaatggagacaggcatatttcctggtgaagattaaatgagctaataaatatgatgtacccagcgcagggcttgcaaatggcagtcatcaagcattatttctctcgttcttttactatattcagcatggcatgtagctcagtgataaaacagtagtagaactctggtgactcgtatacatagtccttgcattatagaaatttattccttaaaaattaggttactcaaaggcagtttgtattatctggatatacagtgatgttaaaaattaaatgatgggtcgggcgcagtggctcacgcctgtaatcctagcactttgag

SEQ ID NO: 667618 - DNA, 727 bp, Homo sapiens
gtggatcctgtgcaagaaaggatgtggttactgtggcaaccctacctggcagggtttctgctccaagtgctggagggaagagtagcacaaagccaggcagaagcagattcaggagtactgggagctggtggaacggtaaaaggacttaactaggggcggttgatcagtgatgtgactggatacatagctctgtcaccgtgcaaatacattttttctcttctgcattcagctatcagcaagtcagtttaatattaaggaaaaggatgttttcccctcttcttctcagtcaacctttaatgaacagctttcagtagtttcttcattttgtgtttgtcttaacttctggttattttctttggattgtgttagtcttagttctcaaatttagacaaattccttggagtggaagaatggagacaggcatatttcmtggtgaagattaaatgagctaataaatatgatgtacccagcgcagggcttgcaaatggcagtcatcaagcattatttctctcgttcttttactatattcagcatggcatgtagctcagtgataaaacagtagtagaactctggtgactcgtatacatagtccttgcattatagaaatttattccttaaaaattaggttactcaaaggcagtttgtattatctggatatacagtgatgttaaaaattaaatgatgggtcgggcgcagtggctcacgcctgtaatcctagcactttgag

SEQ ID NO: 667619 - DNA, 601 bp, Homo sapiens
cttcaaaagtattaatgacaaactaacgtttggaatatggggaacactgtattttgcttctagtgatttggagaagtaggcaataatgtcgctcacctctactaaatgtatattgtaatgtgtacattaaatttaaaattgtacaaatgatttctcatcctcaaaagactaactcgttttcaggttaaaagtaaacatcattttatatatatatatacatatatatatatgtatatatatatatacacatatatatgtatatatatatacacacacacgtctataatgctatatataaaaaatatatctgtatgtgtgtatatatctataatgctatatatacatatataatacatattatatatgatacatagatatataatgtattatatatttatatagcatgtgtatatacatatatgctatatataggattatatatgtgtatacacatatatgtatatattatatatacatatacacatgtatgtacatattatatacatatacacatgtatgtacatattatatacatatacacatgtatgtacatattatatacatatacacatgtatgtayatattatatgcatatatacat

SEQ ID NO: 667620 - DNA, 601 bp, Homo sapiens
cttcaaaagtattaatgacaaactaacgtttggaatatggggaacactgtattttgcttctagtgatttggagaagtaggcaataatgtcgctcacctctactaaatgtatattgtaatgtgtacattaaatttaaaattgtacaaatgatttctcatcctcaaaagactaactcgttttcaggttaaaagtaaacatcattttatatatatatatacatatatatatatgtatatatatatatacacatatatatgtatatatatatacacacacacgtctataatgctatatataaaaaatatatctgtatgtgtgtatatatctataatgctatatatacatatataatacatattatatatgatacatagatatataatgtattatatatttatatagcatgtgtatatacatatatgctatatataggattatatatgtgtatacacatatatgtatatattatatatacatatacacatgtatgtacatattatatacatatacacatgtatgtacatattatatacatatacacatgtatgtacatattatatacatatacacatgtatgtatatattatatrcatatatacat

SEQ ID NO: 667621 - DNA, 413 bp, Homo sapiens
agttcattcttggaatgtctttttttttttctgttagagattttctttcattttctttttatttttccccaggatgctatcatgcctacgtttctcctggttagtttcacaggatattttccaaagagaacttgaataaaacagacttgattaccactgttttattctcaaaataagctaatggctattaagacttgttccttgatttgagggggctttttggtatacttattcaaaaaggcagattcaaaataagctctctacttctttattcctcagaatctctgtttgtatgtaattggctaacaaaacccattgcttattagctttgtctcagtgctaaaaaaaaaaaaaaaagtccttaaaattattgcaaacctgcatctrtcacacctgattactccaggaggaaa

SEQ ID NO: 667622 - DNA, 1337 bp, Homo sapiens
aaaaaaaaaaaaaaaaaaaaaaaaaaaaaaaaaaaatcccagtgggataacagttagaaattgattaaatgagtgtgaactgttagcaaactccaagagaatgcagtggtagagattataatgtgtagaaagagagcaaattaagaacttctgggctcaaaataaacttgggatctattcttaactcacctaagtacttyaacccattaaaggaagcccattggagtgcaggtagcacaggaaagaggaacatcatgtatttgataaacctggctacctcatttctggtgagagtcaggccttttggagcttggataaatcagaatctgcaaagaacggaggcaatagtattttacaggtggtgggatcaaaagctttctcctctagggaaaaattgctctattattttccatttctagcctcagggttagaattcagattgatgctcccatgagtgtagtccagccagagccttctgtaaaaaggattttacttagttcattcctttatgtaattttgggcctccagtggtggcttcaaatttttggatctcaatagagcaactgcagaaacatccctgggatgtacaattgtctcttagagtattttaactttcaaccccctggtacatatagacttatgggctattacagaaaatccttgaaatgtgtttgtgtgtgtgcgtgtgtgtgtgtgtgtgtgtgtgtgtgagagagagagagccagagacgagtaaataaacctccactttgttaagatatgaaactacaagcatttaaattatttctacatgtgtctgtatctccatttacattgagtaaattatgaaaattatgactgaattaatttgctctaaactccaaatttgtattcagtagagatgatgtgcacttgcaatctgtgtcatacctttgtatatgtgactttaaatatatcctcctaaaattaacaaaatatgaacatagtaattgcctcctggataagctcacacattacaatattaggcttctatataaaaacttctgaaggatttttcctccctttcttaatgataaaaaatcagactactggagaagactatcaagaaaggagtcttcattctatccaccagatgtacacgttaggggatgcctgctgccaagcacaaagtatgccttatatccaagtgtccagacaagggtcctgtcattaacaagatttgggcccagcactaatcatttatttataattgatgagaaagttaaaacaatcgttactcatttcaaggccccaaagtggcagacctgttgtgtagctcaaaaatggagggcttgaccaggtaacgtgttctaattatg

SEQ ID NO: 667623 - DNA, 674 bp, Homo sapiens
taaaaaatatattttaacattcagttttgtttgtaagtcgcatggaacttagaaaccacctgccattcttattttaaaaagtygtatttctgtttttgtccctaagtgattaggggttaataagatttgctttcttaccaccatgtcccttaatgaatatatattaaaacaaactttcttctctctcaaatcatgtttttttttgtttttgtttttttcagaatttcctatttgtaatgtcatcacttttctctctggtccagaagaatagagcaacatacttgtcttttgctcttctgcctactttaatcctcttacctatttaatcattaagactcgctttttccctttaaaaacagcctcttcattcctattgctaattacttggttcaagttcttattccttataatacaactatattataacattcatatgacctcctggcttccagctcctaatttattttttataccatgttcacattaattggggtgagtgataaatttctccattaaactgtttcagcaggataaatcgataaccctggagtatgggtttacatctgctcttgactcttttcctccatcaaccccttcttgtctgtcccatatcaattgagtagtaatttagcctaggcttcaagtagggctaattgcatgttaacatgcaccag

SEQ ID NO: 667624 - DNA, 674 bp, Homo sapiens
taaaaaatatattttaacattcagttttgtttgtaagtcgcatggaacttagaaaccacctgccattcttattttaaaaagttgtatttctgtttttgtccctaagtgattaggggttaataagatttgctttcttaccaccatgtcccttaatgaatatatattaaaacaaactttcttctctctcaaatcatgtttttttttgtttttgtttttttcagaatttcctatttgtaatgtcatcacttttctctctggtccagaagaatagagcaacatacttgtcttttgctcttctgcctactttaatcctcttacctatttaatcattaagactcgctttttccctttaaaaacagcctcttcattcctattgctaattacttggttcaagttcttattccttataatacaactatattataacattcatatgacctcctggcttccagctcctaatttattttttataccatgttcacattaattggggtgagtgataaatttctccattaaactgtttcagcaggataaatcgataaccctggagtatgggwttacatctgctcttgactcttttcctccatcaaccccttcttgtctgtcccatatcaattgagtagtaatttagcctaggcttcaagtagggctaattgcatgttaacatgcaccag

SEQ ID NO: 667625 - DNA, 590 bp, Homo sapiens
tttgtgagcagacgccaaacattctgtacccacctttctgcccttttccacttttttctgacccctctactctctcctcataaacatcaaagttgcttgagtttaggttgaaaaagcaaaaccattccaatttcttgtgctgtctctgaattaacctaatacagtgaccatataatttatcaattaaatctggacattttgagagaagtggaggcactattaaaattacactctaataactggtataaacagtgattgtcctcgacaaatgggaatatatggctactctatacagtaagacaaggtttagtctatctccaagagcatctttttagatctaacctaatcatctataaaaatatgaaacaaaataatatgatggtgttcagaattctgagaggtagactattcaattatttggcactggactgtgtgtatttcagagccaacgttgcttcatgagaacaagatgaaattatgatgaagatgactagttaagctttttaagtatttgtttcagatgaacatttagatgtttattaagtrttattatttattgtgctagaaatagggtaaataaattaggaaca

SEQ ID NO: 667626 - DNA, 675 bp, Homo sapiens
tttttttttttttttttttttttttttgagacagggttctcttgtcgcctaggctggagtacagcagcaggatgtcggctcactgcagcctccacctctctggctcaagccatcctcctgtctcaacctcccaagtagctgggactacaggcgcaggccaccaaacccagcatttttttttctttttttaaaawagagacagggttttgccaaattgtccaggctggtcttgaactcctgggctctagcaatccatctgcctcagcctctcaaagtgctgggattacagacatgagccagcgcacctggcctctatgaagtatttttgccaaaaatatttgacccaaatttagtcaaacctctctagatctaacttctagtttacaggaaataaaaggaatagagaaacaacaggaattgagaaacaaaatacatgacattttaagcatacaataagaaattccaaaatatggaacgttctttaaaaagatgaggctagctgtttgtggtgacagagtcaggaaggggcagcaggtgccaggtccggcctcaaaggtggcaagaagaaccctttgaaactgcccaaaaagcaggccaagaagatgaataaggctttcaagcagaaacaagaaaaggaacgaaagaaacacaaggagctaaaagcgaaagcctcct

SEQ ID NO: 667627 - DNA, 1147 bp, Homo sapiens
gttttgttttgtttgagacagagtctcgctctatcgcccaggctggagtgcagtggcgccatctcggctcactgcaagctccgcctcccgggttcacgccattctcctgcctcagcttcccgagcagctgggactacaggcgcccgccactacgcgcggctaattttttgtatttttttagtagagacggggtttcaccgtgttagccaggatggtctcgatctcctgatctcgtgatccgccygcctcgccctcccaagatgctgggattacaggcgtgagccaccgcacccggtcaaggtcactatgtttttaaagcaaacagggaagagagttcagggactaacaggaagtatacacaaagacagcctggcctcctgggtctacaaaaggagagaggagaggccttaggaccaatattgcagtccaactaagttttaaggaaattgtctctaaaattacccacattggtctgttattagcctctgttcctatctgaaaattaaaaggtttaagagaatcctgacctgtgcctggtttggtataaccatatttgcaaagagctaatatttggagaaagtagtaaggaaaagctatctgattccactatccaaccatccgtccttttaagtgtctgactataatccacacagacatacttagcaaactttaaaatacagcctctcaacattgttacaattaagtcactctgaaatgtcatgaaaagcaatctagtcccattaaaatcttcacactctcattaaaaaagcacttacagacttgaaaatgttcctaatacattatttaaagacacaagatgtacagtgactaaaatccttgtataaggagaaacagtagcagcctgcttttttaaaaaaatgtgcaaatttgtgttataattgggtaattgggaaactgcaggtagcagtcaggttgtattatactagtttaaaaaaggtttagggggcctttccctaccccctcctccaaaatttcagaccacccagggacaaccacaacaacagtataaacaacatacctcttagttcaactaatggtccctccttcttccttccagcatttctaagcccaggaaggaggtaggggaagaaggagaaaaaaaaaaaaaaaaaatccagaccgtttc

SEQ ID NO: 667628 - DNA, 575 bp, Homo sapiens
aggaaaagcaggctttagatagagaaaaagacaagatcatttcatgccccaaaatgatctgagcagaggtgcaaaggtgaggaagcctccagcaagttacaggaacagggagtcaaccactgtggcttgagcaatgtagccacatggagctgccttasggagagagcctgaaaagaggctggactcacagcacagaggccctcccttaaaagccaggctactgagtatatctttcagcccagaagcggtgtggagtcactaaagtttttaagcaggagagtaaaatgatgaaagctgaattttagaaacaatatgagtccctgtacacaccaggcacgtaatcaatgaggtagtctgaacatacagattttaactgccaggaaagacgcatcttgtgacctaaaacttacagaaaaaccactcccctagtaaaatccatctcacaacaactcactttatccttttaatttaattaagtgcaaagaaagaaaaggaaacaaggaatgaggctcagacacactaacattgtctctaatgtctctaagactctcatgtccttcctaaatcaaaataca

SEQ ID NO: 667629 - DNA, 575 bp, Homo sapiens
aggaaaagcaggctttagatagagaaaaagacaagatcatttcatgccccaaaatgatctgagcagaggtgcaaaggtgaggaagcctccagcaagttacaggaacagggagtcaaccactgtggcttgagcaatgtagccacatggagctgccttagggagagagcctgaaaagaggctggactcacagcacagaggccctcccttaaaagccaggctactgagtatatctttcagcccagaagcggtgtggagtcactaaagtttttaagcaggagagtaaaatgatgaaagctgaattttagaaacaatatgagtcyctgtacacaccaggcacgtaatcaatgaggtagtctgaacatacagattttaactgccaggaaagacgcatcttgtgacctaaaacttacagaaaaaccactcccctagtaaaatccatctcacaacaactcactttatccttttaatttaattaagtgcaaagaaagaaaaggaaacaaggaatgaggctcagacacactaacattgtctctaatgtctctaagactctcatgtccttcctaaatcaaaataca

SEQ ID NO: 667630 - DNA, 872 bp, Homo sapiens
tccgtattttyttttagagtcacataagaatgatttaaaattctgtgtgtgcaactagctatgtaaccttggacaagttgatttctctaaactttaatctgtgtctgtaatattagagcactttctcacaaactaggggagtatgtgtgtgtgattctatatatacaaaacctaatagagtgtctgctgtgtagtttaggcgtctgcatgttatatttaaataataataaatacaatagcaggcttgaattaaatcctccctaatttgaagttttagtttcaatcaattgattgaattgtaaaattcctttttgattaaataaaaaaacctagaaatttaaattcaattttagccatagatttagtgaaaaatatattttggaaactgtattttttgtttcattatcataaaaatgaaagctaatgaccatataatttgactgaggtttcaaggacatgcacagtagcgttaaacataatttaattaattttaaatcatagttgccattaagtgttgagacaaagcccagtcttaataaatttaatcaatatttctttaaagccagaatattgctacaacattttagcatttattatgtatttgccttaaaatgcgtcatgttgttccttgctcaatttaagtttggtttatcaagtacacattctgtaaattaacatgtatgttttctatatttggtatttaaaattgaaaggctaacctttttaattttttagcacaagttttaattaatggaagactagaatcttatttttaaaacataccctatcaataaaatgagaaatttttttaaaaatataagtaaaatttattttaatatcattttcccaaaaagaaaaactcatatctaaaa

SEQ ID NO: 667631 - DNA, 872 bp, Homo sapiens
tccgtattttcttttagagtcacataagaatgatttaaaattctgtgtgtgcaactagctatgtaaccttggacaagttgatttctctaaactttaatctgtgtctgtaatattagagcactttctcacaaactaggggagtatgtgtgtgtgattctatatatacaaaacctaatagagtgtctgctgtgtagtttaggcgtctgcatgttatatttaaataataataaatacaatagcaggcttgaattaaatcctccctaatttgaagttttagtttcaatcaattgattgaattgtaaaattcctttttgattaaataaaaaaacctagaaatttaaattcaattttagccatagatttagtgaaaaatatattttggaaactgtattttttgtttcattatcataaaaatgaaagctaatgaccatataatttgactgaggtttcaaggacatgcacagtagcgttaaacataatttaattaattttaaatcatagttgccattaagtgttgagacaaagcccagtcttaataaatttaatcaatatttctttaaagccagaatattgctacaacattttagcatttattatgtatttgccttaaaatgcgtcaygttgttccttgctcaatttaagtttggtttatcaagtacacattctgtaaattaacatgtatgttttctatatttggtatttaaaattgaaaggctaacctttttaattttttagcacaagttttaattaatggaagactagaatcttatttttaaaacataccctatcaataaaatgagaaatttttttaaaaatataagtaaaatttattttaatatcattttcccaaaaagaaaaactcatatctaaaa

SEQ ID NO: 667632 - DNA, 872 bp, Homo sapiens
tccgtattttcttttagagtcacataagaatgatttaaaattctgtgtgtgcaactagctatgtaaccttggacaagttgatttctctaaactttaatctgtgtctgtaatattagagcactttctcacaaactaggggagtatgtgtgtgtgattctatatatacaaaacctaatagagtgtctgctgtgtagtttaggcgtctgcatgttatatttaaataataataaatacaatagcaggcttgaattaaatcctccctaatttgaagttttagtttcaatcaattgattgaattgtaaaattcctttttgattaaataaaaaaacctagaaatttaaattcaattttagccatagatttagtgaaaaatatattttggaaactgtattttttgtttcattatcataaaaatgaaagctaatgaccatataatttgactgaggtttcaaggacatgcacagtagcgttaaacataatttaattaattttaaatcatagttgccattaagtgttgagacaaagcccagtcttaataaatttaatcaatatttctttaaagccagaatattgctacaacattttagcatttattatgtatttgccttaaaatgcgtcatgttgttccttgctcaattyaagtttggtttatcaagtacacattctgtaaattaacatgtatgttttctatatttggtatttaaaattgaaaggctaacctttttaattttttagcacaagttttaattaatggaagactagaatcttatttttaaaacataccctatcaataaaatgagaaatttttttaaaaatataagtaaaatttattttaatatcattttcccaaaaagaaaaactcatatctaaaa

SEQ ID NO: 667633 - DNA, 641 bp, Homo sapiens
tccttcagaacaagatggagaaacaggagctctggtaatgcaaagattgaagctaactaatagtactcgtacttcccaacactggaaatgtcagcatgaagaacttgctttgagagcaaaatagtatttaaaaaagtgcagtgtgcactctttaaacctgttcagagctcttcactctagttggcaaaagatgtgaatgtaatgtaatgtaatgggattgaaaaagtcttatgagaaagcagagcttttccttggcactgttttgtgttttgggcaattagtattttgcttaaaatgcttttaaagatgcctagtgaaaagcctagtaaaacgctctgagatttgggtgtagaacgttttattttcaggcttaaaactttttttttaatattatagttttttgtagagataggggtctcaccatgttgcccaggctggtcttgaactcctgggctcaagcaatcctcccaaagttttgggattacaggtgtgagccacaacacctgacctattttcaggctttacggcctgttttctattktgccaagcggaaagctactctggcctaaaggaaaggcagagaacataattacatcttaggccacatttcattgcctgcgtatctgtgctattcagttgct

SEQ ID NO: 667634 - DNA, 1219 bp, Homo sapiens
gcccaggtagtctgaatacaaaatctggattactctaaacttgcaagatagaatgatgaattaattcttaaatattgtgtttgcatcaagtttgattttggtttaaggatagttttcatacctagaataaaaaacatttcctcctcaagtggaacatcactccttggttttagccatctttcatcagaatggaactaaaattaaaaaaatgaagttgctctatgatatgatcgtgacaaattttaacagtaatttttttcatatttaaaacttgataaaacttttttctgactgattttgaccatttaaaaagaaagccagatgttctctcatcattcatggcagaaaaaggtttttgtttattacattattatatgaaaatttatgcttatacaattgggaaagtttcaaaaatttaaaggtttgaatatgatacattgcaataattgtgacttaaaattttgtaatgaccaggtgacaccttttatgggaaagtgagaataaattctgatccctattatgcagggaaacagaagagagcattgtttttcatcagggtgaagttggggcaaataggaggggtgaatgatgaggcagacagaaagagacagacactccaaactgcttgacaatgagctcatttttaaatgtatgtaataaagttaccacaataatgttgtagctcagtaatgcagtcttaaaatgcagcaagccaattatactttcgtttgaaatttcatgtcctcataataaggtttgttctttattttagggttttactgtaagtagagatgagttggttttttattacctgcgtccatctctggctataataaaaagctttgtgtgtgtgtgtgtgtgtgtgtgtgtgtgtgtgtgtgtgtgtgtgtgtgtgtgtgygcgcgcgcgcgcacgtgcgtgcgcgcatgcgtgtgcagtgggtgcatgtattctaaaagaactcactacttatgattagtccttgctctaatcattttcccagagattacctattgtaggaagaaggaaggattttaaaaataacatttatcaggatgttatctaatctatcatttcttccacatgcctgtattttttcttcctcatgccatgtatcattacattccatgcagtttttatcatttgtttatttttcttaaatgcgttcaatatccaccagactaaagtttgtctttttttttttcccaaaatgcattcc

SEQ ID NO: 667635 - DNA, 1219 bp, Homo sapiens
gcccaggtagtctgaatacaaaatctggattactctaaacttgcaagatagaatgatgaattaattcttaaatattgtgtttgcatcaagtttgattttggtttaaggatagttttcatacctagaataaaaaacatttcctcctcaagtggaacatcactccttggttttagccatctttcatcagaatggaactaaaattaaaaaaatgaagttgctctatgatatgatcgtgacaaattttaacagtaatttttttcatatttaaaacttgataaaacttttttctgactgattttgaccatttaaaaagaaagccagatgttctctcatcattcatggcagaaaaaggtttttgtttattacattattatatgaaaatttatgcttatacaattgggaaagtttcaaaaatttaaaggtttgaatatgatacattgcaataattgtgacttaaaattttgtaatgaccaggtgacaccttttatgggaaagtgagaataaattctgatccctattatgcagggaaacagaagagagcattgtttttcatcagggtgaagttggggcaaataggaggggtgaatgatgaggcagacagaaagagacagacactccaaactgcttgacaatgagctcatttttaaatgtatgtaataaagttaccacaataatgttgtagctcagtaatgcagtcttaaaatgcagcaagccaattatactttcgtttgaaatttcatgtcctcataataaggtttgttctttattttagggttttactgtaagtagagatgagttggttttttattacctgcgtccatctctggctataataaaaagctttgtgtgtgtgtgtgtgtgtgtgtgtgtgtgtgtgtgtgtgtgtgtgtgtgtgtgtgcgygcgcgcgcgcacgtgcgtgcgcgcatgcgtgtgcagtgggtgcatgtattctaaaagaactcactacttatgattagtccttgctctaatcattttcccagagattacctattgtaggaagaaggaaggattttaaaaataacatttatcaggatgttatctaatctatcatttcttccacatgcctgtattttttcttcctcatgccatgtatcattacattccatgcagtttttatcatttgtttatttttcttaaatgcgttcaatatccaccagactaaagtttgtctttttttttttcccaaaatgcattcc

SEQ ID NO: 667636 - DNA, 614 bp, Homo sapiens
tactaaaatcctctactaacttcttttagatatcatactctacagatgtccctcattttaaaattcagatgttctctggaggtctaacatattcagttccttaaaaagaaatattatttttctttattaaccagacgtgctgctcctttgcctgtgaagtcctgagtactgaaagaggttcaagtaatacggaaaaatgatgttattttaaaaggcaaacwtcctcttctgtctacttttccattttgtcatgggccatctatgacatcacttataaaggaaatacaagaagtaatatttctgcactttgagttttagtgagtaaataaaaaattgtacacattcaaatcctatacagtacaagcatttattagtgttatactcctatattcttgtttctgcttgtgcctgggtgcagaagaaattgcaaaacattgggagtgatgtcttatttatgtactatcctctggagcatcatcaatgtctgctagaatgacttatcacaactggtctgtggtgccaccctctgtccctaccttaactactttgttgcaactgagcttgtcctaaattttggacatatgctaactttgactgctgacatttctggaatg

SEQ ID NO: 667637 - DNA, 614 bp, Homo sapiens
tactaaaatcctctactaacttcttttagatatcatactctacagatgtccctcattttaaaattcagatgttctctggaggtctaacatattcagttccttaaaaagaaatattatttttctttattaaccagacgtgctgctcctttgcctgtgaagtcctgagtactgaaagaggttcaagtaatacggaaaaatgatgttattttaaaaggcaaacttcctcttctgtctacttttccattttgtcatgggccatctatgacatcacttataaaggaaatacaagaagtaatatttctgcactttgagttttagtgagtaaatmaaaaattgtacacattcaaatcctatacagtacaagcatttattagtgttatactcctatattcttgtttctgcttgtgcctgggtgcagaagaaattgcaaaacattgggagtgatgtcttatttatgtactatcctctggagcatcatcaatgtctgctagaatgacttatcacaactggtctgtggtgccaccctctgtccctaccttaactactttgttgcaactgagcttgtcctaaattttggacatatgctaactttgactgctgacatttctggaatg

SEQ ID NO: 667638 - DNA, 614 bp, Homo sapiens
tactaaaatcctctactaacttcttttagatatcatactctacagatgtccctcattttaaaattcagatgttctctggaggtctaacatattcagttccttaaaaagaaatattatttttctttattaaccagacgtgctgctcctttgcctgtgaagtcctgagtactgaaagaggttcaagtaatacggaaaaatgatgttattttaaaaggcaaacttcctcttctgtctacttttccattttgtcatgggccatctatgacatcacttataaaggaaatacaagaagtaatatttctgcactttgagttttagtgagtaaataaaaaattgtacacattcaaatcctatacagtacaagcatttattagtgttatactcctatattcttgtttctgcttgtgcctgggtgcagaagaaattgcaaaacattgggagtgatgtcttatttatgtactatcctctggagcatcatcawtgtctgctagaatgacttatcacaactggtctgtggtgccaccctctgtccctaccttaactactttgttgcaactgagcttgtcctaaattttggacatatgctaactttgactgctgacatttctggaatg

SEQ ID NO: 667639 - DNA, 633 bp, Homo sapiens
aacaaatgaattcaagatttttgttcttagcagatctaatgatggcactgccatttactgagaaggagaaagcagttgggaggagcagattttgagggaaaaccaggagctcagttttgcatgcgttaagtttttgatgcccattagatatctatgtacaaatttttagtaggtatctggccatatgagtctggakatcatggagtcttagaaataattatgtgaaatgcctgatacctgtgagtgatgtctaaagccagtacaaactttataatttcccaaatgctattgatatatttaaaacagtttatttcaaatcgtctttattttttgtataatcagaaaaatattagttcataattaatgtataaaaatgggtaaatatcctttctgctttgttttcttttaccacaatggcatcacaatgaagatttactaaattaaataaagttgatttcagctaacatcttcaaatctttgtaatatcctggatgccaatgtatttaagtcaacttggacaaaactatattcagtataataaataaaatactaataagatcactaattctattatgtaattacaatttatttgtgacaatgttcattagtaccaaaatagttatatatgtaaac

SEQ ID NO: 667640 - DNA, 633 bp, Homo sapiens
aacaaatgaattcaagatttttgttcttagcagatctaatgatggcactgccatttactgagaaggagaaagcagttgggaggagcagattttgagggaaaaccaggagctcagttttgcatgcgttaagtttttgatgcccattagatatctatgtacaaatttttagtaggtatctggccatatgagtctggatatcatggagtcttagaaataattatrtgaaatgcctgatacctgtgagtgatgtctaaagccagtacaaactttataatttcccaaatgctattgatatatttaaaacagtttatttcaaatcgtctttattttttgtataatcagaaaaatattagttcataattaatgtataaaaatgggtaaatatcctttctgctttgttttcttttaccacaatggcatcacaatgaagatttactaaattaaataaagttgatttcagctaacatcttcaaatctttgtaatatcctggatgccaatgtatttaagtcaacttggacaaaactatattcagtataataaataaaatactaataagatcactaattctattatgtaattacaatttatttgtgacaatgttcattagtaccaaaatagttatatatgtaaac

SEQ ID NO: 667641 - DNA, 633 bp, Homo sapiens
aacaaatgaattcaagatttttgttcttagcagatctaatgatggcactgccatttactgagaaggagaaagcagttgggaggagcagattttgagggaaaaccaggagctcagttttgcatgcgttaagtttttgatgcccattagatatctatgtacaaatttttagtaggtatctggccatatgagtctggatatcatggagtcttagaaataattatgtgaaatgcctgatacctgtgagygatgtctaaagccagtacaaactttataatttcccaaatgctattgatatatttaaaacagtttatttcaaatcgtctttattttttgtataatcagaaaaatattagttcataattaatgtataaaaatgggtaaatatcctttctgctttgttttcttttaccacaatggcatcacaatgaagatttactaaattaaataaagttgatttcagctaacatcttcaaatctttgtaatatcctggatgccaatgtatttaagtcaacttggacaaaactatattcagtataataaataaaatactaataagatcactaattctattatgtaattacaatttatttgtgacaatgttcattagtaccaaaatagttatatatgtaaac

SEQ ID NO: 667642 - DNA, 662 bp, Homo sapiens
tttcactgctctgcagttctctaccatatgaaaatagcacaattatatcgatgtatcccctggctagtggttattttggttgcttctatttttttgatgttacaaataatgatgctatgaacattatgtgcacattttctattgaacatgggagtatctcttcagcagcaatcttcaaacttttttctttaatacaactgaaaaaaactatgtccacttcacatatgtttgggttggtgtctaaatatttttatgtaaaagaattgcaaaaatatttaatttctagcatactataaatgtgtcttaaaaatgtgttttcctcaaacccttaaagctatagctttatctcatacaatttgggaaaatgtctactatatactctaattggcaaaacagttcccackctgagaatcaaaaattacttgcattaccaataagaataatttcacttttgaactccaataaagcttaagatgcccattaaacatctcatttttaaagattcctgggtagatacagtatgcagatatataaatgattgatagagtgattgattgaaacagacaaaaatttttgatagtagttttgtacttaggtgaaataaaggcaatattttttacacatctttttagtttgctttcacaataaaaatcttcctcaga

SEQ ID NO: 667643 - DNA, 629 bp, Homo sapiens
tttaatttcccaatctctattccaaaatcgacaaagaccaggaagagcatacaagcgctggctcctcagtcccagtaacatatcatatttgtcacctttaatgtcccttaatgtctttgtgtyttgtctttctaatttagctatgactccactagtaaaaatcatatgactcatgtccaagtccacatttagcaaaatttctaaagctttgttagtgtgcaaggcaatgaatatgaaatgaggtctgcattctttatttggattaagtttaaagcttttcaaagaacaccatctgaaaatgtcacagcatgacaaagcagccatccctataggagtctacccacagagtgcaggactccaggataaaatacattctttaccttgctgtcttgtaaccactcattgccacttgcacgctggccccagcaattttatacatgaatgaaataaggtaaaaattaacaagcaaattcacaacaagattaatttcagatggaaaataatctagaggagaaagctaaaatgtgctgattaatataggatagaatgaatcaagggtcaataacttttggcctgggagccacgtttgacctatttttgtaaataaagttttattggaacataaccat

SEQ ID NO: 667644 - DNA, 1984 bp, Homo sapiens
tggctcacgcctgtaatcccagcattttgggaggccgaggcgggcggatcacaaggtcaggagtttgagaccagcctgaccaacatggtgaaatcccgtctctactaaaaataccaaaaaattagccaggcgtggtggcgggcgcctgtaatcccagctactcgggaggctgaggcaggacaatcacttgaaaccagaaggcagaggttgcaatgagccgcgactgtgccacagcactccagcctgggcaacaacagtgaaactccgtctcaaaaaaaaaaaaaaaaattttagatttgctttcagcaacaagtgatgacatttgtgctatgccatggaaaaacctggtatcagccaggtgcagtggctcacacctgtaatcacagcactttgggaggccgaggcgggtggatcacctgaggtcaggagttggagaccagcctggccaacgtggtgaaaccccatctctactaaaaatacaaaaattagctgggcatggtggcaggcgcctgtaatcccagctactcgggaggctgaggcagaagagtcgcttgaacctgggaggtggaggttgcagtgagccaagatcacgccgctgcactccagcctggggaacaagagcaagacttcgcctcaaaaacaaaaacaaaacctggtatcagcacataaaatctgaactgcagggatgccaagagactagttaggagaaaaccacaatcatccacattagtggctctcctgtagggatatccggaaatctgtgggagtgttaataatagggtagaatgctaatggcatttagcagtagggaccaggaatgtttamcgtcctataatacaaaggacagaataacataaattatccaatgcaaaatatcaatagtgcccctttgaggaataatgctatagttgaaatatgaaatgctatagttgaaagatgatctgaccaggattaagttcactgatggagagtatctctttcttaccgaagcagtctttgtcttcaccctgcccaccacccccacaaaaaaatttaaaggactgcttttcaattatccccctgctctgctgggtgagaagataaaatgaggatccaaagtaagtgacaagaagagaaatgtcaagaaccagggtgaaaaaaaagatggcagaaatgaacaacagattgtatctgggtagatacgatgaataagtaaaaattcattttatccatgtgacattcttattcccacaaagacagtcatacccaaaattatacaactattaaagacaaagtcaatgggattcagaaaacaaaactataaagcttttctggaagcaatgtaaaaggtattcaactcacctcctcctgatccaacatttgcgtcttcagtttctctaccagttgactttgctggttaatttcttcatcctagaattgtgaagtatccggttaaccagtagctaacaacctggttctagttgtttcccaatacaggttataagattactactccccagaaatatttcaaaaccatttctctaaattcaacattgcttattttaatctcttttaagaaaatggcaaaacaaaaggaatttctttcaattatcaatacttataatggtcatgtacttcgaacctgccatctctgcttaaaatatattaaaaatatcaacttaagaaaatattttcttctaatctctttactactcttgttcttgccttccattctattacgttcttagtttgctattattcatactattgacattacttctatatgcaaagcaggaagatattatttccactctattgtgtttcccttaatctctcacatcatcttttattggagtcttcagagccctgattctaacaattggtatcattgaggctcccaatgacccaatgccaaattttcattagaacaggggtccccaagcccccaggccacaaagcagtactggaagcctgttaggaaccaagaagcacagcaggaggtgag

SEQ ID NO: 667645 - DNA, 1984 bp, Homo sapiens
tggctcacgcctgtaatcccagcattttgggaggccgaggcgggcggatcacaaggtcaggagtttgagaccagcctgaccaacatggtgaaatcccgtctctactaaaaataccaaaaaattagccaggcgtggtggcgggcgcctgtaatcccagctactcgggaggctgaggcaggacaatcacttgaaaccagaaggcagaggttgcaatgagccgcgactgtgccacagcactccagcctgggcaacaacagtgaaactccgtctcaaaaaaaaaaaaaaaaattttagatttgctttcagcaacaagtgatgacatttgtgctatgccatggaaaaacctggtatcagccaggtgcagtggctcacacctgtaatcacagcactttgggaggccgaggcgggtggatcacctgaggtcaggagttggagaccagcctggccaacgtggtgaaaccccatctctactaaaaatacaaaaattagctgggcatggtggcaggcgcctgtaatcccagctactcgggaggctgaggcagaagagtcgcttgaacctgggaggtggaggttgcagtgagccaagatcacgccgctgcactccagcctggggaacaagagcaagacttcgcctcaaaaacaaaaacaaaacctggtatcagcacataaaatctgaactgcagggatgccaagagactagttaggagaaaaccacaatcatccacattagtggctctcctgtagggatatccggaaatctgtgggagtgttaataatagggtagaatgctaatggcatttagcagtagggaccaggaatgtttacygtcctataatacaaaggacagaataacataaattatccaatgcaaaatatcaatagtgcccctttgaggaataatgctatagttgaaatatgaaatgctatagttgaaagatgatctgaccaggattaagttcactgatggagagtatctctttcttaccgaagcagtctttgtcttcaccctgcccaccacccccacaaaaaaatttaaaggactgcttttcaattatccccctgctctgctgggtgagaagataaaatgaggatccaaagtaagtgacaagaagagaaatgtcaagaaccagggtgaaaaaaaagatggcagaaatgaacaacagattgtatctgggtagatacgatgaataagtaaaaattcattttatccatgtgacattcttattcccacaaagacagtcatacccaaaattatacaactattaaagacaaagtcaatgggattcagaaaacaaaactataaagcttttctggaagcaatgtaaaaggtattcaactcacctcctcctgatccaacatttgcgtcttcagtttctctaccagttgactttgctggttaatttcttcatcctagaattgtgaagtatccggttaaccagtagctaacaacctggttctagttgtttcccaatacaggttataagattactactccccagaaatatttcaaaaccatttctctaaattcaacattgcttattttaatctcttttaagaaaatggcaaaacaaaaggaatttctttcaattatcaatacttataatggtcatgtacttcgaacctgccatctctgcttaaaatatattaaaaatatcaacttaagaaaatattttcttctaatctctttactactcttgttcttgccttccattctattacgttcttagtttgctattattcatactattgacattacttctatatgcaaagcaggaagatattatttccactctattgtgtttcccttaatctctcacatcatcttttattggagtcttcagagccctgattctaacaattggtatcattgaggctcccaatgacccaatgccaaattttcattagaacaggggtccccaagcccccaggccacaaagcagtactggaagcctgttaggaaccaagaagcacagcaggaggtgag

SEQ ID NO: 667646 - DNA, 648 bp, Homo sapiens
tttgctaatctcttacattcggattgatgtgtttgtttccaagacagagtcttgcactgtcgcccaggagggagtgcagtggcacaatcttggctcactgcaacctccaacctccacctcccaggttcaagcaattctcgtgcctcagcctcccaagtatctgggattacaggcgcctgccaccaccctggctaatttctttgtatttttagtagagacggggtttcgccatgttggccaggttggtctcaaattcctgaactcaagtgatccacccacctcggcctcccaaagtgctgggattacagacgagagccaccgcgcccggcctgatgtgttctttttcaggcactcagataactcagttcccttggtcctaactaagctgaaggtcctcctggtggccttggacagctgggccacaccttcctctgccgtctaagtgccagcaccacagcttaatcagacgacaaacatgtcatggacgctacacctctagcgtcatctcagcaacacaaagagctgtttcacagacagagtcgcaactgaccagcaagtactactcccctccactctgaaaagaacagccggaragcaccagaaattcacctgaattctcctgaagggtgcagcacacaagacacggaa

SEQ ID NO: 667647 - DNA, 599 bp, Homo sapiens
aaaagaaagaaaagaaaagaaaaaaaagaaaaatgtctgatcagttatatgttataaaaaaaccaaacgaacaaacatgaattattcagagaaaatgcattgaattaagggaaatgtctttgcaaccagaactcaacactctaactaccatgcttaaagttattatgagagagagagagagactcttgtctgaaatatcttgttattgtaacacagataattaattaactgatgtaaggatgacagcgtgtgtgatgtcactcccttgaacaagtcctaacacacaggttcactccgattggacggctgtctttccccttccttaaattaataagaacggatgttctcttctttgggaatgatgaataaaaggtttaatttactgagtgctaaaaataaaagccytcccataactcttcagcagcatttggtgtggcatacaggcggctttcaaaatctggattatgaattctaatttttaacgcttgttatcagcaaactttaagggtaaacaaatatgtgatttgtccgcgcacgtagagatacacagtatgcattcatatgcatatagcgacacacagaattagcacacggtctaa

SEQ ID NO: 667648 - DNA, 640 bp, Homo sapiens
tacctacctgacgtctccctttcttctgaatacatattttattacccacctattagatctaagtttaagaagttggaatagggatttaaatctaaattctacatttgaatttacaggagtcagcgagtccgggaagtgcctttatgcacagaccaatatctggcaatggcactaggagacaaataagctttaccagtctcaaagccctggctactacagtgaatccacccttctcctggatcttatctacttcagcaaaagaaggccacccactaaaccaggcccttgtactttgggtggaaactcctaagtcctctagtctcctcaaacagacagccaggctgccaatttccacaataataatttctatagcactgagtctttggtagccttgtaactrtagctactgatgctacagtctggtccctgtatgataaaacaccagagcaacagaaacaaaaatattgactgaagccttctaaaatctctctaaatataccttcaataaatatggttttttttacagaacgactgctttcagcttcctgaactaacgcttggccttcgctagttgtcactgttgaaattgattcaaaagtgtacatttaacatgaaagtcaacacagaatttcatgtgtca

SEQ ID NO: 667649 - DNA, 642 bp, Homo sapiens
atttttccagatataatcatttaaacaatcctaacctttgtgaggaaagtataggaggccaggcaaggyagacagagcttgaggccttggcagttgcttccttttgatctctaggggaagggggtgggggttaatatgtattcattaattaataccaacattgtattgaaaaaattgcaattagtcaatgataatgggttcttctgaacattttacatgacaaacaaatattcttaagtttaatttcaaaaagacgtggagtttctttctatttttttttttaagatgggccttgctctgtgccctcaaactccagtctacaatctcaaactcctgggctcaagaaatcctcttgtagtagctaggactacaggcatctctcactacacctggctagttttttttttattttttgtagagactgggtctcactatgtctccctcctcagccacccagagagctgggattataggtgtaagccactgtgccaggcctagccctggagtttctaatacattggtgatacaactctgagatttctaagcatggatttgtaaatgaagagctggagcttaatttttctaattcacacagcactgtttcaacattgtcttattcagtggttctcagcctgggaaaga

SEQ ID NO: 667650 - DNA, 1264 bp, Homo sapiens
ttgcggcatgtctgcggcaaagaaagaccatgctgcagtcagagaaatcagaggacaccacttcaacaattaaccaaaaataggacagggacacctatctgcctgtgcttggacgtattaggtcattcagctcagctgtgtgactggagaaatcattttgcctttataggaaaaggtaggggtgtaggatgatgagagaaaggaagagacatgactcagagtgggaaacagcacgtagccaagggcaaatatttctctcagacataaatggatcaggaagaggtgagagcagcaggtcatctttggagcattcttttctttcctgcctcccagtcacttgtcaccgagcaccaaccagtaacaaaaggggagagaagggcagtatgcaggacctgtttctctaactgactggcacatcggttccagccaactgctgtctcagctaactagggcagtgaaacaaggagtcatttggaaagtttcagggatgcacactccacatcgcagggaggcaagtggtgaggaataaccaccacgcttattttactgaggaggaaactggttgaaattctttatgtattatatggctgggagacctctgatctcagtacaaacaataacaggagtatttagatttgtcgagcacttataatcttctgggcatttacttaatcagtacaataaccctacgatgggaatgttactgtcattcccatttttcagataatgaaactgatgctgtgaagttaaagaatttgccctagaccacagtcaggatgtgagccaagagagcctgacatcagagcccacactcctaatcactgtagagatgattttctatttcctgaaagaatgtgtccatggctgttcttatggcttccagccaaaatcttcttttttcattcatccacctttcctactctgagaagcacctttttttccattctcccatcaatggaggcagtttcatgtcctcagttgtaagagctgtcccaagctagcacytgggcttcatgtaacctcctcactcggcctccatctaatccctgaacccctcccccagccctgtatgccgcttttcagggcacaccctttctttctccttaggatctgagctctagaccttacactccagctaaagtcagaaaaatagttcccaaatgccattattctcattttttgtaaattttgtagcattttattccttcacacagacttccctaatatgtatcaaaagcccagtgatgatttttcttctcaatgc

SEQ ID NO: 667651 - DNA, 1264 bp, Homo sapiens
ttgcggcatgtctgcggcaaagaaagaccatgctgcagtcagagaaatcagaggacaccacttcaacaattaaccaaaaataggacagggacacctatctgcctgtgcttggacgtattaggtcattcagctcagctgtgtgactggagaaatcattttgcctttataggaaaaggtaggggtgtaggatgatgagagaaaggaagagacatgactcagagtgggaaacagcacgtagccaagggcaaatatttctctcagacataaatggatcaggaagaggtgagagcagcaggtcatctttggagcattcttttctttcctgcctcccagtcacttgtcaccgagcaccaaccagtaacaaaaggggagagaagggcagtatgcaggacctgtttctctaactgactggcacatcggttccagccaactgctgtctcagctaactagggcagtgaaacaaggagtcatttggaaagtttcagggatgcacactccacatcgcagggaggcaagtggtgaggaataaccaccacgcttattttactgaggaggaaactggttgaaattctttatgtattatatggctgggagacctctgatctcagtacaaacaataacaggagtatttagatttgtcgagcacttataatcttctgggcatttacttaatcagtacaataaccctacgatgggaatgttactgtcattcccatttttcagataatgaaactgatgctgtgaagttaaagaatttgccctagaccacagtcaggatgtgagccaagagagcctgacatcagagcccacactcctaatcactgtagagatgattttctatttcctgaaagaatgtgtccatggctgttcttatggcttccagccaaaatcttcttttttcattcatccacctttcctactctgagaagcacctttttttccattctcccatcaatggaggcagtttcatgtcctcagttgtaagagctgtcccaagctagcacctgggcttcatgtamcctcctcactcggcctccatctaatccctgaacccctcccccagccctgtatgccgcttttcagggcacaccctttctttctccttaggatctgagctctagaccttacactccagctaaagtcagaaaaatagttcccaaatgccattattctcattttttgtaaattttgtagcattttattccttcacacagacttccctaatatgtatcaaaagcccagtgatgatttttcttctcaatgc

SEQ ID NO: 667652 - DNA, 671 bp, Homo sapiens
aaatcaacttctaaaaattataacttctgaacatatgaacatgacacttactgtgatgttgtgttgaagcttcctcttaccagttatagctctgatgtataataattcaacattatttatcattacttatatattcacaattgcttacagctaacttttactttttgcttggattccattagtgtggccaaaagtacataattcctgctccttttgttttctcctagaaaagtatgcccagccgacaaagctttctaaaagccagaaatgtcatggagcagtgctggcttcttttacttaaaactcttraagtatttgtgaaagtatttgccaagtgtctagtaacttttaagcttcttttcttattttttttttacctagtattgattgaaatgtatcacaatacaaacctatgattcacctgtggaaccattcacacaccttgcaaatcttcagcatgtttctgtgactgaaagtcttattccactgagcataaaaatagtacatttttaatctgatatttgccagaatgcttcttttaagacccattgtatttgttctggtacacaaatgttagtgtttctcaacctaattcctttaggctcataatcaccattagttcataaatcattatatttaatagaaaaatacctggtttaagttatttatta

SEQ ID NO: 667653 - DNA, 671 bp, Homo sapiens
aaatcaacttctaaaaattataacttctgaacatatgaacatgacacttactgtgatgttgtgttgaagcttcctcttaccagttatagctctgatgtataataattcaacattatttatcattacttatatattcacaattgcttacagctaacttttactttttgcttggattccattagtgtggccaaaagtacataattcctgctccttttgttttctcctagaaaagtatgcccagccgacaaagctttctaaaagccagaaatgtcatggagcagtgctggcttcttttacttaaaactcttgaagtatttgtgaaagtatttgccaagtgtctagtaacttttaagcttcttttcttattttttttttacctagtattgattgaaatgtatcacaatacaaacctatgattcacctgtggaaccattcayacaccttgcaaatcttcagcatgtttctgtgactgaaagtcttattccactgagcataaaaatagtacatttttaatctgatatttgccagaatgcttcttttaagacccattgtatttgttctggtacacaaatgttagtgtttctcaacctaattcctttaggctcataatcaccattagttcataaatcattatatttaatagaaaaatacctggtttaagttatttatta

SEQ ID NO: 667654 - DNA, 671 bp, Homo sapiens
aaatcaacttctaaaaattataacttctgaacatatgaacatgacacttactgtgatgttgtgttgaagcttcctcttaccagttatagctctgatgtataataattcaacattatttatcattacttatatattcacaattgcttacagctaacttttactttttgcttggattccattagtgtggccaaaagtacataattcctgctccttttgttttctcctagaaaagtatgcccagccgacaaagctttctaaaagccagaaatgtcatggagcagtgctggcttcttttacttaaaactcttgaagtatttgtgaaagtatttgccaagtgtctagtaacttttaagcttcttttcttattttttttttacctagtattgattgaaatgtatcacaatacaaacctatgattcacctgtggaaccattcacacaccttgcaaatcttcagcatgtttctgtgactgaaagtcttattccactgagcataaaaatagtacatttttaatctgatatttgccagaatgcttcttttaagacccattgtatttgttctggtacacaaatgttagtrtttctcaacctaattcctttaggctcataatcaccattagttcataaatcattatatttaatagaaaaatacctggtttaagttatttatta

SEQ ID NO: 667655 - DNA, 2061 bp, Homo sapiens
tctttataaattacccagtcttgggtatttcttcatagaagcatgagaatggactaataaagcaagcctcttaacctctgaaaatcctaatttaaattacttttataaagtgttttttacctagctcttaaggttgctgtaaggataaagtgatgtaacatgcctaaccagttgactggtacagtaaaaatgtaataaatgttaaatgttactctgagctattatggtaccttatattgcagatctcaagtcaattcttgacatattgtaaataaattatagttaggcagatgcatttgctaaatttggtgtatatatatatatatgcacgcaaaagttactttgtggtcatttgtagattggttttataccattctatcttaagtacacattttattatggacaattgtgcttttgtaaatactctaaatttcccttgagatctataacattctgatttatgtatattaaaattataaaaggtagtattttcattggctatattccagatattaaatatgattaattagtttaaaagtcccatttaccaaaaattttacttataataagcaataataccattttctatgtctttggcttgagtttagcttttgctactttattatagcaatggttctgaataattatttggtaaaaattccacttccatgactctaagatgaactccatgagtcattctttctctgtatcctgttttcaaaaggtattctaagatgcttttgctaagtttaacaaattttgatttcatgcaagttcaacattatgtttatgtttacatattaaactttattgttcttccaattttaccaatgtatacaccaaaaatctcaatgaaattcaagagtttagctaaatttatgacatgtttttacatgataaaaatgaggcattattttgatatgtttctggaccaatatcagaattctgtgatgtaagacatatagtgaaggttcccatcatgattaatatttgatactggtatcaggcataaacacagctcatgcttatgtagcagttacatatagcactgaaaaactgagatcacgttatcaaaacacaatgaaagaagtaatattcagcctctagtgttgtcagcctaccttcaatattattcctaaagtcctatcttcatgccctatctcaggcaacctcatccctttcttttagggagttggggatggggaaaggggagatgtcggtcaaagagtacaaagttttggttagacacaaggagaaagttttagtgatatattgaacaccatggtaactatagtaaataataatgtattgtatatttcaagtgttctcatcgcaaaaaaataactaggcgaggtgatgtatatgttaattatttggtttaattattatacaacgtgtatagagatacatgtatacatacatcaaaatttcacaatgtaccccacaaatatgtacaataaaactaagtaaataaccatgcttttttcattgttgtatttacagacctagtgcagtgcttggcaaaaatgaggccctaagtaatgatttggtgaatatatattaataaattaattaattatggctgggcatagtggctcatgcctgtaatcccagcactttgagaggctgaggcagatgggtcaccagaggtcaggagtttgagaccagcctggccaagatgacaaaaatttttatatttctactaaaaatataaaattagctaggcatggtggtgcgtgcttgtaatcccrgctactcaggaggctgaggcaggagaatcacttgaacccaggagatggaggttgccgtgagctgagatcatgccactgcactacatcctgggtgatagagcaaggccctgtctaaaacaaaacaaaacaaaacaaaaaaaacaaagagtgaaaacataaattagaaaaatataatacggagatatttcatcagcaagtgcttgtggttgttacactagaaaaaatacacagcttaaaaagttagatgttatagttgagagacatatatattagaaattctgagaatcacttctaccaccattttctgcaa

SEQ ID NO: 667656 - DNA, 2061 bp, Homo sapiens
tctttataaattacccagtcttgggtatttcttcatagaagcatgagaatggactaataaagcaagcctcttaacctctgaaaatcctaatttaaattacttttataaagtgttttttacctagctcttaaggttgctgtaaggataaagtgatgtaacatgcctaaccagttgactggtacagtaaaaatgtaataaatgttaaatgttactctgagctattatggtaccttatattgcagatctcaagtcaattcttgacatattgtaaataaattatagttaggcagatgcatttgctaaatttggtgtatatatatatatatgcacgcaaaagttactttgtggtcatttgtagattggttttataccattctatcttaagtacacattttattatggacaattgtgcttttgtaaatactctaaatttcccttgagatctataacattctgatttatgtatattaaaattataaaaggtagtattttcattggctatattccagatattaaatatgattaattagtttaaaagtcccatttaccaaaaattttacttataataagcaataataccattttctatgtctttggcttgagtttagcttttgctactttattatagcaatggttctgaataattatttggtaaaaattccacttccatgactctaagatgaactccatgagtcattctttctctgtatcctgttttcaaaaggtattctaagatgcttttgctaagtttaacaaattttgatttcatgcaagttcaacattatgtttatgtttacatattaaactttattgttcttccaattttaccaatgtatacaccaaaaatctcaatgaaattcaagagtttagctaaatttatgacatgtttttacatgataaaaatgaggcattattttgatatgtttctggaccaatatcagaattctgtgatgtaagacatatagtgaaggttcccatcatgattaatatttgatactggtatcaggcataaacacagctcatgcttatgtagcagttacatatagcactgaaaaactgagatcacgttatcaaaacacaatgaaagaagtaatattcagcctctagtgttgtcagcctaccttcaatattattcctaaagtcctatcttcatgccctatctcaggcaacctcatccctttcttttagggagttggggatggggaaaggggagatgtcggtcaaagagtacaaagttttggttagacacaaggagaaagttttagtgatatattgaacaccatggtaactatagtaaataataatgtattgtatatttcaagtgttctcatcgcaaaaaaataactaggcgaggtgatgtatatgttaattatttggtttaattattatacaacgtgtatagagatacatgtatacatacatcaaaatttcacaatgtaccccacaaatatgtacaataaaactaagtaaataaccatgcttttttcattgttgtatttacagacctagtgcagtgcttggcaaaaatgaggccctaagtaatgatttggtgaatatatattaataaattaattaattatggctgggcatagtggctcatgcctgtaatcccagcactttgagaggctgaggcagatgggtcaccagaggtcaggagtttgagaccagcctggccaagatgacaaaaatttttatatttctactaaaaatataaaattagctaggcatggtggtgcgtgcttgtaatcccggctactcaggaggctgaggcaggagaatcacttgaacccaggagatggaggttgccgtgagctgagatcatgmcactgcactacatcctgggtgatagagcaaggccctgtctaaaacaaaacaaaacaaaacaaaaaaaacaaagagtgaaaacataaattagaaaaatataatacggagatatttcatcagcaagtgcttgtggttgttacactagaaaaaatacacagcttaaaaagttagatgttatagttgagagacatatatattagaaattctgagaatcacttctaccaccattttctgcaa

SEQ ID NO: 667657 - DNA, 628 bp, Homo sapiens
tgttccaacctctgcctgtcacacagttccaaagtcacttccacatttttgggtatcttaatatcagtatccaactctaccagtaccaatttactgtattagtccattttcatactgctataaagaaatacccaagatagggtaatttacaaagaaaaagaggtttaatggattcccacttccacatcactggggaggcctcacaatcatggcggaaggtgaaggaggagcaaaggcaaatcttacctggtggcaggcaagagagagcatgtgcaggggaactgccctttataaaaccatcagatcttgtaagaattattaactatcccaagaacagcacagtagaacctgcccccatgattcartcaccacccaccaggtctatattcttcaccaatttttcaatagatcctcatttgaaatgattttgtagggattatgggagctacaattgaggatgagattcaggtgggggcagagccaaaccatatcagaaaggaaaatagcaagagaaattgagaaaaattatcagagatataggaagacaatcaaattgtcatagttcctctggaactcaaagaataaatggttcaatagaataattgataaaaccatatactgactgcag

SEQ ID NO: 667658 - DNA, 598 bp, Homo sapiens
gcctgygtaacccacaatatagagcaccagtgtgtcagtttccaattgctgccataacaaattaccacgaatgtagtgacttacacagcacaaattcattcttgcaagtctagaggtcagaagtcaaatgggtctcactggttaaaatcaaggtgtcagcagggcggtacgccttctagaggctctacaagagaatctattttatgtcttttccagcttcctgaggccaccacattccttggcttctaagcccttattcaagccctttcctccatcttcaaagccagcagcatctggctgaggccttttcatgctgccatctctttggttctcacctttccagccatagaaactcttatgattacattggacccaccaggataacccagaataatctccctacctgaaagtcattggattagcaaccttaattatatgggcaaccttaattcccctttgctgtgtaatctaacgtattcacaggttccggggattagggtgtggatatctttgggggccccttgttctgccaaccatacctggtaaacctttttcctctgtggaaaggggagatatgggcctgttggagggattgcag

SEQ ID NO: 667659 - DNA, 633 bp, Homo sapiens
taaaaacttaatagtttgattttgtttgagatgtgggtttttgaaaggaattggtttatactgtctgtactaaatgtctatcagtacagacagtgtaaaccaacttgggttttccatcgtgcagaaagcctcaagacacaagaccacactgccacctcgtggcaggatcagattttacaacagttgaatttaatggttcaccagccttcaagttactattcagaatcaccagccttcaagttactattcagaatgtgaaaagcgtgtgttctaggtggttatagtttagcactaagaaaaacaagagtccggggacaggttgttggaggtgctgaattaaaacaattttttggagtgctaaatcttcccatggcttcytaggaaaggcgctagcccaattccttctgcaccatctaaaattcaatgagaaaggggcccctggagtggagtgacaccggttcctccaaggaccctctgttgtgtacattaaaattcagcagtgccatttagcaaaaattaaatcagtaaggctttggaggttaggaaaccaaatacacttatttacctagttttagaaaccaaaaagaaaaaagctccaagtataggaaatgcttgaatctgatgaaatgcttg

SEQ ID NO: 667660 - DNA, 1452 bp, Homo sapiens
taaaggcacaagattcttttcaatctcatgagtaaattcactgcctcttcctttctcactgatattatcatatatttctctagtaataacctaccaagatatggaatcaatggaaataaacattgaccaaaataataaattaattttaagctaatttctagattgagttctttaaatgtattataacacaaacgaaagcaaaactggggtgtaaaatattattataattgattaaatgaatcaaagtttcattgataatatgtggtgtcacattcaaggggaaagcgaatatcggtggccacaaattttaacgtattgttttttctaaggaataatttgttgtaaaaatggattttgtttgttttctagttttaattttttctttatgtctcttacagttataattatctttagacttagattttgtttctccctaaggttatgataaattaaactttcctatactgtggctgattacatttccctacattaaactcatctgatctctgttgtatgtggttgtagcttagaaatgctctagtggacttagyttttttccctttttccttcagtaatatgtgctgtctattgagttgtagccactgtgaagaataagttcagaaaaatcagaccaataacattctgggttgtctaaaggacattaatcaagcaaatttccctctcaaagaaaaagattttttgagaatttgttgaaaccaggattaaaaaaaaaaagagccctgacaattttaaagaaatgccttattttcaattataccattgaagcaagagtcaagaataatattttatatcattaaaattaacagctagctagaaatctgaatatatatttaaggttctaatactcaagggaaaagcttacattgccgtgtttagaagtcataatagtaattttgtttgcataaagtgagatcagggctaggcataatggctatctcaagttcctatttaaaccagacaattaattaaaaccaagtcaatctaagtcaagtaaagtagattacttaaactagcaggcagtatgatctaaataacaattctttatagccacatccagagcctttgcaagaagtgtatgaattaaaattaaagtaactataatcaggcagaaatcaccaaaggatttcattgcttatgatttttattgcaatcattaaatatttgatatgtgtaaataaaaccgatttaagatcatgattaaactctgaattttggatgtgatatgttgatcaaagcagtgcttttgaaaggaacaaagaaacatcataaaaccacagagaaaattccagtccaagcccttgtaggccaaatgtgtgtatatgagcttcgtgcccacaggtacatgaggaaatgaagatcagttagtgaagatctcttaaacaagaggtaacatgagtttctgtgagaagattcttaaggactttgaggaaa

SEQ ID NO: 667661 - DNA, 608 bp, Homo sapiens
aaaaggtaacaagtaaatttcatatttatcctattgtatcttttatttgccataatcacacatggctttatctttttctagctttattgaggtttacttgaaaaatgaaagttgtatacatttaaggtgttgaatgtgatgtttgatatatgcgtatattgtaaataattaccataatcaagataattaatatatgcatcacttcacatagttacaattttttgtaattagaactttaagatctactatcttacaaattttgggtatgcaaaacgatattattaactatagtcaccatgctgtactttagatctccagaacttattcatcctgaataactaaatatttgtaccctttgatgagtatctcctcatttctccaccttctagcccctggcaaacaccattctactctcagctttcaacttcttttgattccacatataagtgagatcatgcaggatttgtctttctgtgcctggtttatttcacttatcatgatgtcctccaagtcatctatgttgtcaccaatggcaagactttcttatttttgaagtctgttgcaatcagggtgtgtgtgtgtgtgtgtgtgtgtgtgtgtgtrtgtat

SEQ ID NO: 667662 - DNA, 951 bp, Homo sapiens
cattcataggcaaaataataataattaatctaattaatcataactttaagcctcacaccttatataaaaattaactcaaaatggatcataaactcaattgtaaactgtaaagctataaaacttttagaaaaagacaggaaagctggtttgatttggctttctggtcctgatcctgactaatatagtggataataataccattcttggtcaaaagcaaggtgtggttttatgatgctgctgctggttccctggcgccttgtaaatggtctctgaaggcctccataggaggagtctcaaaacatctccagcaatggcatcaccagggtgtaagatgtggagagtaatgcttttgcccaaaagcattacttacttttgctcaacacaataaaaaagtcaactctccttaaactgatatatgtatgggattaatatatttccrattgaattcccaggatgcccaaaaatgctttttgccaaaaagcattactctggaaagccatacacatattatctcctggtgataagcttttgggggacagagttcatttgggtgtagaagttctatgatcttaaaaacaagagagcattttccctttatcatcccagtttgtataattccacatttggggtggtatttgccccacaattctgacagtctccggtacttttacccttaaaagaccaggtggcaagaagggtttctgaggtgctgttcttcctgaggatgaaaagacctctctctatgcaggtttcctggagaactcaagcccttcatggctaattcaggtcaggggccttagatgggaacaagaaagagtgtcattctttctctgcaggtctgattctcccctctgtcagctggaatcacatgaagcccttttctcttcatgggcggggactctttgtcacattctcatagacccaggaggtttccaggacaattctgttctc

SEQ ID NO: 667663 - DNA, 661 bp, Homo sapiens
atatatgtgtgtgtatatatatatatatgtgtgtgtgtgtgtatatatatatatgtgtatatatatgtgtatatatgtgtatatatatgtgtatatatgtgtatatatatgtgtgtatatatatacatatatacacactagaaagaaacaaacatgtcctacaaaaataatacatatatgtgggtgtatatatatatatatatatatatayacacgtatgtatacgtgtgtatatatatatatatatatatatgtatatgtatatatacactagaaagaaacaaagaaacatgtcctacaaaaataaaaaggttaatttagtgccagaagcaaacaatgtagactaccacttcaggactcaaggaatttgctaaatttccattccaatattaggcaagagtttcttggagataaaagccgtgatttcgtacgagctagtgtcatgtcacactatgtgtaaatccaccaagttaatgtcataataaagttgtacaacttcaaaggaattacataaataagcaaccttaccaagaaatgcacttccttatacattagtcaagatcaagtcctgtggttggaaaaatcagttattttctgttataaaaatttgggttacattttttaaaatcttaccattaggaaatgtctgagtgggcatgtc

SEQ ID NO: 667664 - DNA, 661 bp, Homo sapiens
atatatgtgtgtgtatatatatatatatgtgtgtgtgtgtgtatatatatatatgtgtatatatatgtgtatatatgtgtatatatatgtgtatatatgtgtatatatatgtgtgtatatatatacatatatacacactagaaagaaacaaacatgtcctacaaaaataatacatatatgtgggtgtatatatatatatatatatatatacacacgtatgtatrcgtgtgtatatatatatatatatatatatgtatatgtatatatacactagaaagaaacaaagaaacatgtcctacaaaaataaaaaggttaatttagtgccagaagcaaacaatgtagactaccacttcaggactcaaggaatttgctaaatttccattccaatattaggcaagagtttcttggagataaaagccgtgatttcgtacgagctagtgtcatgtcacactatgtgtaaatccaccaagttaatgtcataataaagttgtacaacttcaaaggaattacataaataagcaaccttaccaagaaatgcacttccttatacattagtcaagatcaagtcctgtggttggaaaaatcagttattttctgttataaaaatttgggttacattttttaaaatcttaccattaggaaatgtctgagtgggcatgtc

SEQ ID NO: 667665 - DNA, 661 bp, Homo sapiens
atatatgtgtgtgtatatatatatatatgtgtgtgtgtgtgtatatatatatatgtgtatatatatgtgtatatatgtgtatatatatgtgtatatatgtgtatatatatgtgtgtatatatatacatatatacacactagaaagaaacaaacatgtcctacaaaaataatacatatatgtgggtgtatatatatatatatatatatatacacacgtatgtataygtgtgtatatatatatatatatatatatgtatatgtatatatacactagaaagaaacaaagaaacatgtcctacaaaaataaaaaggttaatttagtgccagaagcaaacaatgtagactaccacttcaggactcaaggaatttgctaaatttccattccaatattaggcaagagtttcttggagataaaagccgtgatttcgtacgagctagtgtcatgtcacactatgtgtaaatccaccaagttaatgtcataataaagttgtacaacttcaaaggaattacataaataagcaaccttaccaagaaatgcacttccttatacattagtcaagatcaagtcctgtggttggaaaaatcagttattttctgttataaaaatttgggttacattttttaaaatcttaccattaggaaatgtctgagtgggcatgtc

SEQ ID NO: 667666 - DNA, 661 bp, Homo sapiens
atatatgtgtgtgtatatatatatatatgtgtgtgtgtgtgtatatatatatatgtgtatatatatgtgtatatatgtgtatatatatgtgtatatatgtgtatatatatgtgtgtatatatatacatatatacacactagaaagaaacaaacatgtcctacaaaaataatacatatatgtgggtgtatatatatatatatatatatatacacacgtatgtatacgtgtrtatatatatatatatatatatatgtatatgtatatatacactagaaagaaacaaagaaacatgtcctacaaaaataaaaaggttaatttagtgccagaagcaaacaatgtagactaccacttcaggactcaaggaatttgctaaatttccattccaatattaggcaagagtttcttggagataaaagccgtgatttcgtacgagctagtgtcatgtcacactatgtgtaaatccaccaagttaatgtcataataaagttgtacaacttcaaaggaattacataaataagcaaccttaccaagaaatgcacttccttatacattagtcaagatcaagtcctgtggttggaaaaatcagttattttctgttataaaaatttgggttacattttttaaaatcttaccattaggaaatgtctgagtgggcatgtc

SEQ ID NO: 667667 - DNA, 1317 bp, Homo sapiens
tgcattaaagaagccagccaaaacccaccaaaaccaagatggccacaaaagtgacctctggtcatccttactgctcactatatgctaattataatccattagcatgctaaaagatactcccaccagcaccagtacagtttacaaatgccatggcaacatccaaaaattaccctatatagtctaaaaaggggagaaacccagagttccgggaattgtccatctcttccctagaaaactcaagaataatccacctcttgtttagcatatgatcaagaaataaccttaaaaatagccaaccagcagcccgtagggctactctgcctatgcagtagccattcttttgtttctttactttcttaataaacttgctttcactttactctacggactcatcccaaattctttcttgcacaagatccaagaaccctctcttggtgtctggatcagaacccctttctggaaactacattccataatgtaaatggtaaactacagagaatatttaacactgaaaattatatttagtgtaattaatttcattctttgaggatataaatatatatgtatgtayacacacacacacacacacacacacacacacacatatatatatatcaggcatggtggctcacgcctgtagacccagaactttgggaggctgaggtggatgaatcacttgaagccaggagtttgagaccagcctggccaacatgacaaaaccccgtctctactaaaaacacaaaaaatacacaaatcagctgggcctggtggcgcatgcctgcaattccagctattagggaggctgaggcaagagaaacccttgaactcaggaggcaaaggttgcagtgagccaagatcacgtcactgcactcaagctaggcaatggagtgaaaccctgtctcaaaaaaaaaaattaataaaattgaaatagatatatatcattataaaacaaataggacatagctctgtgtgggggaaacttcagctcatttaaagacatactttttttttcaagggcaaaagttataggcatggaaagccatcaacaataagaatacaaagagtcctatattcaaaagctatatgaaaactttaaaaaagagaaatgactttcacaagtcattttggaaatttctgcatatgataattttagcctttaagggtaattcagcttgaagtttcacatttagccatagcatctctaggcttaaaccatattatcatgagcagaatctaattttgtaggttgattagaaaaacccaaattctgtgaactctaaaatattgtcactaagaccatctgccatggtgtatttt

SEQ ID NO: 667668 - DNA, 1317 bp, Homo sapiens
tgcattaaagaagccagccaaaacccaccaaaaccaagatggccacaaaagtgacctctggtcatccttactgctcactatatgctaattataatccattagcatgctaaaagatactcccaccagcaccagtacagtttacaaatgccatggcaacatccaaaaattaccctatatagtctaaaaaggggagaaacccagagttccgggaattgtccatctcttccctagaaaactcaagaataatccacctcttgtttagcatatgatcaagaaataaccttaaaaatagccaaccagcagcccgtagggctactctgcctatgcagtagccattcttttgtttctttactttcttaataaacttgctttcactttactctacggactcatcccaaattctttcttgcacaagatccaagaaccctctcttggtgtctggatcagaacccctttctggaaactacattccataatgtaaatggtaaactacagagaatatttaacactgaaaattatatttagtgtaattaatttcattctttgaggatataaatatatatgtatgtacrcacacacacacacacacacacacacacacacatatatatatatcaggcatggtggctcacgcctgtagacccagaactttgggaggctgaggtggatgaatcacttgaagccaggagtttgagaccagcctggccaacatgacaaaaccccgtctctactaaaaacacaaaaaatacacaaatcagctgggcctggtggcgcatgcctgcaattccagctattagggaggctgaggcaagagaaacccttgaactcaggaggcaaaggttgcagtgagccaagatcacgtcactgcactcaagctaggcaatggagtgaaaccctgtctcaaaaaaaaaaattaataaaattgaaatagatatatatcattataaaacaaataggacatagctctgtgtgggggaaacttcagctcatttaaagacatactttttttttcaagggcaaaagttataggcatggaaagccatcaacaataagaatacaaagagtcctatattcaaaagctatatgaaaactttaaaaaagagaaatgactttcacaagtcattttggaaatttctgcatatgataattttagcctttaagggtaattcagcttgaagtttcacatttagccatagcatctctaggcttaaaccatattatcatgagcagaatctaattttgtaggttgattagaaaaacccaaattctgtgaactctaaaatattgtcactaagaccatctgccatggtgtatttt

SEQ ID NO: 667669 - DNA, 1317 bp, Homo sapiens
tgcattaaagaagccagccaaaacccaccaaaaccaagatggccacaaaagtgacctctggtcatccttactgctcactatatgctaattataatccattagcatgctaaaagatactcccaccagcaccagtacagtttacaaatgccatggcaacatccaaaaattaccctatatagtctaaaaaggggagaaacccagagttccgggaattgtccatctcttccctagaaaactcaagaataatccacctcttgtttagcatatgatcaagaaataaccttaaaaatagccaaccagcagcccgtagggctactctgcctatgcagtagccattcttttgtttctttactttcttaataaacttgctttcactttactctacggactcatcccaaattctttcttgcacaagatccaagaaccctctcttggtgtctggatcagaacccctttctggaaactacattccataatgtaaatggtaaactacagagaatatttaacactgaaaattatatttagtgtaattaatttcattctttgaggatataaatatatatgtatgtacayacacacacacacacacacacacacacacacatatatatatatcaggcatggtggctcacgcctgtagacccagaactttgggaggctgaggtggatgaatcacttgaagccaggagtttgagaccagcctggccaacatgacaaaaccccgtctctactaaaaacacaaaaaatacacaaatcagctgggcctggtggcgcatgcctgcaattccagctattagggaggctgaggcaagagaaacccttgaactcaggaggcaaaggttgcagtgagccaagatcacgtcactgcactcaagctaggcaatggagtgaaaccctgtctcaaaaaaaaaaattaataaaattgaaatagatatatatcattataaaacaaataggacatagctctgtgtgggggaaacttcagctcatttaaagacatactttttttttcaagggcaaaagttataggcatggaaagccatcaacaataagaatacaaagagtcctatattcaaaagctatatgaaaactttaaaaaagagaaatgactttcacaagtcattttggaaatttctgcatatgataattttagcctttaagggtaattcagcttgaagtttcacatttagccatagcatctctaggcttaaaccatattatcatgagcagaatctaattttgtaggttgattagaaaaacccaaattctgtgaactctaaaatattgtcactaagaccatctgccatggtgtatttt

SEQ ID NO: 667670 - DNA, 1328 bp, Homo sapiens
aagcactgctttcattcatgtaaaattgtcaagtctagtgactgacattactttgctactaaaattttcatgttattacacattcattgactatatggattagaaaataaaaaataaatcaataaaatttttaaatatagacagcctatttcaaaaaataaaaatcaattctttggtggagagtggcaatgaagcaggcttgttttcaacagtaagctcgatattaatattagagcaattgattttttaaataaatacactgtcaaaaatttagaataagcaataattttttgttattttgaaaattcataaaaaaatcacagaaaatattcatttgttcataatgtaactgaagtaaataataaagcactaaaaaggctgccaacctacttttagtaggaattacatttgaaaataaatatcaaatagttctctgaatgaacacatttgtaactgtttacagtatttctaagaaactcatgccatttaattataagtttctatttaaaaaaatgtttattaatgtgataatgtgtttcataatttaaaaaacacataaccttaaacatatttccatttaagaagtggaaaattcataagtacatacactattatttctacagaaagatatacttttatttttttaattaattaattaattatctttttttttttttttgaggtgaagtttcactctgtctcccaggctggagtgcagtggcgccatcttggctcactrcaacctttgcctctggggttcaagtgattctcctgcctcagcctcccaagtagctggaattataggttcctcccaccaccacacccggctagcttttgtatttttagtagagatggggtttcactatgttggccaggctggtctcgaactcctgacctcaggtgttccacccacctcagcttcccaaagtgctgaaattacaggcataagccaccttatccggccagaaagatatatttttataggtgagggatatcaccataatgcaaaaactgcattttgctttcatactaacaatggtaaaaacttgtttataacttaaaatattcatggcaacaagtgctaaagcattaagtagaaaaataatttactatcaaaaaaatcaatccagtttacaaaatattgagaatatagttaaaataagcagaatattagaatagtttaaagaaacattccagccaggtgcagtagctcacacctgtaatcccagcactttgggagagtgaggtggctggatagcttcagcctagaagtttaaaaccaacctgagcaacatggtaaaacctcgtctctcaaaaataaataaata

SEQ ID NO: 667671 - DNA, 646 bp, Homo sapiens
ttttttttttttgtgagatggagtctcactctgtcaccgaggctggagtgcagtggtacaatcttggctcactgcaatctctgtcttccaggttcaagcgattctcctgcctcagcctcccaagtagctgggactacaggtgtgcaccaccacgcccagctaatttttgtatttttagtagagctggggtttcaccatgttggccaggctggtcttggtcaactcctgacctcaggcaatccacccggcttggcctcataaggtgctgggattacaggtgtgagccactgagccggccaagtaaattgttttattgtgctacctaaataacaacaaaaatgattaagatgagagaaacaattaagttggatactggagaggaaatataaatagccttcccagctttatttcttattttataactctatacatctataagaagattactataaagaaaagataaggtggtgattataatttttttgatctaattggactcatcattaaaacaggtaaaatacygtatatatgaagccaactttcttgctcatagttgttcttacgtgttgttgtccataagtgtactttagtaaatctatcacatacttctataaaagttttcaaaattattacattattaataata

SEQ ID NO: 667672 - DNA, 662 bp, Homo sapiens
agtgctgggattacaggcgtgagccactgtgcctggccgctgaagagacttccaaaagcttagattgttattaattttatctattctcccctcttttttttcttttcttttttttttttttttttgagatggagctttgctctgtcgtccaagttggagtgcaatgcgtaatcttggcccactgcagcctccgcctccctgctctgagcgattctcctgcctcagcctcctgagtagctgggattacaggcgcctgccatcatgcccagctaattttcatakttttgaagagatggggtttcaccatgttggccaggctggtctcgaactcctgacctcaggtgatctgcccgtctcagcctcccaaagtgctgggattacaggcatgagccactgcgcccggctgactcttcttattttcattcttcttgacatgttactacgtttgacacagttgttcactgccttcttattgaagtgcctccctgacttctgtgattacagtctttcctggttttctttctacctttctgtttcaatctggactgaaagggttcctcttccagcttctcatcttttgactaccccttaaatgttagtggattctaatgtgttctttttaagattataccagtatttttgaacatgttttgtagcctatg

SEQ ID NO: 667673 - DNA, 662 bp, Homo sapiens
agtgctgggattacaggcgtgagccactgtgcctggccgctgaagagacttccaaaagcttagattgttattaattttatctattctcccctcttttttttcttttcttttttttttttttttttgagatggagctttgctctgtcgtccaagttggagtgcaatgcgtaatcttggcccactgcagcctccgcctccctgctctgagcgattctcctgcctcagcctcctgagtagctgggattacaggcgcctgccatcatgcccagctaattttcatagttttgaagagatggggtttcaccatgttggccaggctggtctcgaactcctgacctcaggtgatctgcccgtctcagcctcccaaagtgctgggattacaggcatgagccactgcgcycggctgactcttcttattttcattcttcttgacatgttactacgtttgacacagttgttcactgccttcttattgaagtgcctccctgacttctgtgattacagtctttcctggttttctttctacctttctgtttcaatctggactgaaagggttcctcttccagcttctcatcttttgactaccccttaaatgttagtggattctaatgtgttctttttaagattataccagtatttttgaacatgttttgtagcctatg

SEQ ID NO: 667674 - DNA, 1619 bp, Homo sapiens
tccaaatatacagtggttaacacaaagcctagcacagattcactgctcaatacatgtaagctattattaatgttttgtctttgtggagcaaggcaaccaagcttagaaagcctatataacaaatttatctttaaaatggcaaccagcgaaagttttgattttaacttgtttcatggcccgaaacagaaacttggataataaaaaaatctgcctagtgggtaacaacaattgggccttgtttataattttatattacagtatctaaaataagtagaaacttagacatactacttttaataaatgaattccacggtatttccacagccaacaaaataaaaatcaatgcttttagataatctctttggacgttagcaacgatctatctcaatcaagattttacttgtcatttagtaatcatttaggattttgaaattccaaatccttacactgagacgatcagtggcttttctcgccaagatgcccatatgtgtaacatgaactttctgtcacataagccctcagcaattttctgtgttttgtgaagtcggcaagcactgaactgccaaagcactatttccctccaagccttgcacacaacataactaccccacagcttgatattggtgtcaatgctcaggttcagaatgaggatcaacactagattagttgacatctgtgtaagccgcaatggctccctccctcaatccctttaaacccagcatttacagttttgtacggagcatctgtaacgacaacaagcactgctggtaacactcaaacacttctggctgctgaaaaaagcagtgtgaattctagtatcaaacgagtgcccaccaggattttccatgagttgaggactaacatgagagaactggcagacagatggtctactcaataagactgctttccttgcctcacaaggcaagaggggcggctgataattcaccagaaatctaccaaccagacgaaaagaaacaacaaaacacacgttgcttctatattcaagacatcataaagcactttatatacttcgtcttatttcactgtcacaaaaatatgatgcccatcaactgatgaatggataaacaaaatgtgatatattcataaaatggagtatgatttggcaataaaaattagtgaacttcattatttatggctaaataatattccataatacaatacacacatataacagagggtgtctctgtgtgcgtgcgtgtgtgtgtgtgtgtgtgtgtgygtgtgtgtgtgtgtgtgtgtgtgtgtatcacatcacattttctttatccattcatccatcaatggacacttaaggttgtttccacgtcttgactattatgaataatgccataatgaacatggtagtgcagatagctatttgagacatggactacatttcctttagatatatactgagaagcagatttgataaagcctacggcagttctatatttaattttttgaggaacttctacacggttctccataatgctgtcccaatttatattcctatcaacacgatacaaggatcccctttactacacaccattggaaaccctgcagtttgtaacaacttgggtgaacctggaagacatatgctaagtgaaagaagtcagaca

SEQ ID NO: 667675 - DNA, 1619 bp, Homo sapiens
tccaaatatacagtggttaacacaaagcctagcacagattcactgctcaatacatgtaagctattattaatgttttgtctttgtggagcaaggcaaccaagcttagaaagcctatataacaaatttatctttaaaatggcaaccagcgaaagttttgattttaacttgtttcatggcccgaaacagaaacttggataataaaaaaatctgcctagtgggtaacaacaattgggccttgtttataattttatattacagtatctaaaataagtagaaacttagacatactacttttaataaatgaattccacggtatttccacagccaacaaaataaaaatcaatgcttttagataatctctttggacgttagcaacgatctatctcaatcaagattttacttgtcatttagtaatcatttaggattttgaaattccaaatccttacactgagacgatcagtggcttttctcgccaagatgcccatatgtgtaacatgaactttctgtcacataagccctcagcaattttctgtgttttgtgaagtcggcaagcactgaactgccaaagcactatttccctccaagccttgcacacaacataactaccccacagcttgatattggtgtcaatgctcaggttcagaatgaggatcaacactagattagttgacatctgtgtaagccgcaatggctccctccctcaatccctttaaacccagcatttacagttttgtacggagcatctgtaacgacaacaagcactgctggtaacactcaaacacttctggctgctgaaaaaagcagtgtgaattctagtatcaaacgagtgcccaccaggattttccatgagttgaggactaacatgagagaactggcagacagatggtctactcaataagactgctttccttgcctcacaaggcaagaggggcggctgataattcaccagaaatctaccaaccagacgaaaagaaacaacaaaacacacgttgcttctatattcaagacatcataaagcactttatatacttcgtcttatttcactgtcacaaaaatatgatgcccatcaactgatgaatggataaacaaaatgtgatatattcataaaatggagtatgatttggcaataaaaattagtgaacttcattatttatggctaaataatattccataatacaatacacacatataacagagggtgtctctgtgtgcgtgcgtgtgtgtgtgtgtgtgtgtgtgtgtgygtgtgtgtgtgtgtgtgtgtgtatcacatcacattttctttatccattcatccatcaatggacacttaaggttgtttccacgtcttgactattatgaataatgccataatgaacatggtagtgcagatagctatttgagacatggactacatttcctttagatatatactgagaagcagatttgataaagcctacggcagttctatatttaattttttgaggaacttctacacggttctccataatgctgtcccaatttatattcctatcaacacgatacaaggatcccctttactacacaccattggaaaccctgcagtttgtaacaacttgggtgaacctggaagacatatgctaagtgaaagaagtcagaca

SEQ ID NO: 667676 - DNA, 2050 bp, Homo sapiens
gatgcatgtaatgaaatatcctgttaatgtagcactgtaaggaagtcatatacagaataagaaccaaatttttcaagaagacgagaagtagctatttcacctttctttcatttaacataaaaaaacggtgcaggcagcctctccattttccctgaatgtcatcttttggctgatggcagaagccaaccactatttgcatactgatgctcccataattacagttgagtcccttaaacatagtctccaagttacgatttgtttgcaatataatatagcagggttaccaactttataagcaatgctatgtgtcatttgctttaggctacagtatcacatcatcttgtaagcatcaaataaatacaattaaatatgacaggtctttaaactgggcttgaagggtgatgggcattagcagacggcggacgtggccgacttctttcaggcatctgcttattgtaaggccgccccaggcacgagttagctctggaaacctctctgtcagcattttagttcaccaatcttgtatccccaaaattttcatccttcaagtctttcagttatgagattccatgggtcacatgcataatatgagataggaattttattctccctttttttcttgatctgtacagatatacttctgatattccatccactaaattattttccaccatattcacccaatagttacagaatattgccagaccattcatcttctttttaattcccttcrgattctaagtgagaaggaactctcattccctaaagattttttatatcaaggggacagtaatgcaaagcaatccctttctgaggcttttgctcttacaaagatacaacacaccatagtaccaaaggacacacgtccccaccttgttacatcagattttaatatggcaataaatgccttgaaaaatacacattttaaacttaaaagggtattgaaagccattcttctccaggtaattaccaattacccctaagggtggtagctgtaaaaccacttgatcagacaaaagtcttggtcttttcaaaagttaaagttaagtcaggggcagttgattctgctttctttactgttcccatctgagagaagtatggaatttcttaattgggaccatttgtgggaagacattgagaaagctcctttgagacacttttttttctgcttggccaactgctctagaaagaagaaacgtcaaggtgggtggagacagtggtctgggcccaccaccctcccggctgaacagcctgtcatgctatttccaaagagaactcgccaggaggggagatgactgcagaacaccaggagatggatagaatagggtaggctttaggtgcagcgtgtggcccccccatcctggggcccccagggaggaagagggggcttccgttgagataaaggccacatgccttaggaaatatccccccagaaagaacccaaaggtccagtgttcttgcagatccaatggagtccttgtagaagggaaggtggatggtgacgcctgctggggtcatgtagcggttgtccagtcagcgttcttgggggccttgcatgtgtgcacatccagagcttccaggcagtcctgacagcgcacggcgcagcaccagtggaacttacacccacacttggtcatccgggtgacatgggaggtgtcgtagcctctcccacagcacatgacttcacagctgtccatgccccgggaagtcaggttgcacacacggcctgctgtacccagggagcctggaagacaagccagggagtgttactgaaaaggtctgggtggaatccaatatgcctccagaggaggagtcacgaggtccatcctccaggacagagccctgaccctctcttcctacagcctggggctgttatactcgttctgtgggcccatgccatgtgtgcaaatcccattatgccagctgcagagagtgcagtggtgctgagagggccgagtcccaaaaaggtgaacatgaaactttggatttccttggacaccctgaatccagctctcccacttctgagttggatcgacttttcagattatcc

SEQ ID NO: 667677 - DNA, 630 bp, Homo sapiens
caaaccaccaaagatttttttaactctctaagggaaggtacttttgtttgacttactatttactattgattagggcccagactctgccaagttacmtgttaatttttgtctggtagagatacaaatgatttttgtcctgtaaaaagattttattactctacaggacattaatgagtgaggtttccaaattagcaaacttatgtcagcatgctgtttctgatggtctatccaaatctttctccttccaattctcttttcaaacagctttaccatcctctggttccttcttttgtgaagtaaacagatctttatacacactccctatagacttatataagaatcatgtttacactttttgaaaatgatgctttgacaattccactgaacaggctggggagaattttatgagaattgttggatcctgctcagaagcaagataaaaccaggctatcctctatcatggctgatctggggttcattcccagaaatgagggtcttggatcagggtcaaatatgtgggtggggtgggctcaattgctgagatacccatctcatgaggaaggatgggacccatattatgggaaacaaaacaggaagaatgagagtgaaaagattaatcctttcactaaa

SEQ ID NO: 667678 - DNA, 630 bp, Homo sapiens
caaaccaccaaagatttttttaactctctaagggaaggtacttttgtttgacttactatttactattgattagggcccagactctgccaagttacctgttaatttttgtctggtagagatacaaatgatttttgtcctgtaaaaagattttattrctctacaggacattaatgagtgaggtttccaaattagcaaacttatgtcagcatgctgtttctgatggtctatccaaatctttctccttccaattctcttttcaaacagctttaccatcctctggttccttcttttgtgaagtaaacagatctttatacacactccctatagacttatataagaatcatgtttacactttttgaaaatgatgctttgacaattccactgaacaggctggggagaattttatgagaattgttggatcctgctcagaagcaagataaaaccaggctatcctctatcatggctgatctggggttcattcccagaaatgagggtcttggatcagggtcaaatatgtgggtggggtgggctcaattgctgagatacccatctcatgaggaaggatgggacccatattatgggaaacaaaacaggaagaatgagagtgaaaagattaatcctttcactaaa

SEQ ID NO: 667679 - DNA, 630 bp, Homo sapiens
caaaccaccaaagatttttttaactctctaagggaaggtacttttgtttgacttactatttactattgattagggcccagactctgccaagttacctgttaatttttgtctggtagagatacaaatgatttttgtcctgtaaaaagattttattactctacaggacattaatgagtgaggtttccaaattagcaaacttatgtcagcatgctgtttctgatggtctatccaaatctttctccttccaattctcttttcaaacagctttaccatcctctggttcyttcttttgtgaagtaaacagatctttatacacactccctatagacttatataagaatcatgtttacactttttgaaaatgatgctttgacaattccactgaacaggctggggagaattttatgagaattgttggatcctgctcagaagcaagataaaaccaggctatcctctatcatggctgatctggggttcattcccagaaatgagggtcttggatcagggtcaaatatgtgggtggggtgggctcaattgctgagatacccatctcatgaggaaggatgggacccatattatgggaaacaaaacaggaagaatgagagtgaaaagattaatcctttcactaaa

SEQ ID NO: 667680 - DNA, 630 bp, Homo sapiens
caaaccaccaaagatttttttaactctctaagggaaggtacttttgtttgacttactatttactattgattagggcccagactctgccaagttacctgttaatttttgtctggtagagatacaaatgatttttgtcctgtaaaaagattttattactctacaggacattaatgagtgaggtttccaaattagcaaacttatgtcagcatgctgtttctgatggtctatccaaatctttctccttccaattctcttttcaaacagctttaccatcctctggttccttcttttgtgaagtaaacagatctttatacacactccctatagacttatataagaatcatgtttacactttttgaaaatgatgctttgacaattccactgaacaggctggggaraattttatgagaattgttggatcctgctcagaagcaagataaaaccaggctatcctctatcatggctgatctggggttcattcccagaaatgagggtcttggatcagggtcaaatatgtgggtggggtgggctcaattgctgagatacccatctcatgaggaaggatgggacccatattatgggaaacaaaacaggaagaatgagagtgaaaagattaatcctttcactaaa

SEQ ID NO: 667681 - DNA, 659 bp, Homo sapiens
tttccatttataaagcactgtatttgttctgaagcaagtagggtcctaggtcagagagtgtgtagrtgatgaactggaacctgacaactggggacctgaagtggcttctgatacagcacaaattccaaagtagtataactttgggaagtaagaaaaataaaagacaatacaaaacaattgaaagagtcacataatagctttttaaacctaactcatcattagatagataatatttaataaacctaatttctttttgtgtgtggctttgcttttttgtatatagtttagcattttattgctacacatttactaatgttatgacattacatatttttctgagaaaaatatccagttgttatatagatgttcatcacttcagagaaaaatcattgaccatatcgtaaaaaaaagataggtgtaagttgtttcccaaaacccaaactgagcctgcattctaccctatatacataatcaggaatgcagaatttaagtgttcatatttatgtgttattaaaaattgttttagatgcatttacctcaagagcattggtaactttttaacaatagtgaattggttgaataaattattttaaattcacaaaatggttttagttttcaaaaccagcaaagatttaaagaaatttttttacaggctgggg

SEQ ID NO: 667682 - DNA, 576 bp, Homo sapiens
ccctaagcaagcatgcagttaggcattacgtacttgtctgttttcacgatgctgataaagacatatccgaggctgggtaatttataaggaagcagagatttaatggtctcacagttccacatggctggggaggcctcataatcatggcagaagacgaagggcatgtcttacatggcagcaggcaggagagagaatgagagcgccaaggaaaaggggaaacccctttatatataaaaccatcggatctcatgatacttactcactaccaggagaasagtatcggggaaactacccccatgattcagttatctcccaccgggtccctcccacaacacgtgggaattgtgggagctacatttcaaggtgagatttgggtggggacacagccaaaccataccacattataaaggaaagaatgactatttacttctagcaagggaatgactgcctaggttacaagccaagtaaaaggcactggcaagccttccccacctggagctccccccacctccacaccacaccactgttaaattttattatttttcttctgtttttaatccttactttttgtgggta

SEQ ID NO: 667683 - DNA, 576 bp, Homo sapiens
ccctaagcaagcatgcagttaggcattacgtacttgtctgttttcacgatgctgataaagacatatccgaggctgggtaatttataaggaagcagagatttaatggtctcacagttccacatggctggggaggcctcataatcatggcagaagacgaagggcatgtcttacatggcagcaggcaggagagagaatgagagcgccaaggaaaaggggaaacccctttatatataaaaccatcggatctcatgatacttactcactaccaggagaagagtatcggggaaactacccccatgattcagttatctcccaccgggtccctcccacaacacgtgggaattrtgggagctacatttcaaggtgagatttgggtggggacacagccaaaccataccacattataaaggaaagaatgactatttacttctagcaagggaatgactgcctaggttacaagccaagtaaaaggcactggcaagccttccccacctggagctccccccacctccacaccacaccactgttaaattttattatttttcttctgtttttaatccttactttttgtgggta

SEQ ID NO: 667684 - DNA, 606 bp, Homo sapiens
caaggctttaaactagctrtagaaagagtcttccaaaatgattaaggtatggctctttattttattttattttattattattttttgaaacagagtctcactctgttgcccaggctggagtgcagtgactgcgatctcggctcactgcaagctccatctcctgggttcatgccattctcctgcctcagcctcccgagcagctgggactataggtgcctgccaccatgcccagctaatttttttttatttttagtagagacagggtttcaccatattagcaaggatagtctcaatctcctgacctcctgatctgcccatctcagcctcccaaagtgagttatggctcttaagtgaaatagcttctgtttaaatcttggttctgccactgatagggtatgacagcagtctatttgtttcaatgctttgagttcaatttctttatctataaaatgggtatgatggcactgcctctactcacttcatagagttgtttgcaatctacccccctcatagatgagagagttttcgtaaaacacctggtagattctaagtcataattaagggtaactattattctcaactggctaaatccaaaacccatgttat

SEQ ID NO: 667685 - DNA, 606 bp, Homo sapiens
caaggctttaaactagctgtagaaagagtcttccaaaatgattaaggtatggctctttattttattttattttattattattttttgaaacagagtctcactctgttgcccaggctggagtgcagtgactgcgatctcggctcactgcaagctccatctcctgggttcatgccattctcctgcctcagcctcccgagyagctgggactataggtgcctgccaccatgcccagctaatttttttttatttttagtagagacagggtttcaccatattagcaaggatagtctcaatctcctgacctcctgatctgcccatctcagcctcccaaagtgagttatggctcttaagtgaaatagcttctgtttaaatcttggttctgccactgatagggtatgacagcagtctatttgtttcaatgctttgagttcaatttctttatctataaaatgggtatgatggcactgcctctactcacttcatagagttgtttgcaatctacccccctcatagatgagagagttttcgtaaaacacctggtagattctaagtcataattaagggtaactattattctcaactggctaaatccaaaacccatgttat

SEQ ID NO: 667686 - DNA, 606 bp, Homo sapiens
caaggctttaaactagctgtagaaagagtcttccaaaatgattaaggtatggctctttattttattttattttattattattttttgaaacagagtctcactctgttgcccaggctggagtgcagtgactgcgatctcggctcactgcaagctccatctcctgggttcatgccattctcctgcctcagcctcccgagcagctgggactataggtgcctgccaccatgcccagctaatttttttttatttttagtagagacagggtttcaccatattagcaaggatagtctcratctcctgacctcctgatctgcccatctcagcctcccaaagtgagttatggctcttaagtgaaatagcttctgtttaaatcttggttctgccactgatagggtatgacagcagtctatttgtttcaatgctttgagttcaatttctttatctataaaatgggtatgatggcactgcctctactcacttcatagagttgtttgcaatctacccccctcatagatgagagagttttcgtaaaacacctggtagattctaagtcataattaagggtaactattattctcaactggctaaatccaaaacccatgttat

SEQ ID NO: 667687 - DNA, 652 bp, Homo sapiens
aaagtgctgggatttacaggcatgagccatcacactcagcctgtaaaatatatattgactctaaaatatgtattgaccctgacatttttcaccatgctcactgctacaagcctagttcaagtcactatcccctactgcctggatgactctagcagtctattcccaacccagctgtgcctacttttaagtatttaagtacaattttgtttgtttccaaaaagtgtactggattttaaccctaagtttctttaagggctcaagaactcttgaatcaatasagtcaagctgccgctttctttttctttttctttttctttttttttttcttttttttttgagatggagcctcactctgttgcccaggatggagtgcagtgacgcgatcttggttcaccacaacctcggcccccctgattcaagcgattctcctgcctcagcctttctagtatctgggactacaggcgcaagacaccatgccagactaatttttgtatttttagtagagacagggtttcactatgttggccaggctggtctcaaactcctgacctcatgatccacccacctcagcctcccaaagtgctgggattacaggcgtgagccaccgtgcccggccactttatttttctatattaagaatggaacaagtcat

SEQ ID NO: 667688 - DNA, 629 bp, Homo sapiens
gcagaaagcccctcttcctcccaagcacagagaagaggggcttaccagattactaaatagcccagctccacccagaccagcttcctgggcccctctcacagtcactagagctgaatttttgaatgcctttcaaagttagaagattcaycggaaggtcaaatgcagcctcaacctcagtgtttatacagcagagaactgaatctcccactccctcaactccccccagcaccccttcctcctcccctgcccttcctcgacatcacccagacctaccagcctcccagcactgccccgagccttttccagtcctattctgtgctgacaagggaagggccaccttccaaccatcccatacttgcaagctcagccactcacctgcagggggttccattcgggccaccctgagagcccacaggcacagttccccacccccaacagagcagttcatatggatctattttgtgttataaactgctttaagaatctggtaaaaactacattctctcaccttaggaaaatgggcaaataaataggccccaatttgtaaaattttgcctccaacattaggggattcataggtcctctttcttgaataaaccgctaaacacctacttccagacacaaactct

SEQ ID NO: 667689 - DNA, 629 bp, Homo sapiens
gcagaaagcccctcttcctcccaagcacagagaagaggggcttaccagattactaaatagcccagctccacccagaccagcttcctgggcccctctcacagtcactagagctgaatttttgaatgcctttcaaagttagaagattcaccggaaggtcaaatgcagcctcaacctcagtgtttatacagcagagaactgaatctcccactccctcaactccccccagcaccccttcctcctcccctgcccttcctcgacatcacccagacctaccagcctcccagcactgccccgagccttttccagtcctmttctgtgctgacaagggaagggccaccttccaaccatcccatacttgcaagctcagccactcacctgcagggggttccattcgggccaccctgagagcccacaggcacagttccccacccccaacagagcagttcatatggatctattttgtgttataaactgctttaagaatctggtaaaaactacattctctcaccttaggaaaatgggcaaataaataggccccaatttgtaaaattttgcctccaacattaggggattcataggtcctctttcttgaataaaccgctaaacacctacttccagacacaaactct

SEQ ID NO: 667690 - DNA, 629 bp, Homo sapiens
gcagaaagcccctcttcctcccaagcacagagaagaggggcttaccagattactaaatagcccagctccacccagaccagcttcctgggcccctctcacagtcactagagctgaatttttgaatgcctttcaaagttagaagattcaccggaaggtcaaatgcagcctcaacctcagtgtttatacagcagagaactgaatctcccactccctcaactccccccagcaccccttcctcctcccctgcccttcctcgacatcacccagacctaccagcctcccagcactgccccgagccttttccagtcctattctgtgctgasaagggaagggccaccttccaaccatcccatacttgcaagctcagccactcacctgcagggggttccattcgggccaccctgagagcccacaggcacagttccccacccccaacagagcagttcatatggatctattttgtgttataaactgctttaagaatctggtaaaaactacattctctcaccttaggaaaatgggcaaataaataggccccaatttgtaaaattttgcctccaacattaggggattcataggtcctctttcttgaataaaccgctaaacacctacttccagacacaaactct

SEQ ID NO: 667691 - DNA, 629 bp, Homo sapiens
gcagaaagcccctcttcctcccaagcacagagaagaggggcttaccagattactaaatagcccagctccacccagaccagcttcctgggcccctctcacagtcactagagctgaatttttgaatgcctttcaaagttagaagattcaccggaaggtcaaatgcagcctcaacctcagtgtttatacagcagagaactgaatctcccactccctcaactccccccagcaccccttcctcctcccctgcccttcctcgacatcacccagacctaccagcctcccagcactgccccgagccttttccagtcctattctgtgctgacaagggaagggccaccttccaaccatcccatacttgcaagctcagccactcacctgcagggggttccattcgggccaccctgagagcccacaggcacagttccccacccccaacagagcagttcatatggatctattttgtgttataaactgctttaagaatctggtaaaaactacattctctcaccttaggaaaatgggcaaataaatakgccccaatttgtaaaattttgcctccaacattaggggattcataggtcctctttcttgaataaaccgctaaacacctacttccagacacaaactct

SEQ ID NO: 667692 - DNA, 634 bp, Homo sapiens
attaaaactagctaggatatatgagtctcatgaattgaaaactggcctcaagaccacaaggagtgattataaactgccttaaatcacactgagcaaagtgtctagtagaaatgcccagagagtattagattggttataatccagtatttccattagtgcttgagaaagtaaagagtaagttagttagtgtttagtagactttaactagaagggatttctgaaaaccrgtatggcctaaactgtagaagacttagaaaaatggaaaagatatacttttttcaaaaggcaaaccctttccctttactatgaataattaatttaaagagtaattttcacctaatgatcatgaaatctccatatgcatatggaactacataaaatagtgaaaaattaaaggtttttaaatctaggctaagaacggcagcaaccttggggacctaattccttttagtctatagagattataaactcctatagagagaagggtatttgggcccataaataatccttcacacaagtacatcatacagcagcttgagctaatgctagaattgtccattccttctgagggctgtgaggcaaagctctgttccaggcctctctctttggcttgtagatggcatcttctccctgt

SEQ ID NO: 667693 - DNA, 675 bp, Homo sapiens
gaaacttaaatcagtaattgtgtaagtagtaacattatactgcagataattctaatggtactctgttacgtatatacaaaggcaggcaggagatattttgctgaatgaaggttatgctaagatcaccagaaagctttaggaaagagaattaccaagagatcttctcttaaaagaataaagccaatgacactattttatttaaaaattgtagggagaacttgggtaagatttttttttaatctcagaatttctggtattaaatcttgtaattaaataaaaagatacactctatactgaatataatacaaataagaaaatatatttcacttgcattaatctgctaatgttaaattagatttaaaacatgtagtttataatagttaagacccaaccactaggaatacagagcctttaaatgtttgtctcctgtggccccaggaaccctgtgttggaaagagctctgaggcccagcaatacagttggaagcagagattagagagacctgggaggaaaattataaccatctggatataacatcaatgtaacttgcaacataagaagttgcaagaaaattctgaaattttgtgttatttggctttragtaatagcattcaaaattattaagggccatttgtgaactgtggtgatagagttaaataaattcgatttctgatc

SEQ ID NO: 667694 - DNA, 2658 bp, Homo sapiens
ctctctctacattggattagagttgctatgttcctgttctacattccttgctagactgaaagctcactggccaggtcctattcatgcttattcattgtaaatttctccacattggaggcatcctgttcatcaatgaacacatgaataaaacttggtgttgaaactccaagttatcttgacctgcaacttcacacactcaactatataaaattgggatcaaataaatattctcgcataactattagtaagtcaatatttaccttatattgtaagtttcatctataaatatgcatcttccattgcctgatccctaacaaaacataaaaactaaaaaatcttaagattattaaaaatataggcaatgttaagatcaccagcttttcaaatgcagcaaaataaatgaaaaaaaaactttcaacagggataactaaaaccttacttttcccactgagtagatcttctagcccaatatgtttattcgtctataagaaaatattaacgttcattaattccccaaagtttgctgtcagtcaagtctccactctttcccttggggcatgagagatagtgtagatgaggtccagacatgctctactcaaggtctctgcacatggctaaaaatgcaggtgtgaaattcatgttctcaatccatgaaacaatactcatgaaaaatgcaactctgttccaggacatcgtgcagaatgaagaaataatgcaattgtggtaaatctggaaattacaattgtttgtggactgcccattttttcatatgccttccaataaatcagttgaaaacatgtattmtgtataaaaatccacagtgtgttagctctgggaatgcaccttcctccctccacctacaggcagaaccgtacacttggatcatgcacccagctgctgctctctgtctctttctctgctcaaggcttaaggccgtgtctccccaactacattcagtggaagaaaagatcccctggacaaataagtttgagaattgttgttgcaggaattctcagaactttcaaaacacaaatcctcatccgcagggatcttcaggagggagatggctgatgcagcacaactttctttcacaggagtatcttgcagaatacagtatgagatccagaaaggctgcattgagtctttttaatggcccgggccttggtgggggtggggtaggagctctccagatagcatctaatgagtaggaacattcaggttgctttttttttccttactggcaaaactgtgtgtgcaccatgaatgaagctggtctcccttatccatatcaaaattaaacccaaattaattggctaaattgggactcaacacctccaggagccatgcagaagaaagcaccaccacactttaaaatagcttacctcatcatatttgacgaaagcaaaacgcttatgaccagtatgctgctaacacaagtctacagataatgctgcaggaaaaattatttttcccagtcatagctagcatggtccacattttgcattacactttccccccttttttaaaattttaaacacaggtccttttctcttcttttttaaaattttaatttaattacacaagacggagtctcagtattttgcccaggctggtcttcaactcctgagctcaagcgatacatccgtctccgcctcccaaagtgctgggattacaggcctgagacactgtgcctggccttacacacaaatcttaattcattcttacaattatcctgaggttagaaaaatggaaggggaagaaaaatggcaagcaggtaggctgacttcggcttcattatttggaaggacagtttgctcggttaaaacacactactgcccacaaaggccaagacaacagaaaaatacagacttatataagtagattttatatgtgacagcagtttgaatggagactttttcaatgcaaatggcaaacagctgtccttgggaataaatgacaatgaattttttttatctcaacagctgtcctgggagcatgtctctacatctctacctgcattctggagtcagggagaaagccaaaacggacgacaagacactagatcagccgtgtccaaccctttgactacaaggacttttccgcctatctgtggtggtgggtatcatgaaaattatgcacaaaccttttttttttaagctcatcagctatcattagcagtagtgtattttatctgtggcccaggagcattcttcttccaatgtggccctgagaagccaaaagactggatacctgtgcactagatcaaaaggctactccttctggaagcaattgtaaagaatttctaacattatcttgacatgaaaaccaatggatagtgggacagaatgcaaaatcttcaagaatttttcttgttgggttttttgttttttttttttttgagtcaaggtgttgttctgtggcccaggctggaatacactggtgagatcacagctcagtgcaggctcaagtgctcctcccgcctcagccacagtagtagctaggactacagatgtgcacaaccactcctggctaatattttattttttgtagagatggggtctcactatattgtccagattggtctctaactccttgactcaagggatccaggacaggataacaggtgtgagccaccacacctggctatgtgcatgaact

SEQ ID NO: 667695 - DNA, 2658 bp, Homo sapiens
ctctctctacattggattagagttgctatgttcctgttctacattccttgctagactgaaagctcactggccaggtcctattcatgcttattcattgtaaatttctccacattggaggcatcctgttcatcaatgaacacatgaataaaacttggtgttgaaactccaagttatcttgacctgcaacttcacacactcaactatataaaattgggatcaaataaatattctcgcataactattagtaagtcaatatttaccttatattgtaagtttcatctataaatatgcatcttccattgcctgatccctaacaaaacataaaaactaaaaaatcttaagattattaaaaatataggcaatgttaagatcaccagcttttcaaatgcagcaaaataaatgaaaaaaaaactttcaacagggataactaaaaccttacttttcccactgagtagatcttctagcccaatatgtttattcgtctataagaaaatattaacgttcattaattccccaaagtttgctgtcagtcaagtctccactctttcccttggggcatgagagatagtgtagatgaggtccagacatgctctactcaaggtctctgcacatggctaaaaatgcaggtgtgaaattcatgttctcaatccatgaaacaatactcatgaaaaatgcaactctgttccaggacatcgtgcagaatgaagaaataatgcaattgtggtaaatctggaaattacaattgtttgtggactgcccattttttcatatgccttccaataaatcagttgaaaacatgtattatgtataaaaatccacagtgtgttagctctgggaatgcaccttcctccctccacctacaggcagaaccgtacacttggatcatgcacccagctgctgctctctgtctctttctctgctcaaggcttaaggccgtgtctccccaactacattcagtggaagaaaagatcccctggacaaataagtttgagaattgttgttgcaggaattctcagaactttcaaaacacaaatcctcatccgcagggatcttcaggagggagatggctgatgcagcacaactttctttcacaggagtatcttgcagaatacagtatgagatccagaaaggctgcattgagtctttttaatggcccgggccttggtgggggtggggtaggagctctccagatagcatctamtgagtaggaacattcaggttgctttttttttccttactggcaaaactgtgtgtgcaccatgaatgaagctggtctcccttatccatatcaaaattaaacccaaattaattggctaaattgggactcaacacctccaggagccatgcagaagaaagcaccaccacactttaaaatagcttacctcatcatatttgacgaaagcaaaacgcttatgaccagtatgctgctaacacaagtctacagataatgctgcaggaaaaattatttttcccagtcatagctagcatggtccacattttgcattacactttccccccttttttaaaattttaaacacaggtccttttctcttcttttttaaaattttaatttaattacacaagacggagtctcagtattttgcccaggctggtcttcaactcctgagctcaagcgatacatccgtctccgcctcccaaagtgctgggattacaggcctgagacactgtgcctggccttacacacaaatcttaattcattcttacaattatcctgaggttagaaaaatggaaggggaagaaaaatggcaagcaggtaggctgacttcggcttcattatttggaaggacagtttgctcggttaaaacacactactgcccacaaaggccaagacaacagaaaaatacagacttatataagtagattttatatgtgacagcagtttgaatggagactttttcaatgcaaatggcaaacagctgtccttgggaataaatgacaatgaattttttttatctcaacagctgtcctgggagcatgtctctacatctctacctgcattctggagtcagggagaaagccaaaacggacgacaagacactagatcagccgtgtccaaccctttgactacaaggacttttccgcctatctgtggtggtgggtatcatgaaaattatgcacaaaccttttttttttaagctcatcagctatcattagcagtagtgtattttatctgtggcccaggagcattcttcttccaatgtggccctgagaagccaaaagactggatacctgtgcactagatcaaaaggctactccttctggaagcaattgtaaagaatttctaacattatcttgacatgaaaaccaatggatagtgggacagaatgcaaaatcttcaagaatttttcttgttgggttttttgttttttttttttttgagtcaaggtgttgttctgtggcccaggctggaatacactggtgagatcacagctcagtgcaggctcaagtgctcctcccgcctcagccacagtagtagctaggactacagatgtgcacaaccactcctggctaatattttattttttgtagagatggggtctcactatattgtccagattggtctctaactccttgactcaagggatccaggacaggataacaggtgtgagccaccacacctggctatgtgcatgaact

SEQ ID NO: 667696 - DNA, 1915 bp, Homo sapiens
ttttgtgcatgagcattaccgcaagttttgcaagaaacataaatttaaagaaacaattatgtgcacaagatgaatttaataacatcttgatatattccatgattgcggttttatttggtaaatctttaaatgcacaccatttaaygataataaatgaatcttggaaatcttgtaggtaagggtaaatattaggatgcatccagttacatttacacacacatacatgcatacagactgattcacgtgtgtatatatatatatgaatttaccaattgatgttaactaatatttataagagccagttggattgatatatattgttgaacctgaaaaatatttattatatacatgtttaaaatacacacagaaataaatagcaattgcactaggtatttgaaactgtactaaaatataagctgtgaacattttgtgatcattacaaattcttacactgaataaatatgtttatttttacaatattaatatgtttgatacctgtgtacattttttacaatgtgttattttatttttgtcatagagtcatgtcatgcataataacattttagtcaaagatggattacatatacaaaagtggtcccatgagattataatatatatttttacatacttttctacgtttaagtatgtttagatacataacctcttaccactgtgctcttattgcctgcagtattcagtagagtaatgtagtacacagatttgtagcctaggagaaagaggctataccatataacctaaacgtggtaggctgtacaatctaggtgtttgtaatattctctgtgatgtttgcaaaatgatgaaattgcctatgaatacatctgttaaaacgtatccctatcattcagtgatgtgtgactgtactaaaatgctcaatgtaagtttcaatgccctccataaaattgttgtactgtgaaatacaaatctctcacccatggcctgaatatgtttgcaaactaagcagatcatgggaaggagaatgtgctggcatcgctgggatgattttctcacactacatgaataatatctacagacttcgtgaatatgagccacttgcatagagttaaagtagacgtctctttgctgggaaatttatcaaatgggagtatgaagtgtttttacaagatacttgtttgtttgtagctggtaggcctacagtggctcatggcaatggttgaggttgctaagatttggtggaagaaggcaaaatgagatggccacttatatggtatatggatcacttgtttctgttgagttacaaactcagctggctatttctccaatgttagttatttggagaaaaaaaaacgtgatggtaattttggggtaacaaatacaatatttgatgaaagcaaatttattgagggttagacaaactacaagatactttaggctgcaaagtcaacacgagacttctggcccaaattgtgaagagtttgcgtccagctgcacagttcaaaggaagaggccatgtaagaagattctcacttctgacaccaactgccagttcaggggtttcccctgaacaccctcagtttcaagagtttactagaaagactcacagaactcattgaatgccactgtactcatggtttataatagagaaagggtagaaattaggaccaatagaagagacatatcatataaggtggaatctaggagattttgaatgttaagtttccattgtcttcaggacatattacctgtcactgttgtacagcaacaaacatggagtactaccaacctggggagctcacctgatgctaacaagacactatttacaaaatgaaaagacaaatgaaaggatgagataagatgacgttccacattaaggcactggaacgattagcaaactaaacctaaagcaagcagaaggaagaaaattaaaattagagaa

SEQ ID NO: 667697 - DNA, 622 bp, Homo sapiens
tgtaattaaataaatgacatctcccttactagattacaaacatttttatgagaggaaattatgaactgtatttccttctttcccttcagagcctattaccaagctttgtgtatagtgaaggttcaaaaggtatttagcagttgattatatttcattcatagcccatcacagttctctgtaaatagctagaggaagagcccaggagctaggaattragtaaagagtgcttttttatctatgtgcttttctagatcaccctttcccccagactgccctggcactgaagaactttttgccttcttatttccaatgacatctgcgtccaatccactagacctgcctgctgctcctcacatgcatgtcccatcatcatggattgctctcccatggaggttctaaactgaaattccaattgcattttaaattaaattttctaagccaatggcctgtcaatgcctctaactaccatgcttaagactaaattcatcatcttgttatccagatttatttttttcatatttctggttaccatgccatcactggcctgctaaatggtgtttaaaacctccaagtcatctcttttccaaatccaaatgctctgttgacaaaagcatcttctttt

SEQ ID NO: 667698 - DNA, 640 bp, Homo sapiens
tgggagggcttctacaggctgaatatttgtccttcctccaaaattcatatgttgaaacctaatccccattgcagtggtatttggaggtgggccctttgggagataattaggtcatgagggtggagccctcgtgaataggattaatgtctcatacaaggggctccagagaactgccttgccgcttgaacacatgagattcttgcaagaagatggccatccatgatccaggaatttggccctcatcagacaccaaatctaacaatttcttgatcttgtacttctcagcctccagaacagtgagaaatagattcctaattataagccactcagactagtattttgttttagctgcctgagtgaacttagaataaacccaagatctttgccatgatgacatgttttctttttaagggagaaaaaactgaaatctaagtaatattcatccagaagtaattttcaaagtttatgattatcttttataaccactgtttcattgaaaatatacaaaatacagaataatattattctactgatacratgagaaagaattatcttgaatcttgtactgtatcaaatattcctgaaatggaaaaaatgattcctacctttttgtgttttttaatataatgttctcactgaa

SEQ ID NO: 667699 - DNA, 599 bp, Homo sapiens
gaaaactcagggttatggtggttgttggattattcttgcaggctactggggtatccttgataattggaacctactggaacaccataattcccctaagcaaaccaagcttcccctaaatagcagaagttcttaggagtttcttttgtggtccctcctgtgttgtatttcacatataagctgctccactgggaaatcaatgtttgtcacagtctgaccccactcaatctgctcaaatgtaattcacactgtttttttaatggcatatgacatctgcttctttccttcctgtcctcactgcctttgacatggtttttttccctgctagtccttcttgtttaactacacatctctaggaaagctttcctgcctactccagtcaatattaaataaaactttctctgaactctcagtgcacagtcagtttatacacctgcmtacttcttgtaatgctagcaaaaaaaaatggcccccaaattttcttcctatatggaaactcacatgagcagccatcaatccccatcataattcttgtaaaagttgtagcatttctatttctgttcatggaaagaataagatcaaggatcaacttcttaatattg

SEQ ID NO: 667700 - DNA, 636 bp, Homo sapiens
gccaggacaaaatgtaattgttataatttaagaaatacataattaagagaaaacaacacatctgaggaaagtaattacagtgctcagaygttaattaagagacactaaaaaacagactacttgttgaaatagtgatgtttgatagaatattagctatgttattaaaagcttaaaatccattattttattacataatagctaaaagcagcaatatttggtctaatgaagaattggcaaatagctataaggaatgattaaggcttctgcaggacttaatttggataaatcaggttttaaaacacaattatatagggaatgaattaaattattgaagttttaaaattatgagcacagaaaggaattatataggtttaaaattaatttttaagaatgaatactttcatcccactttcaaaaggctttattttttaaaaaaagtatttaaaatgaggcctgagtcaaacatttcagtatgagaagccttgcacaaaatttagctattgtagttatggtcctttggagacggtattagtcataaaactatgtatggtctttgtattaggataaatttactttggcttctgaagtttttgataaggatatatcttctgtgcaaaagcagaaagggctgtaaaa

SEQ ID NO: 667701 - DNA, 636 bp, Homo sapiens
gccaggacaaaatgtaattgttataatttaagaaatacataattaagagaaaacaacacatctgaggaaagtaattacagtgctcagatgttaattaagagacactaaaaaacagactacttgttgaaatagtgatgtttgatagaatattagctatgttattaaaagcttaaaatccattattttattacataatagctaaaagcagcaatatttggtctaatgaagaattggcaaatagctataaggaatgattaaggcttctgcaggacttaatttggataaatcaggttttaaaacacaattatatagggaatgaattaaattattgaagttttaaaattatgagcacagaaaggaattatataggtttaaaattaatttttaagaatgaatactttcatcccactttcaaaaggctttattttttaaaaaaagtatttaaaatgaggcctgagtcaaacatttcagtatgagaagccttgcacaaaatttagctattgtagttatggtcctttggagacggtattagtcataaaactatgtatggtctttgtattaggataaatttactttggcttctgaagtttttgataaggatatatcttctgtrcaaaagcagaaagggctgtaaaa

SEQ ID NO: 667702 - DNA, 1394 bp, Homo sapiens
atatttatgaggtttcagagtatatttggggagaaaattctataacttttaaatatgattctttagcttcaaaacgtacatgtttaggtaaattgcaataactgttttactttcatttatggtgattgcttgttcatgcttgagcacaagagagaaagcttgatttaaaacgtaagtctcattgatgagtttttatgccaccatcattttaaaaagtaaatttagtagaaagctaattttggcatataatgcaaattcctctactttatctggccttcatttaatgattttggagttatcactgcaaggtgtttatatagattagataccacagagatctaaggaactatatttatttgatcctaattaatatttggccttaaatagatagtcacaccactttccaatttcctaattttaagcaattaaacagctagcagctgttggccagataaatattaaactttgccaagtagatatatgcaagttttttaaccatatttggactatattagaatagattacaaaatgtgttgacatcatatactttagaagattgtatgttacaggttcatactgaacaattatttattatctgtttggtattgttaaaactcatgctaaaatatcatggatagttgtatactatctatgcatgccggctcatagtatgtgaagacacatcaaataaaaactcctatgastatctttacaagcgtgctttgtatttaaataacattaaagataattaaatattgtgttagtgaggaactttatttccttatttggaatattcttaaacttttacagtatgttctttttttgacagtgaaattgtcaaatgagcaatcacaatgataaagaatgaaaccataagtagtgtagaatgtatttatgtatttatttatttttttgagatggagtctctatcgcccaggctggagtgcagtggcgcgatctcggctcactgcaagctccacctcccgggttcacgccattctcctgcctcagcctcccaagtagctgggactacaggtgcccgccaccatgcccggctaatttttttttgtatttttagtagagatggggctttaccgtgttagccaggatggtctcgatctcctgacctcgtgatcctcccgcctcggcctcccaacgtgctgggattacaggcgtgagccactgcgcccggccaataatggagaatttaaagcagtggttcctaaattttagagaccatcagaattacctggagggcttactgaaaaaagattactggtcctgattttcagagtttctgattcagtaaatctgagatagaagccacaaatttaatgtctaacaaattctcaggtgttcctgatactgcagatctgaggagccaaacgttgcag

SEQ ID NO: 667703 - DNA, 629 bp, Homo sapiens
tggctttcaatatgtgtgaatgccttgctgaggtatctctaaaggagatactttatgtttccttattttcatattttattatttccatgtgttaaaaaaaaatgtacatgggtagtttatcaaagaatcatatagcagtttactgaacttacaattaaattttctaaaaagattaaaactcatggccagctaacagccacatcaacaactaaacataccggaatcctgtagctgttcaatttaataaaaatttgcaggaggggtgattagcttctctctctttttttttgtctttttaacttttaaattcccactttcagtgcccagatgccactccataaatactcatcaattgtctctactcttttcactgaattataaatgatcatttcaaytgatgtttattcaaaattcaatttcccttaatttggaagacaaataactgaaataggactatattttacacaaaatccagatgaccatagtaggtcatccaacccaccttcaaaattattcaagaataattaatttttcaatggttactttgagatattatactttttttttttttttttttttttttttttgagacagggtcttgctctgttccctagtctggagtgtagtgg

SEQ ID NO: 667704 - DNA, 1630 bp, Homo sapiens
tgggatacaactttgcataggagaaaagcagaaggaaagctgactctttctaagctattagaaaagttcctcgtaaagcagttataaaaacagtaggttactaatatttgcaaacttaaatgcaattgaaatgagcattaactgcaattctgattctatcaaagttttgtaatattctcattgctgtttaagttttggataacttttttcttttcttttgagtctttaaaaaaataaaaaataaagcttgatgtgacataataaataaaggtgcaattcataacctcctttcctcacactataaaaaaacaaaaaaacaggaaaatatggcaacacaattaatggcaccaatcaatgaaggaaagggccatgatcaagtgacaaaatttaatagcctgggggataaggaaagaatgaggtgattccatagaagagctcaacacagctgggttcctaagcctactttgaaccccaaatctggagacaagtamtctgagtggatactattgtatttttccttttcagagaagagaactttagaaattgatgctgagagaaatgattaaattgtgaataatgagtttgacaatttcagaaagaaaaggatctgaaggaaaaataatccaaactccattggtatctttctagggaaatgaaatgcgtatctccaaatgaatagaataaaccctgataaagggcccataacaataacaaagaaaaaccgcatctctattatgaaaaatttcaaacatgtttttcaaaaagagagactagtttaatgagctgccatgctcttatcactcaaacttaacaatcatcaacaacagttgccaaatttgttccatctatactgccacaagctccagctttcttttaatttggagcatgtggcagttggttaccaatttggtcatttttttttttttttttttgtagtcaatggcatgtctattacatagcaggtattcaatggcgtttgctaaatgaatgaattaatcaatgaatgcatcaacctccattcagccatttcccagaaaatgagtctgcctttaaaaatgatgaatgttatacatgatgaatataacaggtaaatatatgcaaagaacaacatcgtgttgaaacatgctcaaggacaggcatttcaaagatgattcaggctaacattatggattcttcttaaatgagaaagaaaatcctgctgatggatgtcttcctaagccagttgggactaagaaacacagttgaagctcatccgtgacagaactaaaatgatcaggcctaaggtcatagcaacaacttgttgctgacacatcagcaacttgtacagacatcagcctgtaccttaaaacaatgcacttatatgaacttaaaatatgcttttgtaaaactgtcagatctaaattgatgtaatttaacatttttttgatagtgaattttatgtcttacagagccagtgctaaaaaatgtgcatagacacatatatacacatgtgtagacatacaaagaccaacataaatgcataggattacaccatttttaccatttgtttcccaaatactctagaggccagccctatttgcctgggaaaatatatatatatatatatatatatatatatatatatatatat

SEQ ID NO: 667705 - DNA, 1630 bp, Homo sapiens
tgggatacaactttgcataggagaaaagcagaaggaaagctgactctttctaagctattagaaaagttcctcgtaaagcagttataaaaacagtaggttactaatatttgcaaacttaaatgcaattgaaatgagcattaactgcaattctgattctatcaaagttttgtaatattctcattgctgtttaagttttggataacttttttcttttcttttgagtctttaaaaaaataaaaaataaagcttgatgtgacataataaataaaggtgcaattcataacctcctttcctcacactataaaaaaacaaaaaaacaggaaaatatggcaacacaattaatggcaccaatcaatgaaggaaagggccatgatcaagtgacaaaatttaatagcctgggggataaggaaagaatgaggtgattccatagaagagctcaacacagctgggttcctaagcctactttgaaccccaaatctggagacaagtactctgagtggatactattgtatttttccttttcagagaagagaactttagaaattgatgctgagagaaatgattaaattgtgaataatgagtttgacaatttcagaaagaaaaggatctgaaggaaaaataatccaaactccattggtatctttctagggaaatgaaatgcgtatctccaaatgaatagaataaaccctgataaagggcccataacaataacaaagaaaaaccgcatctctattatgaaaaatttcaaacatgtttttcaaaaagagagactagtttaatgagctgccatgctcttatcactcaaacttaacaatcatcaacaacagttgccaaatttgttccatctatactgccacaagctccagctttcttttaatttggagcatgtggcagttggttaccaatttggtcatttttttttttttttttttgtagtcaatggcatgtctattacatagcaggtattcaatggcgtttgctaaatgaatgaattaatcaatgaatgcatcaacctccattcagccatttcccagaaaatgagtctgcctttaaaaatgatgaatgttatacatgatgaatataacaggtaaatatatgcaaagaacaacatcgtgttgaaacatgctcaaggacaggcatttcaaagatgattcaggctaacattatggattcttcttaaatgagraagaaaatcctgctgatggatgtcttcctaagccagttgggactaagaaacacagttgaagctcatccgtgacagaactaaaatgatcaggcctaaggtcatagcaacaacttgttgctgacacatcagcaacttgtacagacatcagcctgtaccttaaaacaatgcacttatatgaacttaaaatatgcttttgtaaaactgtcagatctaaattgatgtaatttaacatttttttgatagtgaattttatgtcttacagagccagtgctaaaaaatgtgcatagacacatatatacacatgtgtagacatacaaagaccaacataaatgcataggattacaccatttttaccatttgtttcccaaatactctagaggccagccctatttgcctgggaaaatatatatatatatatatatatatatatatatatatatatat

SEQ ID NO: 667706 - DNA, 1010 bp, Homo sapiens
atgatatactacttttgaatgtttacatactctgcaacccagaaatcctacttttggggaatataccccaraaaaacactgatgtgtgtgtaccaagagacatgaataagagcattcacagcaacagtggcagaatactgaggaaaatgaaataggagaacttaactgatcatagatgaggcatattgtggtatattcacacaaatatacaaccgtggaagtaaatgaacatgtatgaattataatgcaataatctagtgagttgtagagaattacaaattatgatggaagttttttaaagctcaaaaaagctaaataataaattatctagagtacatttatatatcataaaatatatggattagttataccattgaatgaaaatagttagttgcagaagactagcgtatgacaccattgacaccatttttgtaaaactgtaaaataagcaaggctaaatatttattgtttggcaacacatagagatatatagagttttacatgtaaaattacctataaatgtcaacagcacattgacatggtaaatacgaagttcaaaatgggatatccctggcatggaatagagagctgggatggcggagggccacacgggaagctgcaatagaatttttgatgtttgcttcattctctaggtgatgtgttcactggtgttcatcttatcatgtttttaaattgacaagcatgttacatatacaccacagaatactatgcagccataaaaaatgatgagttcatgtcctttgtagggacatggatgaagctggaaaccatcattctcagcaaactgtcacaaggacaaaaaaccaaacaccgcatgttctcactcataggtgggagttgaacaatgagaacacatggacacaggaaggggaacatcacacaccagggcctgttgtggggtggcgggggagtggggagggatagcattaggaaatatacctaatgttaaatgacgagttaatgggtgcagcacaccaacatggcacatg

SEQ ID NO: 667707 - DNA, 609 bp, Homo sapiens
agcaaaggacattccttgcatggatgaaactggtcctctagctttgcccatgggttcttctcctatcctccttattagtggtggcatgtggaaagaaaaggtgcagttaacattgaatgagatgatattctagaaacatagcaattacagctcaaagagttctagagaagacatgattggaagacatgttgttctacatttatggtataaaattccaagtgataaatttaacataaccagaaaatgagttttcattcactttttttccgcataatatgggtaagacttgtacctgtggtcattatcaacaaagcatgttaacctttaagagagactttcaaagccaatattcatgggcagcatgatggatgatgccatgtcatgagtaatgatgtaaccaatattacatcagtggtatcaggaaactgcaggagcaagaatatctatgaatctgtatttgcttcaatacaaacaagttctgaagagccatagcattgtaagaaattagccagtagtggtgcaggtgacagtaaagaacacaaagagatggttcctggasctgaacaggtagagacattacaataaatatttttgtgtgctgaatggaca

SEQ ID NO: 667708 - DNA, 1395 bp, Homo sapiens
ttttgatggaggttatggatttcttgggagcattttttctacytcccttttgagagctttttttgtatatgttttagtactcatttactactcttcttttgctctgttcttcaccaagatggctggctgataatattgatcgtacattaatcatcatttctgctttctctattagagataacggtgatacaggaaaagtttccattgaattctgagatatgtcttaaggaaaactcatttaaaaaaaacagcaaaaaaaccgcaccttttaatgtatgtctctgtagttcaaaattaacacaggattgaaagttgaggaaattaaggaaatccccagaaaataggaggaaaagataaagaaataaaaataggatgaaaaaggtgaggaacgtgagagaataatctaggagtccatgatatctctaacaagagaaaagcgcagaggaaacaaagggagggatacttaaatgaggagatgcaagaccctcctaggctaggaggtgacctcaggtttgggactattaccaacagctccctgagtgttgttgcgcttcacgtgccacctggatcaatttagtcacttggcagatgtcagtctctttttagagattatctctagaatcaagtagaggcagttcagagtcattaagtcaaccactaagtcagaaaactcactatgagatggtaaaagaatgaagacaaatctcagactaaatcttctaaatttaatgctatataatggccaagcaggcacaaatagttctgcaacaacttgttggagtttgggagaggacttgttgctatgccttgaagaacactggcagcatggctaatgaaagactctgagccaatgtgaccttgcaggatgagaggcctggtaggcgactcagatgtatggtgtggggaggtcatgggggagaatgcaggctgcatctcccgggaatcttccatttggagcccatgggcacactgcctcagattatgccccaataccacattataatgacattcataagttgtagtaaatttatacacttgtgcaatcatcacaattgagctttcgaatatttccatcacctccaaaatttccctcatgctcatttgctgtcaaccccccttcccatctgctttctgtctttataattttgctttttctagaaattttaggcaaacggaaccactcacaatatgtagttgtgtctggcttctgtcacttagcaaaatgtttctgaggttcatccatgttgctacaagtatcagtagtttgttctttcttattgctgagtactagttatttatttatgtaatttatcattttttttctttaatagatcttagtttttgtatcctatctaagaaatctttgtctatcccaagaccataaagatctttcct

SEQ ID NO: 667709 - DNA, 1395 bp, Homo sapiens
ttttgatggaggttatggatttcttgggagcattttttctacttcccttttgagagctttttttgtatatgttttagtactcatttactactcttcttttgctctgttcttcaccaagatggctggctgataatattgatcgtacattaatcatcatttctgctttctstattagagataacggtgatacaggaaaagtttccattgaattctgagatatgtcttaaggaaaactcatttaaaaaaaacagcaaaaaaaccgcaccttttaatgtatgtctctgtagttcaaaattaacacaggattgaaagttgaggaaattaaggaaatccccagaaaataggaggaaaagataaagaaataaaaataggatgaaaaaggtgaggaacgtgagagaataatctaggagtccatgatatctctaacaagagaaaagcgcagaggaaacaaagggagggatacttaaatgaggagatgcaagaccctcctaggctaggaggtgacctcaggtttgggactattaccaacagctccctgagtgttgttgcgcttcacgtgccacctggatcaatttagtcacttggcagatgtcagtctctttttagagattatctctagaatcaagtagaggcagttcagagtcattaagtcaaccactaagtcagaaaactcactatgagatggtaaaagaatgaagacaaatctcagactaaatcttctaaatttaatgctatataatggccaagcaggcacaaatagttctgcaacaacttgttggagtttgggagaggacttgttgctatgccttgaagaacactggcagcatggctaatgaaagactctgagccaatgtgaccttgcaggatgagaggcctggtaggcgactcagatgtatggtgtggggaggtcatgggggagaatgcaggctgcatctcccgggaatcttccatttggagcccatgggcacactgcctcagattatgccccaataccacattataatgacattcataagttgtagtaaatttatacacttgtgcaatcatcacaattgagctttcgaatatttccatcacctccaaaatttccctcatgctcatttgctgtcaaccccccttcccatctgctttctgtctttataattttgctttttctagaaattttaggcaaacggaaccactcacaatatgtagttgtgtctggcttctgtcacttagcaaaatgtttctgaggttcatccatgttgctacaagtatcagtagtttgttctttcttattgctgagtactagttatttatttatgtaatttatcattttttttctttaatagatcttagtttttgtatcctatctaagaaatctttgtctatcccaagaccataaagatctttcct

SEQ ID NO: 667710 - DNA, 1395 bp, Homo sapiens
ttttgatggaggttatggatttcttgggagcattttttctacttcccttttgagagctttttttgtatatgttttagtactcatttactactcttcttttgctctgttcttcaccaagatggctggctgataatattgatcgtacattaatcatcatttctgctttctctattagagataackgtgatacaggaaaagtttccattgaattctgagatatgtcttaaggaaaactcatttaaaaaaaacagcaaaaaaaccgcaccttttaatgtatgtctctgtagttcaaaattaacacaggattgaaagttgaggaaattaaggaaatccccagaaaataggaggaaaagataaagaaataaaaataggatgaaaaaggtgaggaacgtgagagaataatctaggagtccatgatatctctaacaagagaaaagcgcagaggaaacaaagggagggatacttaaatgaggagatgcaagaccctcctaggctaggaggtgacctcaggtttgggactattaccaacagctccctgagtgttgttgcgcttcacgtgccacctggatcaatttagtcacttggcagatgtcagtctctttttagagattatctctagaatcaagtagaggcagttcagagtcattaagtcaaccactaagtcagaaaactcactatgagatggtaaaagaatgaagacaaatctcagactaaatcttctaaatttaatgctatataatggccaagcaggcacaaatagttctgcaacaacttgttggagtttgggagaggacttgttgctatgccttgaagaacactggcagcatggctaatgaaagactctgagccaatgtgaccttgcaggatgagaggcctggtaggcgactcagatgtatggtgtggggaggtcatgggggagaatgcaggctgcatctcccgggaatcttccatttggagcccatgggcacactgcctcagattatgccccaataccacattataatgacattcataagttgtagtaaatttatacacttgtgcaatcatcacaattgagctttcgaatatttccatcacctccaaaatttccctcatgctcatttgctgtcaaccccccttcccatctgctttctgtctttataattttgctttttctagaaattttaggcaaacggaaccactcacaatatgtagttgtgtctggcttctgtcacttagcaaaatgtttctgaggttcatccatgttgctacaagtatcagtagtttgttctttcttattgctgagtactagttatttatttatgtaatttatcattttttttctttaatagatcttagtttttgtatcctatctaagaaatctttgtctatcccaagaccataaagatctttcct

SEQ ID NO: 667711 - DNA, 1766 bp, Homo sapiens
tacctggtcagttaccccattcccagccaccctgaccaataactttggcagttaaaacaatagcaacctatttattgaaattagaactgttttggggtagttactttcctttataattagctgtgtgactagttagattaactcactaaagtgactagctgaaaatcactatgagcaaatcattttaacttcaggaactaagttctgatatttgtaaaataaaagccttggactcagtaacaattaataaactataaacttctattaagatttatggtaagaaacataaactttaaacaatttaggatattaaccattaggggaaaagtctaggtcttattcatctaaaactccctatttcttaaatgtttctactaagtcaatcttggagttataaagatgcctaactgatagagcaacttttttggatttccttaataatagggaatacacatacttcaygaaaatccccaatattgtttacattagaataaaatttaagtattggacagaagagtttagattacaagaagaattcatttaaatagcacctgacgttccctaacaacagtgattttatgaaacattgtaattgatttgccacctatgtgtggatctatcctaaactgactcctttagtttgcaggttcgttggggattcaatgtcttttacttctttttcagtctcaacaacagctaattcagtactctaaatatagtcagcattcaatacaaatttaattattgactgaatctaggctgtcaggggaaaaaaagatttgctacttgtttggacatgtctctctgattcaatgccacttttgccttaccagctaatcagtcagtagactaagggtggtgcatttttgatcttcccccttaaagaaggtcagtggctgaaaatgagatccagagtgattacattagaaggattttcatgtgtactccatcagggagattaaatgtccaggtgcctcccacgtttccttttaggacttgttcttagtcttcatacttcaagggctcaagagcagcactgacacgcaacatattcattgtccatccccaattacgttctcaaaaggtaactgttacatattgtattagagttctccagctaaacagaaccagtaggatggagagaaagggggctcgagaggaggagggagatgggggagagagagaaggaagggaagggggaaagggaagctggtaaatctaaaatttgtagggcagcctggcaggctggagacccagagaagagttgatgttgcagctgaagtgggaaggaagataggaggcagaattccgtcttcctcaggagacttcagttgtttctcttaaggccttcaattgtttggatgaggcccacccacaccacaaaaggtaattggctttactcaaagtctgctgattgaaatatccttagatctaaaaaacatctttatagcaacatctagaccaacgtttgaccaaacatctgggcactgaaatctgggcaagttgacacaaggaattaaccatcacacatatcaaaatgggacattttcatcattccagttatcttttgaaagttctctgatttctttcactatttaaaatattctccaaataacaaacagttcgccaatgctgataattcttttttttttttcctttttctgtttttttctctctttcataagacagggtctcacttggtcacccaggctagagtgcagtgatgtgatcatagctcactgctgccttaaactcccgagtgcaaa

SEQ ID NO: 667712 - DNA, 1766 bp, Homo sapiens
tacctggtcagttaccccattcccagccaccctgaccaataactttggcagttaaaacaatagcaacctatttattgaaattagaactgttttggggtagttactttcctttataattagctgtgtgactagttagattaactcactaaagtgactagctgaaaatcactatgagcaaatcattttaacttcaggaactaagttctgatatttgtaaaataaaagccttggactcagtaacaattaataaactataaacttctattaagatttatggtaagaaacataaactttaaacaatttaggatattaaccattaggggaaaagtctaggtcttattcatctaaaactccctatttcttaaatgtttctactaagtcaatcttggagttataaagatgcctaactgatagagcaacttttttggatttccttaataatagggaatacacatacttcatgaaaatccccaatattgtttacattagaataaaatttaagtattggacagaagagtttagrttacaagaagaattcatttaaatagcacctgacgttccctaacaacagtgattttatgaaacattgtaattgatttgccacctatgtgtggatctatcctaaactgactcctttagtttgcaggttcgttggggattcaatgtcttttacttctttttcagtctcaacaacagctaattcagtactctaaatatagtcagcattcaatacaaatttaattattgactgaatctaggctgtcaggggaaaaaaagatttgctacttgtttggacatgtctctctgattcaatgccacttttgccttaccagctaatcagtcagtagactaagggtggtgcatttttgatcttcccccttaaagaaggtcagtggctgaaaatgagatccagagtgattacattagaaggattttcatgtgtactccatcagggagattaaatgtccaggtgcctcccacgtttccttttaggacttgttcttagtcttcatacttcaagggctcaagagcagcactgacacgcaacatattcattgtccatccccaattacgttctcaaaaggtaactgttacatattgtattagagttctccagctaaacagaaccagtaggatggagagaaagggggctcgagaggaggagggagatgggggagagagagaaggaagggaagggggaaagggaagctggtaaatctaaaatttgtagggcagcctggcaggctggagacccagagaagagttgatgttgcagctgaagtgggaaggaagataggaggcagaattccgtcttcctcaggagacttcagttgtttctcttaaggccttcaattgtttggatgaggcccacccacaccacaaaaggtaattggctttactcaaagtctgctgattgaaatatccttagatctaaaaaacatctttatagcaacatctagaccaacgtttgaccaaacatctgggcactgaaatctgggcaagttgacacaaggaattaaccatcacacatatcaaaatgggacattttcatcattccagttatcttttgaaagttctctgatttctttcactatttaaaatattctccaaataacaaacagttcgccaatgctgataattcttttttttttttcctttttctgtttttttctctctttcataagacagggtctcacttggtcacccaggctagagtgcagtgatgtgatcatagctcactgctgccttaaactcccgagtgcaaa

SEQ ID NO: 667713 - DNA, 592 bp, Homo sapiens
ttttcctctgctcagcatcaccagagatgtgtcaattttattagtcttttcaaagagtcaacttcactgatcatatctattcatgttttctatttcattgaattatgttattttcaatttactttttagaattatttttgctgatgyttttatcatctcattattttcttttttaaaatgtatttccctttttaaattttttagagacaaggtcttgctctgttgcccaggctggagtgcgttggcatgatcatggctcactgcagcctcagcctcgaacttctaggctcaagtgatcctcccatcttagcctccggagtagccaggactacaggtgtgtgccaccacacctgacttcttattaattttcagccttttttgctattatacagttttaccacttaaactatccttttaagcactccttcaattatctctctctaggtatgtagtattgattttctaatttgtatttgaatttttaatgactcatgaatattttagaaatgtgtttcttcatttatatatgaggatattttagtgaactttttgttgatttctagtttaactacattgttgtcagagaaaatgc

SEQ ID NO: 667714 - DNA, 592 bp, Homo sapiens
ttttcctctgctcagcatcaccagagatgtgtcaattttattagtcttttcaaagagtcaacttcactgatcatatctattcatgttttctatttcattgaattatgttattttcaatttactttttagaattatttttgctgatgcttttatcatctcattattttcttttttaaaatktatttccctttttaaattttttagagacaaggtcttgctctgttgcccaggctggagtgcgttggcatgatcatggctcactgcagcctcagcctcgaacttctaggctcaagtgatcctcccatcttagcctccggagtagccaggactacaggtgtgtgccaccacacctgacttcttattaattttcagccttttttgctattatacagttttaccacttaaactatccttttaagcactccttcaattatctctctctaggtatgtagtattgattttctaatttgtatttgaatttttaatgactcatgaatattttagaaatgtgtttcttcatttatatatgaggatattttagtgaactttttgttgatttctagtttaactacattgttgtcagagaaaatgc

SEQ ID NO: 667715 - DNA, 592 bp, Homo sapiens
ttttcctctgctcagcatcaccagagatgtgtcaattttattagtcttttcaaagagtcaacttcactgatcatatctattcatgttttctatttcattgaattatgttattttcaatttactttttagaattatttttgctgatgcttttatcatctcattattttcttttttaaaatgtatttccctttttaaattttttagagacaaggtcttgctctgttgcccaggctggagtgcgttggyatgatcatggctcactgcagcctcagcctcgaacttctaggctcaagtgatcctcccatcttagcctccggagtagccaggactacaggtgtgtgccaccacacctgacttcttattaattttcagccttttttgctattatacagttttaccacttaaactatccttttaagcactccttcaattatctctctctaggtatgtagtattgattttctaatttgtatttgaatttttaatgactcatgaatattttagaaatgtgtttcttcatttatatatgaggatattttagtgaactttttgttgatttctagtttaactacattgttgtcagagaaaatgc

SEQ ID NO: 667716 - DNA, 625 bp, Homo sapiens
tatatgtgcagatgtattatgatacagtttatatgtgcagatgtattatatatgatacagtttatatgtgcagatatatgatagtttatatgtgcagatatgatagtttatatgtgcagatatgatagtttatatgtgcagatgtattatatatgatacagtttatatgtgcagatgtattatacacaatttatatgtgcagattatrtatgatacacacacagtttatatgtgcagatatatgatatagtttatatgtgcagatgtatatatgatagtttatatatgcagatgtattatatgatagtttatatgtgcagatatatgacacagtttataagtgcagatgtattatatatgatacacagtttatatgtgcagatgtattatatatgatacagtttatatgtgcagatgtattatatatgatagtttatatgtgcagatgtattatatatgatacacagtttatatgtgcagatgtattatatatgatagtttatatgtgcatatatatgacagtttatatgtgcagatatatatgacagtttatatgtgcagttatatatgatacagtttatatgtgcagatgtattatatatgatagtttatatgtgcagatata

SEQ ID NO: 667717 - DNA, 642 bp, Homo sapiens
actctccatcacccgtgagaacctggggccgtgagccacccttgccgtgggccactgctaatctgcttctgtccctctagttttgactctgcctctgtcacacagattcagggcaaggtggcttcctgcacggcagaatacactcgagagtcaccatgctcttggggccttgggagtttgcccctcgtgatgccaagtagtaagtatcccttagacggcgtctcatggtttatcctttccccaactgaggggtatgtgggctgcttccagtttctggtgagatccgaatacggctgaggctgccacctctgcacagaggcagacactctgtacctcaggagaggagcaccagctccactgcaaacagcacagccccacgtagagcactcaggtgaaggcagcgcaggcggcgaaggcggcccaaagaaccaactgagtttcagctgcattgattatcaattcatgttgattaaaagcttagactcataactcatgattttgaggaataagaatgggaaaaactattgtttaatacacgtagtttgataggccaaaattttcaacacatgaagtcaaccagaggaaaaataarcgaagtccttcgagtacaaaggataagctagacccgctgactagagaata

SEQ ID NO: 667718 - DNA, 1141 bp, Homo sapiens
  misc_feature 326, 400, 406, 407, 408, 409, 410, 411, 412, 413, 414, 415,416, 417, 418, 419, 420, 421, 422, 423, 424, 425, 426, 427,428, 429, 430, 431, 432, 433, 434, 435, 436, 437, 438, 439,440, 441, 442, 443, 444, 445, 446, 447, 448, 449, 450: n = A,T,C or G
  misc_feature 451, 452, 453, 454, 455, 456, 457, 458, 459, 460, 461, 462,463, 464, 465, 466, 467, 468, 469, 470, 471, 472, 473, 474,475, 476, 477, 478, 479, 480, 481, 482, 483, 484, 485, 486,487, 488, 489, 490, 491, 492, 493, 494, 495, 496, 497: n = A,T,C or G
  misc_feature 498, 499, 500, 501, 502, 503, 504, 505, 1034, 1065: n = A,T,C or G
ttttgctgaacatgaggcatagagataacagctatcaagtcatcctgatatattctagaattttctagaatattctagaggagaagcagttacatatttacctataagttttttacattgctggcaggctctttttcttgcttactgttttccaggcatatgatttccttgctgtaactcttaacatgccacatgttcctttattaggacttttgcactggtaattccccctgcctgggatgatcttcctcagatatttacttcccaattctcttacatctttcaagtatctgttcaaatgttatcccagcacactgattacactntaatacagtatcctgccctctcttcctgcccaatcaccaggtacactcaagtcctcctaacctgttctacattntctttnnnnnnnnnnnnnnnnnnnnnnnnnnnnnnnnnnnnnnnnnnnnnnnnnnnnnnnnnnnnnnnnnnnnnnnnnnnnnnnnnnnnnnnnnnnnnnnnnnnntccagttcttcataatcttgctttgctaaacaacccaaaagcctgagagtgagaggcagcacagtgatgatgaaggctcttctttggaaggctgattgcatcctcctgtgccatgaacctcttggagcaagtcgcttcaattatagaaagaagataaygatatgctctatttcacagagttgttgtgaagactaaaagagtttaataaagcacttagcacatttcctggtatatagtaagtgttgaatacatcgaatttattcagagaaaaaaatcaatatggtgatatgggaagtaggggatctattgttctggtaaattgttgataacacagtgctgaggaagaagcgaaggggattgtgaggtgagcaattaagtatgtgtcctgacttagcctcagagacccaccattaaggtcatttgaatgtgtcaggaaacagaaactgcaaacgtaagagagttcatgtctctagaaagatactaattgtgagaaagagacaaggagtatattttaggaccagatgattanaaagcacatttttaaaaaatggtgctgacancatcagatacaaaacatcacctgtacaacagtgcactcttaaactttcagtgtccattcgtgtacatcggtatcac

SEQ ID NO: 667719 - DNA, 600 bp, Homo sapiens
tcagcttcaaccaattcagatcaaaaatattcaggggaaaaaataataaaaataataatacaacaataaaaatacagatgaaaaaccaacacagcataataattacttgcatagcatttccattatattaggtattataagtgatccagagataatttaaagtatacaggagggtgtgtataggtcatatgcacgtattacaccattttatatcggggacttgcacatcctagactttggtgcctgagaggggttctggaatcaattccctgcagacacagagggatagctgtgttttctctctgtcatgtttcttgtttcattttcttaacggcgtattttaaagagcttaagatttaaagttagatttgtctacttgttgagcactatgtacaaagcaagctccacaaatctttcttgagctgggacagtgcaccaggccccatgggatagcgataagcgagactcactgccattcacrcttagtggaagacccgaggtgcatcaggaaacaacccagcactctatcatttgataacattggaatgtgctaagtgcatgaaaaggaggaatgattcactctagaaaccagtgagggct

SEQ ID NO: 667720 - DNA, 1545 bp, Homo sapiens
aaccctcatcaaaagaagtattcattatggtcagtgtactctgcttatttaccactgaagcttaacacaaaattgttgaaataaacatgcatattgaagtacttagctagctattgaggcaatacaggtttctagatttactcatttttttcactgtacacacatgtcgtgtgtgtcatgataaacccatgtgtgtgcatatattgattaaatattatatttctttttacttttattattattattgagaaaagatctcactctgtcgcccaggctggagtgcagcggcacaatctcggctgcctgcagccttgtcctcccaaagccctagaccctgtaacataatggaatatgtatgtttctaatttgtgcaatatggaagcaggaatactacatagaactgtcatcttttcctattgcatttattttggtgtggaaaaatataataattggcttcagtcagtaagtctatttcattcaagaatatttaaatataatccaaaccatcttaggtacattttgtgatacaagaggatggtatcttctatttggaaatataaaatcccagggtctcacagtttaagtatactttccaggggtatgtataaaacaagaatcccactttacaaagttaatagaaaaaatatatgctaattggaaggagaggcttctgattgaggataaagtggaaattttcacatactgctaattacactttaatggagtaagaaaaaaagaattggaaatagtaccctataaaacttctgaaatgaaattacagtttctctctctctctctctttttttttttttttcttgagacggagtttcgctcttgttgcccaggcgagagtgcaatggcgctatctcagcacactgcaaccttcacctcccgggtttaagtgattcttttgcctcagcctcccaagtagctgggattacaggcatgcaccaccatgcccagctaattttttgtatttttagtgacccaccacgcctggctgtctcctctttttagaattaggagaactgatttttttcagtgctaaactggcactgtcctatgttttcaagaaagcaatatggtgaaacgaaagagcctggatagcatgttttgttagctggcgtctagttctttaagttccatgagtctattgtgtcttctttacatctcaaaaagaagagagaagaaacctgcatctaattactgaagcagtttcattcagcaaatgtaattgcatcgcaggcacatctcaaattaaaaatcttcatcttggtctctgtcatttccattttaaactgggactgaataacctgttttgccactcaaaataatagccagtgtctctttcttattaaaatatgtgatcttttgcttgattacctaattatgtcacctgcaccttacatgaggcagatagargagtcttccagtctgccagagcagatctaccaaactagactgcacatacaaattacctggggatcctgataaattacagattctgagtctgctttcaaagagggcctcaagtcaagctgatgg

SEQ ID NO: 667721 - DNA, 658 bp, Homo sapiens
tatgtaacaaacctgcacgttgtgcacatgtaccctagaacttaaagtataataataataaaaaaaggaaaataaccctttgttagtaaatataaacaggtaaaaaagaaaaggcacagaatgataagtgaaatcctgcacaccccacccccacataatcctcaaaggtagtcactgttactcatttcttgttatcctttcctggaaataatttttctaactattaattaaaaactacatcaatggggtaatattaaaggcactgctctgagccttgcttttgcacttcataaaacatattgaggccgggcttggtggctcacacctgtaatcccagcactttgggaggctgagacgggcagatctcctgaggtcaggagttcaagaccagactggccaacatggtgaaaycccatctctactaaaaatacaaaaaaattagcggggcgtggtggtgggcacctgtaatctcagctactagggaggttgaggcaggagaatcacttgaaccagggaggaggaggttgcagtgagccgagaccgtgccattgcactctagcctgggcaacaagaacgaaactctgtctcaaaacaaaacaaaatccaccatcaacaaaaaatgtattgagaacctttccccataatcacaatctgctcc

SEQ ID NO: 667722 - DNA, 658 bp, Homo sapiens
tatgtaacaaacctgcacgttgtgcacatgtaccctagaacttaaagtataataataataaaaaaaggaaaataaccctttgttagtaaatataaacaggtaaaaaagaaaaggcacagaatgataagtgaaatcctgcacaccccacccccacataatcctcaaaggtagtcactgttactcatttcttgttatcctttcctggaaataatttttctaactattaattaaaaactacatcaatggggtaatattaaaggcactgctctgagccttgcttttgcacttcataaaacatattgaggccgggcttggtggctcacacctgtaatcccagcactttgggaggctgagacgggcagatctcctgaggtcaggagttcaagaccagactggccaacatggtgaaatcccatctctactaaaaatacaaaaaaattagcggggcgtggtggtgggcacctgtaatctcagctactagggaggktgaggcaggagaatcacttgaaccagggaggaggaggttgcagtgagccgagaccgtgccattgcactctagcctgggcaacaagaacgaaactctgtctcaaaacaaaacaaaatccaccatcaacaaaaaatgtattgagaacctttccccataatcacaatctgctcc

SEQ ID NO: 667723 - DNA, 2037 bp, Homo sapiens
tccccaccaggcccttttctccatgccatggttactggagtccatgtagacccccagctaggtcaggctctgttaagaactagtgagtagtcctgaaaatgtaaaagtctgtctgtttgtggaccagctacttgcacccatgagcctcaagccagtacatggatttcacctggctaccctgacttggcctttacttcaagcctctaaagaacctttggagtgagataaacttggctttattcctagctctgcacatccaagttctggactctgttattcacaacctctccaaacctcagcatcttcacctgtagaatgggaaaagaaggcccacgccatgttagaccaaatttcttccctctccattcctattctatccagaccccacctgcctcatgatttactatcaccttctccttttgactctctggttattgaactttcttaagtttactaactcatttcagctggcccttaatggccamtaatcctatacagctgtttgtagtaatctgtaggcctatttcaaatgcttagtatgcagacaaaatctatgattgtcctattactaaggcacactctttgtttccagagaaacggccacttggttaaaagataaatttgtgaactatatctgcaaaaggttttttgtttttttttaaaaaaaaggatgtattgttgcctaagccctctgctggtttgggaattttatctctttgcatcttacttcaccagtgaaagaaaaccagtgtggaaatgacaaagccaatcctgggcatccttgggggtctgatgtctggctattttccatctttgtcctttaccttttgatctgagcttttcagagcaactgtaacacatgcttgggccaaccaatgaataaatggctcctcatcttctcacaagctgtgaaactgtcctaaacaaaagtctactggcactcgggtcagaaaagaaagttccataggtcatttcttcatcagagcatcagagtctgaattctctttcttggcttcactttaggactgaactgtcaggccttttcaactgagcagcaacagcaggaagacagctgtacaaggcccaccgctggggccactatgagcaagaatgatgcatatggtattcctacagggtcacgcacccttctgcctaaaagtaaactttcttttgtttaagcgcagatgttgggatgcttacttttgctttgaccagtgggtcttagccttggttctcagaaaaatctggaagcttccacaatagtacccattactgggtcccattcttgactatattagactcccttgagagagcagggcactggtagtgtttaaagcttatcaggtgactccactgtgcaactgggtggagaaccactgttctctcagtaataatctattttaatatcaaataatgttacagttaggaaagtatttcttacaccaaatctaaatcttcctctgtggcctaaatatttagtccaatgatctgtaaagcattcttcaaacctgagtttaatagcttattttttgttggcattcttattaatggaagcagatggaagtgaatctctacccattagatgccagtgacactcccctagatatggtagccaaaaatgtctccagacattgcctcatgtcctttggggagacaaaatcacccttgttgaaaaccactgatgtgctcctatcatcttcaatcgtccagagagatattagcactggtgctgcaatataggaggatgttatttattttgtttgtgttgtttactcaataggccatttatagaactaagatgcttattatattccatcttgcttcagaaaagatctgaggtagatcgcctctaaacagaacttttataaattgaacttaatgaaattaaaacagggtaactaactaaaggaaatatttaattggcaattatgtaaactggtagcagttgcataatgagcaatttaggcagagattaggagagtgttggtaaataaaggaggggaaagttgtatccattcattcataaacactttttgg

SEQ ID NO: 667724 - DNA, 2037 bp, Homo sapiens
tccccaccaggcccttttctccatgccatggttactggagtccatgtagacccccagctaggtcaggctctgttaagaactagtgagtagtcctgaaaatgtaaaagtctgtctgtttgtggaccagctacttgcacccatgagcctcaagccagtacatggatttcacctggctaccctgacttggcctttacttcaagcctctaaagaacctttggagtgagataaacttggctttattcctagctctgcacatccaagttctggactctgttattcacaacctctccaaacctcagcatcttcacctgtagaatgggaaaagaaggcccacgccatgttagaccaaatttcttccctctccattcctattctatccagaccccacctgcctcatgatttactatcaccttctccttttgactctctggttattgaactttcttaagtttactaactcatttcagctggcccttaatggccactaatcctatacagctgtttgtagtaatctgtaggcctatttcaaatgcttagtatgcagacaaaatctatgattgtcctattactaaggcacactctttgtttccagagaaacggccacttggttaaaagataaatttgtgaactatatctgcaaaaggttttttgtttttttttaaaaaaaaggatgtattgttgcctaagccctctgctggtttgggaattttatctctttgcatcttacttcaccagtgaaagaaaaccagtgtggaaatgacaaagccaatcctgggcatccttgggggtctgatgtctggctattttccatctttgtcctttaccttttgatctgagcttttcagagcaactgtaacacatgcttgggccaaccaatgaataaatggctcctcatcttctcacaagctgtgaaactgtcctaaacaaaagtctactggcactcgggtcagaaaagaaagttccataggtcatttcttcatcagagcatcagagtctgaattctctttcttggcttcactttaggactgaactgtcaggccttttcaactgagcagcaacagcaggaagacagctgtacaaggcccaccgctggggccactatgagcaagaatgatgcatatggtattcctacagggtcacgcacccttctgcctaaaagtaaactttcttttgtttaagcgcagatgttgggatgcttacttttgctttgaccagtgggtcttagccttggttctcagaaaaatctggaagcttccacaatagtacccattactgggtcccattcttgactatattagactcccttgagagagcagggcactggtagtgtttaaagcttatcaggtgactccactgtgcaactgggtggagaaccactgttctctcagtaataatctattttaatatcaaataatgttacagttaggaaagtatttcttacaccaaatctaaatcttcctctgtggcctaaatatttagtccaatgatctgtaaagcattcttcaaacctgagtttaatagcttattttttgttggcattcttattaatggaagcagatggaagtgaatctcyacccattagatgccagtgacactcccctagatatggtagccaaaaatgtctccagacattgcctcatgtcctttggggagacaaaatcacccttgttgaaaaccactgatgtgctcctatcatcttcaatcgtccagagagatattagcactggtgctgcaatataggaggatgttatttattttgtttgtgttgtttactcaataggccatttatagaactaagatgcttattatattccatcttgcttcagaaaagatctgaggtagatcgcctctaaacagaacttttataaattgaacttaatgaaattaaaacagggtaactaactaaaggaaatatttaattggcaattatgtaaactggtagcagttgcataatgagcaatttaggcagagattaggagagtgttggtaaataaaggaggggaaagttgtatccattcattcataaacactttttgg

SEQ ID NO: 667725 - DNA, 637 bp, Homo sapiens
cagttctttacaaaccctattttctccacctatccgcttccccctcccattgttggttcctgtctatctttctctttcaagtgcctcagaaaacactrttccttcagcactagccctcacatctctccagtttctcctgcttcattctcactttctctccattcagcttttcagagatctaaacaaagtcctctggaaaatgcagctcctgctcagtcctcagacttcatcgtcagaatacagggagggtataaggtggagatgaagacactagcagggcaaatccaggacttgcatccatagggtgaggaagggtgggaacatttgtgtatcaatatttgtctcatcacatggtcacctgtacctaatgctgcagtatgaccttacaagatgctatgggatttcatagtaatggccaccaactccatctggagaagtcctgggaaacctcccactggaggtcttaggcttggaacttggagttgagagccagtgcattagcatgacagcatgaagcagtgcactgtgaattagggaaaagaaagacatcctgggtgactggaatgtcagagacttgggaagtaaaagataagtgaggctagacagggttttggggggctgaatatggtatgagcta

SEQ ID NO: 667726 - DNA, 640 bp, Homo sapiens
gcaagctggtgcctgaagttgcatgggacagagaggatgaaaggagtttctggaccttttaggttaacaaaaaggaaaacaatctcgtaaattatrtacctcatctactatcaggtgaccttgttctgtactctcggtaagtacaacatgcaactagtaggctaccagtcgttttaacaggcattggaaacccattgaatatggactagtagaagttacatggacaaagctttttaattgcggaatgtttttagaagagctgtgagctaaattgggtagaagattttgttatcaaaaatgtcaagttcaaaatacatttgatgtttattagttttcagtgaaaaaattaattcacaaagctattttaaaatgttaagctaatgaaaccacatttacttttttagttgttcatctctaaacttgcttactgcatttctctgtgggtcttgaaaatctattggtgtccatggttttgatctaggtagtttttgttccttggtttattttaaacactgttataattaggatcattgtgtctgtagctaaatggttgaatatctaagatgaataagttttcttaaatttcataactgtctagttttaccagatgcaagaatataatgacaagaatttaacatta

SEQ ID NO: 667727 - DNA, 643 bp, Homo sapiens
tcatcattaccctttaatattcacctccttatggaagtcttcyctcatgtagggtatctcatattttttccttaataacaccctgtgcagatctctttcataacacttattatgcagtattttatttattcactcatctgtctcttccctccccaactgcattaaatcttttacttctgtaaacatacagtgcctaacccggagaaggtcctcaaagtaaatgtttgcaaaactaacacagtgcagaggggtatatcagggtttcagaaggggctgtgtgtgtgtgtgtgtgtgtgtgtgtgtgtaataaatagaggggtctttgagttttctaattcttgagtcactttgagtaatttctaacacttaagagatttatccattttgtttaaattatcaaacatttgtaaatatgatgttcatattttcttattaccctattaatgtctacagaatctgatagtaatgtcccctgtctctatttctgatattggtaatttgtgtcttctttttcagatctatacatctagaaatttatcaattttattgttcttaaagaaccagcttttggtttcattaatttttctccattgttttcctcttttctaattcattgatttcaactcttatatttattttcttt

SEQ ID NO: 667728 - DNA, 643 bp, Homo sapiens
tcatcattaccctttaatattcacctccttatggaagtcttccctcatgtagggtatctyatattttttccttaataacaccctgtgcagatctctttcataacacttattatgcagtattttatttattcactcatctgtctcttccctccccaactgcattaaatcttttacttctgtaaacatacagtgcctaacccggagaaggtcctcaaagtaaatgtttgcaaaactaacacagtgcagaggggtatatcagggtttcagaaggggctgtgtgtgtgtgtgtgtgtgtgtgtgtgtgtaataaatagaggggtctttgagttttctaattcttgagtcactttgagtaatttctaacacttaagagatttatccattttgtttaaattatcaaacatttgtaaatatgatgttcatattttcttattaccctattaatgtctacagaatctgatagtaatgtcccctgtctctatttctgatattggtaatttgtgtcttctttttcagatctatacatctagaaatttatcaattttattgttcttaaagaaccagcttttggtttcattaatttttctccattgttttcctcttttctaattcattgatttcaactcttatatttattttcttt

SEQ ID NO: 667729 - DNA, 643 bp, Homo sapiens
tcatcattaccctttaatattcacctccttatggaagtcttccctcatgtagggtatctcatattttttccttaataacaccctgtgcagatctctttcatracacttattatgcagtattttatttattcactcatctgtctcttccctccccaactgcattaaatcttttacttctgtaaacatacagtgcctaacccggagaaggtcctcaaagtaaatgtttgcaaaactaacacagtgcagaggggtatatcagggtttcagaaggggctgtgtgtgtgtgtgtgtgtgtgtgtgtgtgtaataaatagaggggtctttgagttttctaattcttgagtcactttgagtaatttctaacacttaagagatttatccattttgtttaaattatcaaacatttgtaaatatgatgttcatattttcttattaccctattaatgtctacagaatctgatagtaatgtcccctgtctctatttctgatattggtaatttgtgtcttctttttcagatctatacatctagaaatttatcaattttattgttcttaaagaaccagcttttggtttcattaatttttctccattgttttcctcttttctaattcattgatttcaactcttatatttattttcttt

SEQ ID NO: 667730 - DNA, 640 bp, Homo sapiens
tttgatttgcacattctgtagagtatttggaggatcttagtaagggaattacataatctgattttctgattttaaaatatctctcaatgttgtgaaaaatagattatttggggaatgatatatgcagagaaccaattatgaggctattgtagtagcccagtaaggaaacatagactagaataaaaaaccagaatgatacaaagtagttgtgcttagctttactaggtaggggaaaaataaatatttggttcttgcccatggaaatggcagatgtatcatttcattaagtgagataaatttgaaggggcagtcttataaggtgagtgcaagagttgtgtttggatatatatacaatgttaattttcatgtgtcttttagaattttgaggaagttgcatgtttgtaagttcaaaagtgaagaacgaaggaaattagagagacatgtatttgagattaatcatcataaagtggaatttaaagcaccaggactatatgaaagcaagtaaaaagaaaaagaggagatagaaataatacttaagagataatcttgggaaattgggaaattccaaaatttagtgatcaggaaaaaaagtgtatatatatacgtatgtatatacacacatatatatgygtatatatat

SEQ ID NO: 667731 - DNA, 661 bp, Homo sapiens
ccacctcggcctcccaaagtactgggattacaggcaggagccactgtatctggcccaatgcttaagatcttttgagacaaaaaggaggaagtgggagatagtttcaataccacaggaagctcagaaaaaaaaaacaccccccaacccccccaaaaaacatacatgtatttatttgatatttggctgtgcaggttaaaaagttatttatttatttatttatttgcttttggaaaaactcgagtcagcttgatgaggtcactttttcctgctactccttcttatttggggagtaaagggacttccatgatctggatggatgattgtgatgaggaggttaccgggattgccctgagagaatggactgtgagctttcagggatggaagctgcatcttcatctctataatcccttgtttggcacagtgtcagcctgagaagatgcttggcggcaaatatgaattatggcacacactgttaatttcttatccatgagcagttcctttgcttgctaacagaaaatcctgattttgcttggataaacaaagtgtccagtgtcagktgatgactcaaggttggtttaagccaggctggggccttttgttcctttttgcctgatacttgaaagagtttacagtagggactgtcctgtggtccacttctgga

SEQ ID NO: 667732 - DNA, 585 bp, Homo sapiens
gtaacctctgcytcctggttcaagttattcttctccctcagcctcccgagtagctgggattacaggtgtctgccacctcacccagctaatttttgtatttttagtagagatggggttttgccatgttggtcaggctggtttgagctcctgacctcaggtgatctacccacctcagcccctaaagtgctgggattaaaggcgtgagccaccacacctggccaaaaaatgaagagaaactcagtgttttggataacagggagaatgtttagtgttctaaaaatgtatcctttcacatgtaaagcttcttgcctctgaacctttgccagtgctgttccgtctgctagggttgtacttccaccctgcatgctggtgaattccactttgccctccagcccaagcatcatattttccagacagccatttgccgtgctgcccaccaaacaggctgtcccttgttctcatgccactgctgaacattgtttattccttgtgctaggcagggctttgtcagttgtaacaactgaaactccacttagacatgtttcagctaaagggtgacttattgatttttataactgcaaagac

SEQ ID NO: 667733 - DNA, 585 bp, Homo sapiens
gtaacctctgcctcctggttcaagttattcttctccctcagcctcccgagtagctgggattacaggtgtctgccacctcacccagctaatttttgtatttttagtagagatggggttttgccatgttggtcaggctggtttgagctcctgacctcaggtgatctacccacctcagcccctaaagtgctgrgattaaaggcgtgagccaccacacctggccaaaaaatgaagagaaactcagtgttttggataacagggagaatgtttagtgttctaaaaatgtatcctttcacatgtaaagcttcttgcctctgaacctttgccagtgctgttccgtctgctagggttgtacttccaccctgcatgctggtgaattccactttgccctccagcccaagcatcatattttccagacagccatttgccgtgctgcccaccaaacaggctgtcccttgttctcatgccactgctgaacattgtttattccttgtgctaggcagggctttgtcagttgtaacaactgaaactccacttagacatgtttcagctaaagggtgacttattgatttttataactgcaaagac

SEQ ID NO: 667734 - DNA, 940 bp, Homo sapiens
taaagctagtgagagccttaagatatttcatttgagcacttggctggcaccatgtaggtagagacactttaaagtaacagtgctttgytacacctgatttgaatcatctgtggagcttcaaaaaaaatcctaattaatcctaagaccagttatgtcaggtggggtccaggcactgttatttttttaaagctccccaggtgattccagtgtatgtccaggactgagaagcagtccttgaagatgctggtgtaccctgacctgcctccagccttctttgcaggagatggatgggggttggttgtagttgctctgtcatagaacacggcaattcaaaggatacctaatgttatgaatgtaggtaaattgtttgcaaaatgttctgtgtttcaggaatactgcaatcatttgattcaaaggtcattgtgtgtgtgtatacagtcatgggtcacttaatgatggggacatgttttaagaaatgtgttgttaggcaatttcattcttgtgtgaacatcatagggtgtatttcaacaaacctagatgggatacatattttcatttatatattttattatggaaaatcaaatgtcccagcactgttactaaatatcagtcatttcccctacttgatctgccatgccaacattaagtgccatttattagatctctatatatgctccattataatcttacaggatcactgttgcacatgtgtttcctcattgactgaaatgttattcagtgcatgactatacatatagtaaaaatgttatgcaccatattttaacatactgatattactaatgagttgtcctcatggtgactttaaatatcataattaatgccatcaaccagaatatatcaaataaattcagataccacttgttctgtttatttccttcccctgccaattttttatttttcctgattctgctgaagccaa

SEQ ID NO: 667735 - DNA, 656 bp, Homo sapiens
ctcaagtgatccacctaccttgacctcccaaaatgctaggattacaggtgtgagccaccatgcctggccaaaactttttttttttttttttgtagagataggttctcactgtgctgcccaggcttgtcttgaactcctgcgctcaaacaatcctcctgcctcagcttcctaaagtgctagtattacagatgtgaaccactgtacccggccataatacattttctttatccagtccattattgatggacatctaggtttctcttgcctttttaaaataaggaatggaggcagcttgtaataaaaatactgtaagtataaaattacaatataaggctggaaaatagacctatattctacaaatctacctactgaaracttgctgtgtgctaggggctgggctaggtactaaagattaaagtggaaagactcagtctctttcctctaaaaggtctcagtataatgggggagggagacaatgagcaaatctaatatagtgaacaggacaagtgctgagatgggcttgtgcaaggtgtactaggagcagggatccagaaggacttcagtgagtagtgagtgcttgaggtgaggcccagtgtcaatcaggagtgcttttagttgcaagtgacaggcaatttgattcacagtgtcttcagtct

SEQ ID NO: 667736 - DNA, 393 bp, Homo sapiens
atagcatgaacccaggaggcagagcttgcagtgagccaagatcgcgccattgcactccagcctgggtgacagtgacactctgtctcaaaaaaaaaaaagaaagaaagaaagtgtgtgtaggtgacagagatgtgtgattttgctgagttaagtctacagttcataaaatcactattcttaacactgaaagtgattaaaattttgtcccatctttctgctattataaatccatattgcaagtaatttgaactataaagaatgtctattcttagaggaaastatcatgttctagctcttcatttactttgagtttaactgtggtggaaaaattattctgtctttgaaaataatttaatttttgtaagcatgcatgcatggataactccaaaaaga

SEQ ID NO: 667737 - DNA, 1015 bp, Homo sapiens
tcgtccagtcataaaggaagggtgttgttttcagctctcaccacaaatggccacttccagcccaaatgaagctgaaggttagaggctggggttaggtacaggcctcacagcaccggcagcttgcagtgagttatccttacagtggactcagtctctggatcggtgctagattcctggccccacgctgtggaattatcctgcatagatgaagcagcctggaagaatgagaacattcaggatgaaacctcagaagcacctgccagtgtagagctgctcactggatgctgggcaacactcagcaggaccctgaggaggtgccatcaggctggctcttagccccaagcctcacctggccctaataagatcccaacgtgggttaccactcgttattgaagcaggatagtttagttgccaaaatatatatcatgcttcaggtagaactgctgagtctatcaaaattctcactgtactggctctctaaaatcacccaaggcacatcagcctcaagcaccaaggtacacgtctgcagtacaaaaagaatactacccttaaagatgtaggttggatgtggtaggcaatcctaggaatgagattctgggacatcattttccatgtgggtttttagaggattcccagggagactgagttgcacacagcatagaggtgacctcttcaatgctctcccagktctggctgctcttcctaccctgtcttcattactcctccatgtttcctggagtcactttcacaagcctttctacctcaaacataggtctcagtatctgaatttaggatatccatatgcagatacttgggtctcacttcagataagaatcttaactattcttctactggcatgattcatccatttgaaaatgcccaattatttctatcaagaataaaggtgggacttgttttacagtctctaggggaagtgcatattatgaactccattcaattaatccattttttcaatgttcttatcaagattgtctgaaatcgcaggaagtaggtg

SEQ ID NO: 667738 - DNA, 1015 bp, Homo sapiens
tcgtccagtcataaaggaagggtgttgttttcagctctcaccacaaatggccacttccagcccaaatgaagctgaaggttagaggctggggttaggtacaggcctcacagcaccggcagcttgcagtgagttatccttacagtggactcagtctctggatcggtgctagattcctggccccacgctgtggaattatcctgcatagatgaagcagcctggaagaatgagaacattcaggatgaaacctcagaagcacctgccagtgtagagctgctcactggatgctgggcaacactcagcaggaccctgaggaggtgccatcaggctggctcttagccccaagcctcacctggccctaataagatcccaacgtgggttaccactcgttattgaagcaggatagtttagttgccaaaatatatatcatgcttcaggtagaactgctgagtctatcaaaattctcactgtactggctctctaaaatcacccaaggcacatcagcctcaagcaccaaggtacacgtctgcagtacaaaaagaatactacccttaaagatgtaggttggatgtggtaggcaatcctaggaatgagattctgggacatcattttccatgtgggtttttagaggattcccagggagactgagttgcacacagcatagaggtgacctcttcaatgctctcccagttctggctgctcttcctaccctgtcttcattactcctccatgtttcctggagtcactttcacaagcctttctacctcaaacrtaggtctcagtatctgaatttaggatatccatatgcagatacttgggtctcacttcagataagaatcttaactattcttctactggcatgattcatccatttgaaaatgcccaattatttctatcaagaataaaggtgggacttgttttacagtctctaggggaagtgcatattatgaactccattcaattaatccattttttcaatgttcttatcaagattgtctgaaatcgcaggaagtaggtg

SEQ ID NO: 667739 - DNA, 1015 bp, Homo sapiens
tcgtccagtcataaaggaagggtgttgttttcagctctcaccacaaatggccacttccagcccaaatgaagctgaaggttagaggctggggttaggtacaggcctcacagcaccggcagcttgcagtgagttatccttacagtggactcagtctctggatcggtgctagattcctggccccacgctgtggaattatcctgcatagatgaagcagcctggaagaatgagaacattcaggatgaaacctcagaagcacctgccagtgtagagctgctcactggatgctgggcaacactcagcaggaccctgaggaggtgccatcaggctggctcttagccccaagcctcacctggccctaataagatcccaacgtgggttaccactcgttattgaagcaggatagtttagttgccaaaatatatatcatgcttcaggtagaactgctgagtctatcaaaattctcactgtactggctctctaaaatcacccaaggcacatcagcctcaagcaccaaggtacacgtctgcagtacaaaaagaatactacccttaaagatgtaggttggatgtggtaggcaatcctaggaatgagattctgggacatcattttccatgtgggtttttagaggattcccagggagactgagttgcacacagcatagaggtgacctcttcaatgctctcccagttctggctgctcttcctaccctgtcttcattactcctccatgtttcctggagtcactttcacaagcctttctacctcaaacataggtctcagkatctgaatttaggatatccatatgcagatacttgggtctcacttcagataagaatcttaactattcttctactggcatgattcatccatttgaaaatgcccaattatttctatcaagaataaaggtgggacttgttttacagtctctaggggaagtgcatattatgaactccattcaattaatccattttttcaatgttcttatcaagattgtctgaaatcgcaggaagtaggtg

SEQ ID NO: 667740 - DNA, 722 bp, Homo sapiens
ctggttcaccaccttcctctgaaattcctgggatctctttaactaagtgtcaggtagtggcaaataagtgacccctagagatatccttctcctaatgctaatgcttagaacctattaacatgttattcaacatggcaagagggaatgaagggaacacatggaaataatatgctcccctggatgatttctgtatcttcaagtcagctaattggccaccatgttatcagaaagtcaaagactaagaagagggaagcaaaagtgcaggtgrgtgaaataattgaagatatacattcatctttgagatgaatgacgattctaactttgaacaataaaggggccacaagacaaacagtgtaagaaaccactggacaagtcagtcaaggaaacagtgtcctttagagaaataataagagcccaaccccaccatcttgattttatcaaagtgagaaccattttgagtttctggccaaacatgaaaacaggcagtagtatcatgacagagctgccaggatttgtgaattacagttgagttcctactttatgatgttcaaggcagcagaagagccaagtgttgataggctgcacagtgactagaaaggtctggattgccattatagatacttcacaaaaaaattgattttaactgttgtatggcagccaagtccaaaattgaagactcaagttaattttgaagacattgattcaaaaaggaaagttatcaa

SEQ ID NO: 667741 - DNA, 722 bp, Homo sapiens
ctggttcaccaccttcctctgaaattcctgggatctctttaactaagtgtcaggtagtggcaaataagtgacccctagagatatccttctcctaatgctaatgcttagaacctattaacatgttattcaacatggcaagagggaatgaagggaacacatggaaataatatgctcccctggatgatttctgtatcttcaagtcagctaattggccaccatgttatcagaaagtcaaagactaagaagagggaagcaaaagtgcaggtgagtgaaataattgaagatatacattcatctttgagatgaatgacgattctaactttgaacaataaaggggccacaagacaaacagtgtaagaaaccactggacaagtcagtcaaggaaacagtgtcctttagagaaataataagagcccaaccccaccatcttgattttatcaaagtgagaaccattttgagtttctggccaaacatgaaaacaggcagtagtatcatgacagagctgccaggatttgtgaattacagttgagttcctactttatgatgttcaaggcagcagaagagccaagtgttgataggctgcacagtgactagaaaggtctggattgccattatagatacttcacaaaaraattgattttaactgttgtatggcagccaagtccaaaattgaagactcaagttaattttgaagacattgattcaaaaaggaaagttatcaa

SEQ ID NO: 667742 - DNA, 1659 bp, Homo sapiens
ccctaccaccaggggggcaggaaccagattctccagccacatccctttgatcatccagttcttcatccttatagctaggagctgcaaaagggcaggctgtagctcctgccaatgcaataccgcatgtacgcacataacccctccaggacacctctggctcatggagggccagagacaacttacaggttgaagttcctggaggagctgcttgcatggctggtccaggcttggcaccagttgacccatgtttaacaccagtttaacaatttggcaacaaatgcccaaattgacaaatgggatctaaactaaagggcttccacacagcaaaagaaactcagagtgaacagctgaaatcccctccataaattgggctctttgtcaagcacctacatcttcatagcatgtcccagggagaagaggctccagtatttcgtggattaaaggatcactagtgcagcagacacctcattgcttagtattgagactttctagtcagtctgtgcttatccattagtccatgagtacttagtgatatcaaactgctaccacaggttgttactaagactaaggcccaccctcagaaacacatgatatatggagtgatgccattttctatcatcagagtggttctctgaactcctccattgtctatcagaaaccaattcacttctaagcatcacaggagcatcactttatggtttttgtaacatcttttcacaaacccaaagtttaacacaagtatcatatgtaataacgtggaaatcatatttcatctgtatgaaataaacatctttctacccaaaaatgcagaaattgagatattcatgcacaaggggaacattaaaacctctgcgtatattccactcaatgtagcaaagggacatcatcttgtcccaccacactttgccttgacacttcctatcatttatggtaagaaaaagatatgccttctaagaaacttggctcagtggctagatcttagttaaaagatatgagaacttcagcatcacaggaaagatcagatgccccctcatgtctcatctatggaagtctagaaacctcccttgcaggtaaggctgagtcaccttcctttccttctgggtggtagatgtctaagaactccaactgagcacatgtggattgtactctaggtggacyatcatgcatacccactgagatggcttccatctagggagttacagacccaagttacctacccctttttcaattccaggaccattttcttccttcattggtagatcagggcaatgaacggagaagtatccctttgctggatgtgtcatgccactggatgcttatagaacgagccatcaagaatcaaagtctttcatccatcttgagttaatttttgtgtaaggaatcctaggcaataccattaaggacataggcatgggcaaagactgcatgactaaaacaccaaaagcaatggcaacaaatgcccaaattgacaagtgggatctaattaaactaaagagcttctgcacagcaaaagaaactaccatcagagtgaacaggaaacatacagaatgggggaaaatttttgcaatctattcatctgacaaagagataatatccagaatccacaaagaacttaagtttacaagaaaaacaaccccatcaaaaagtgggcaaaggatg

SEQ ID NO: 667743 - DNA, 1659 bp, Homo sapiens
ccctaccaccaggggggcaggaaccagattctccagccacatccctttgatcatccagttcttcatccttatagctaggagctgcaaaagggcaggctgtagctcctgccaatgcaataccgcatgtacgcacataacccctccaggacacctctggctcatggagggccagagacaacttacaggttgaagttcctggaggagctgcttgcatggctggtccaggcttggcaccagttgacccatgtttaacaccagtttaacaatttggcaacaaatgcccaaattgacaaatgggatctaaactaaagggcttccacacagcaaaagaaactcagagtgaacagctgaaatcccctccataaattgggctctttgtcaagcacctacatcttcatagcatgtcccagggagaagaggctccagtatttcgtggattaaaggatcactagtgcagcagacacctcattgcttagtattgagactttctagtcagtctgtgcttatccattagtccatgagtacttagtgatatcaaactgctaccacaggttgttactaagactaaggcccaccctcagaaacacatgatatatggagtgatgccattttctatcatcagagtggttctctgaactcctccattgtctatcagaaaccaattcacttctaagcatcacaggagcatcactttatggtttttgtaacatcttttcacaaacccaaagtttaacacaagtatcatatgtaataacgtggaaatcatatttcatctgtatgaaataaacatctttctacccaaaaatgcagaaattgagatattcatgcacaaggggaacattaaaacctctgcgtatattccactcaatgtagcaaagggacatcatcttgtcccaccacactttgccttgacacttcctatcatttatggtaagaaaaagatatgccttctaagaaacttggctcagtggctagatcttagttaaaagatatgagaacttcagcatcacaggaaagatcagatgccccctcatgtctcatctatggaagtctagaaacctcccttgcaggtaaggctgagtcaccttcctttccttctgggtggtagatgtctaagaactccaactgagcacatgtggattgtactctaggtggaccatcatgcatacccactgagatggcttccatctagggagttacagacccaagttacctaccccyttttcaattccaggaccattttcttccttcattggtagatcagggcaatgaacggagaagtatccctttgctggatgtgtcatgccactggatgcttatagaacgagccatcaagaatcaaagtctttcatccatcttgagttaatttttgtgtaaggaatcctaggcaataccattaaggacataggcatgggcaaagactgcatgactaaaacaccaaaagcaatggcaacaaatgcccaaattgacaagtgggatctaattaaactaaagagcttctgcacagcaaaagaaactaccatcagagtgaacaggaaacatacagaatgggggaaaatttttgcaatctattcatctgacaaagagataatatccagaatccacaaagaacttaagtttacaagaaaaacaaccccatcaaaaagtgggcaaaggatg

SEQ ID NO: 667744 - DNA, 672 bp, Homo sapiens
tgttttacccagttacatttcctcattgctatataaacctagttttagtcagggagatgaatttgagatttatctcctatctcctcagctgtagcatctgaataaatctgccttccttggcaatactgtcttaatgattcgatttctgtgctgcaagcagcaggacctagaccaaacccctggtgttttggtagcagttatgtatgagaakggggtaatgctgccaatatcccttcaaaaaaacctaacagtgaagttatgggtagtgatcaagatccttgggattgaccaaactggagtcaagcttctgaaccttctgtgtagtttattatattgttttagcaaagaactaagttccttcagcaggaagtccccagagttggtatctgttcatgttcctcatcttctcccatccccctcaaatgatgtctcatttttctggctggtctttagcaatgcttttggatctgtgaagcctgaataccttttacctccgaggattcctattggtaatttttcatccattgaccccacattgcttctcagctgtaagttcccactggcacgtgctgcgttcaaagttgaacctgatctctccccatgagacaccctgcactagtcccagcatccatcatggtggtcctactaacgtcctccttgtgcacactaatg

SEQ ID NO: 667745 - DNA, 600 bp, Homo sapiens
aacttaaccccaaatgggatattaagggatcctttaggaggtgattaggctctgccctcatgatgggattagcgcccataaaaaagaggtttgagagaggcggtttcttctaccaggtaagatacatatgtatatgaagaccaacacatgaggaccgaacaacaaggcaccatctttgaagagagcaagccctcagacaccaagtctgctggcaccttcatcttggacttcctgatctctaaaactgaaaaattgatcttgcacgttacccagtctaaggtacttttgtagtagcagcataaatgaagtacaagaaagtaaatgaaccrtaagatgggcagagaaataagagttagtggacaagaggctatccatttctcttgcatctcagaagagaggttttgaaacagaggagttttttttttttttttttacatagaacataaagttggtttcaaaagaaaaaattgatgacatactctccatagagctgcatttttccattgcttccttgaaatctgtgctcctacatggctacaaagctgctcaatattctccttcaccaacagcgtcatcatcagcacattaaggatggaaggt

SEQ ID NO: 667746 - DNA, 1771 bp, Homo sapiens
ataactacccttcaaaatgttaggcctgcctcagtggcctgggtacatcagaacatctcttctacattgtattttgtacctactcaccaggaagtaggtggcccaatacttagtgcatattttcgactttggaggcaacagagaccctatttgtgtactgaacagacccacttgccaggttacatataagttgccaagatgaagtggagcccagaataagagtgggattgaccacagatgcagcctgccctactactagggccttatggtgtcgcatgttcagagacactgctgttgtctacgctatctgcagccttacagtcgtgaaaatcctagctgtctagattgtggttaagtccatgtcctattctcctgaaaaagtctctggcttgctgctgggctctgctagagactgaagctgactgtaggaaaccacatgactgagagacttggtggctcaagtaaaatccagtttatgacagccagctcaggtcacagtattaggcatcatgatagtgcatcatgaaataacaaagaccaattctgaactccgggaggcacagtgtatctcatgagcaagcagctcagaatcccatggtaaattttgttgctttgccaactctcaacccacctgctgcctttagggatgtttctgattaactcaagaagtgtgcaaacctgggtacagatggatcctgcagagtatgcttgtaatactaagaaattgagagttacagtcacggccccatacaacagtgagcctgaaagggaatgggaagccctcccaatgggcaagcgttcagacaggacatttgtctactttgcattaaaaaatatgtgaattatcacatcaatgtatgcattttcatgagtggtcaccaagtatgctgttagagacataagccaagattgatgacatcagagactgactctcacaagccaccccatgcttgctcactggcaggaccaaggtggcaggaatgcaggctgccacagggtaggttccctaggaatcagaccgagatggatattctcatgcagcatgtttattaggccatgctttctggatgatcacctgtggaggaagggaagcaagcaagattgggcagaggtaatagttgagctaagatgcagtgtgagggcctcagccaaccctggagggcactgtcaagtagtgtgacctttaaggttcttccaaaagttagggtggaaggaccaggctgtcttatttccacactgagtaggtgctggctaatgggtcattgcccgttttgaacagaggcaagcacaaatagagggttatcatctgaggctgtctgctaaaagcatttccagaggtggaggcaacaagccttccactgttgacatgggatctaggcagcacatcactgtgcccaccacaaaacttattatgtgggcctcaacacagcacatactttccacctccatgctaagccctgttgggattcatggtctcatgatgttgcatgagattcagagtagtcccagcgagaagataaagacccagtcttgctgtttgcaagactagcctactatcatctggagtatgacaaatattgtgggagaattccagggacacttatgtcagattttatgttatttatgaatttawaacagcagcattatgttctactcgggtctacactgcaggtctcagaaatatcctgagactgcaccctgtggcactactcaatgacgttgttaaagattatttcaatcctaactttgaaatttattacaccgtctcttc

SEQ ID NO: 667747 - DNA, 637 bp, Homo sapiens
tgctttctgcaraaactgttacctgtgactgccttttgctctttttgagatatatttcacaccataaaatgcacccatttgtggttcttggtatatttcagagttgtgtatcactccatcaatcccatacccattagcagtcactgcccccgcagcgtgtggccacctctaactgactttgtctctatggatttgcctgttttgggcatttcatataatgggaatcatacactatgcagcctttggtatagggcttcttgcacttaccataatttttccaaggtccatcctctacatatttgtgcatttttatggctcgatattctcttgtatggctatacgacatttcatgcattcacttgttgatggacatctgggttgtttccacctttgggctactaataatgctgctatgcctgtacaactttttgtatgattatgtgttttcaattctcctgcctatagacttaggagtggaattgtaataactttctgaagagcttccagactgttttcaacagcaaccacacatgaaggttccattttctgcacatccttgccaacacgtattttcctactttttgattctagccatcttaacaggtatgacatggttttgattggcattaatgacact

SEQ ID NO: 667748 - DNA, 604 bp, Homo sapiens
atawatatatataaatatatatatatatataaatatatatatatataaaatttggattcactgattacaactatgtataataaagtatgtaggtctgttaacacttagaaatatggaatgatacaactttataattaaattctttgtagaagattgtttaaattcatgatagacaaacacaagagatctcaacaatctgtctttaaaaaatagtattttatctttacatcctagcaactaaatacacatttcacaagtttaagtaaaacttaatccttttgtgtcaactccacaactactctgttcaatttcattatgaaatatacaatattcatttgttcacccaaggtttaattagtttaagaaaaaactacttaaaattcttcacatttaagcaaacttctgagaactgtctaaactttttattcatttagcacaaaacatcccctgcaacttagtatagcatcacacatacctgatgcgatgaccggatctttcataagttctctagttattggacatataaattcatcaggaattcctgaagaaagggatttaaccttggtcctgagctcttcaattttcctcagcactttactacgca

SEQ ID NO: 667749 - DNA, 604 bp, Homo sapiens
atatatatatatawatatatatatatatataaatatatatatatataaaatttggattcactgattacaactatgtataataaagtatgtaggtctgttaacacttagaaatatggaatgatacaactttataattaaattctttgtagaagattgtttaaattcatgatagacaaacacaagagatctcaacaatctgtctttaaaaaatagtattttatctttacatcctagcaactaaatacacatttcacaagtttaagtaaaacttaatccttttgtgtcaactccacaactactctgttcaatttcattatgaaatatacaatattcatttgttcacccaaggtttaattagtttaagaaaaaactacttaaaattcttcacatttaagcaaacttctgagaactgtctaaactttttattcatttagcacaaaacatcccctgcaacttagtatagcatcacacatacctgatgcgatgaccggatctttcataagttctctagttattggacatataaattcatcaggaattcctgaagaaagggatttaaccttggtcctgagctcttcaattttcctcagcactttactacgca

SEQ ID NO: 667750 - DNA, 604 bp, Homo sapiens
atatatatatataaatatatatatatatataaatatatatatatatawaatttggattcactgattacaactatgtataataaagtatgtaggtctgttaacacttagaaatatggaatgatacaactttataattaaattctttgtagaagattgtttaaattcatgatagacaaacacaagagatctcaacaatctgtctttaaaaaatagtattttatctttacatcctagcaactaaatacacatttcacaagtttaagtaaaacttaatccttttgtgtcaactccacaactactctgttcaatttcattatgaaatatacaatattcatttgttcacccaaggtttaattagtttaagaaaaaactacttaaaattcttcacatttaagcaaacttctgagaactgtctaaactttttattcatttagcacaaaacatcccctgcaacttagtatagcatcacacatacctgatgcgatgaccggatctttcataagttctctagttattggacatataaattcatcaggaattcctgaagaaagggatttaaccttggtcctgagctcttcaattttcctcagcactttactacgca

SEQ ID NO: 667751 - DNA, 604 bp, Homo sapiens
atatatatatataaatatatatatatatataaatatatatatatataaaatttggattcactgattacaactatgtataataargtatgtaggtctgttaacacttagaaatatggaatgatacaactttataattaaattctttgtagaagattgtttaaattcatgatagacaaacacaagagatctcaacaatctgtctttaaaaaatagtattttatctttacatcctagcaactaaatacacatttcacaagtttaagtaaaacttaatccttttgtgtcaactccacaactactctgttcaatttcattatgaaatatacaatattcatttgttcacccaaggtttaattagtttaagaaaaaactacttaaaattcttcacatttaagcaaacttctgagaactgtctaaactttttattcatttagcacaaaacatcccctgcaacttagtatagcatcacacatacctgatgcgatgaccggatctttcataagttctctagttattggacatataaattcatcaggaattcctgaagaaagggatttaaccttggtcctgagctcttcaattttcctcagcactttactacgca

SEQ ID NO: 667752 - DNA, 604 bp, Homo sapiens
atatatatatataaatatatatatatatataaatatatatatatataaaatttggattcactgattacaactatgtataataaagtatgtaggtctgttaacacttagaaatatggaatgatacaactttataattaaattctttgtagaagattgtttaaattcatgatagacaaacacaagagatctcaacaatctgtctttaaaaaatagtattttatctttacatcctagcaastaaatacacatttcacaagtttaagtaaaacttaatccttttgtgtcaactccacaactactctgttcaatttcattatgaaatatacaatattcatttgttcacccaaggtttaattagtttaagaaaaaactacttaaaattcttcacatttaagcaaacttctgagaactgtctaaactttttattcatttagcacaaaacatcccctgcaacttagtatagcatcacacatacctgatgcgatgaccggatctttcataagttctctagttattggacatataaattcatcaggaattcctgaagaaagggatttaaccttggtcctgagctcttcaattttcctcagcactttactacgca

SEQ ID NO: 667753 - DNA, 654 bp, Homo sapiens
gggaaaggggaggctgggtacagtggctcatgcctgtaaccccagcactttgggaggattaggcaggtggatcacttgaggtcagaatttcaagaccagcctggccaacatggcaaaaccccatctctattaaaaatacaaaaaaaaaaaagaaagaaagaaaaaaaatagctggatgtgttggcacatgcctgtaatcccagctactcgggaggctaaggcaggaacttcacttgaacccaggaggcggaggttgcagtgagctgagatggcgccactgcattccagcctgggcgacacagtgagactctgcctcaaaaaaaaaaaaaaaaaaagaagggaagggaaaacaatcagaacctgaagtgcaagtgtctgctgtgtcacgagtaataaaccgtttgagtcagtcagggctcattgcccacattcatgtgaatgtggcaagttaccctagcagcttcctgccaccaaagggctgctttcctctgacttccttccaatgggatatgctgaaaygaaactgaggatttttaaaacaattttttttaaagtgtcacaaacaaatcaatgatttctttacatgttgaatatgattttgcaaaaatatttataacttaaaaagattccctcaaattctttatgaaatcacca

SEQ ID NO: 667754 - DNA, 650 bp, Homo sapiens
atcttagttaaaataaatctggagttattaaagaatttaaaagagaggtacgatttggtctgcattgtgattagcagtaacatagtgacacatgttcaaagtgattccgagatagacagaagacctggaccagagaggagactgtggcaactaccaaggtgagacaragagggtctggactatgcaggacagggtcatgaggactgataaaagtgactggattggacattaactaaaagtggtgggtgggtgagaagtagttaagataccatgataactggtatggtttggtgaatgattagatgatgatactatcatttaaggcagagaaataagatgaaaatcaaacatgaaagagaaaatgataagtttacatttgaacctgttaaatgtgaagtgattttgagataatctattagaagtactaagcagacaatttactatgacccttggatatagcgagagctttgagattcatgagtgttctcgcggcgggttaaactatgattacagatgaatctaccaaagtggcacataaagcaagagaaaatgatctctgataataaagaccagtcatggaatcaaatataaagggacatcatggatgaaaatccagtgacattgtgtctggaattggtgggttcttggtc

SEQ ID NO: 667755 - DNA, 653 bp, Homo sapiens
atggatacaatgttatagttaggaaaaataagttctggtattttaacacagagtaggctgactatagttaacaataatrtatgatatatttctaagaattagaagagagaaatttgaatgttctcaccacaaagaactggcaaagctttgaggtgacaaaaatactaattacttaatttgatcattatacggtgtattcatttaacaaaacatcacactgcacatttaattattacatgtcaatgaaaaataaaatgcttatctttctaaagcatatgaaggtacctcttcctttgcttaaatataaatctcattattaatcctgtaaacaatttgaactaaaattcatatattaatgtgtccatttttaggaatttagtacatatctttatttcttcttctttattgtcactgacaaaagaaaattctaaaaagaatagggacaagaacatgaaaatgaagatttactgaatttaagatgattaaccacagagggacaaagattataatctcaagtaatatggcatgataatttaaattcaggcattatattggagatatttttcattcactttacatactcttagctgtacaccaaaatactgtacctagttcatgaggacaagactgtgggaaataattgaagtaatcaa

SEQ ID NO: 667756 - DNA, 662 bp, Homo sapiens
catgttcatctggtgatgtcaaatattgaaattccaggattcacataacaagattcctaactcattcacaacacggtgaacactgtgaaacacaattgagaaatgggyactttggaagaaacaactggcctagggacaagagacagtgtgcaagccatctgctccatgaaatgctttgttcagagcatgcatttcatgcacttcattccatggtgacagatattgctactctgaggtcgtgagacattgaacctaggatttgctgtgaaactctatagactgaacatctgtctgcagtatctcctgcctctacccataacctgtgccacacaccagtggcgcactcttctctctggataaatgaaagttctggatgatccgatgtgcagagaattaggctgtttttcccaggggctctagttgaatttttttgggactgtctgggaggatgccctccacgttgtccaaggggaatcacgagaaaaccggtgaccccatgtgcctccattccctcccccttcctcccctacccctccatcagggatcgcatttattccagaatgatacttgctttcattgtcattgggagtcacctagcagcgaccgttattgaaaatttaagcagcatagaacagaaaaagctctagtcacctgtgcacagc

SEQ ID NO: 667757 - DNA, 662 bp, Homo sapiens
catgttcatctggtgatgtcaaatattgaaattccaggattcacataacaagattcctaactcattcacaacacggtgaacactgtgaaacacaattgagaaatgggcactttggaagaaacaactggcctagggacaagagacagtgtgcaagccatctgctccatgaaatgctttgttcagagcatgcatttcatgcacttcattccayggtgacagatattgctactctgaggtcgtgagacattgaacctaggatttgctgtgaaactctatagactgaacatctgtctgcagtatctcctgcctctacccataacctgtgccacacaccagtggcgcactcttctctctggataaatgaaagttctggatgatccgatgtgcagagaattaggctgtttttcccaggggctctagttgaatttttttgggactgtctgggaggatgccctccacgttgtccaaggggaatcacgagaaaaccggtgaccccatgtgcctccattccctcccccttcctcccctacccctccatcagggatcgcatttattccagaatgatacttgctttcattgtcattgggagtcacctagcagcgaccgttattgaaaatttaagcagcatagaacagaaaaagctctagtcacctgtgcacagc

SEQ ID NO: 667758 - DNA, 662 bp, Homo sapiens
catgttcatctggtgatgtcaaatattgaaattccaggattcacataacaagattcctaactcattcacaacacggtgaacactgtgaaacacaattgagaaatgggcactttggaagaaacaactggcctagggacaagagacagtgtgcaagccatctgctccatgaaatgctttgttcagagcatgcatttcatgcacttcattccatggtgacagatattgctactctgaggtcgtgagacattgaacctaggrtttgctgtgaaactctatagactgaacatctgtctgcagtatctcctgcctctacccataacctgtgccacacaccagtggcgcactcttctctctggataaatgaaagttctggatgatccgatgtgcagagaattaggctgtttttcccaggggctctagttgaatttttttgggactgtctgggaggatgccctccacgttgtccaaggggaatcacgagaaaaccggtgaccccatgtgcctccattccctcccccttcctcccctacccctccatcagggatcgcatttattccagaatgatacttgctttcattgtcattgggagtcacctagcagcgaccgttattgaaaatttaagcagcatagaacagaaaaagctctagtcacctgtgcacagc

SEQ ID NO: 667759 - DNA, 662 bp, Homo sapiens
catgttcatctggtgatgtcaaatattgaaattccaggattcacataacaagattcctaactcattcacaacacggtgaacactgtgaaacacaattgagaaatgggcactttggaagaaacaactggcctagggacaagagacagtgtgcaagccatctgctccatgaaatgctttgttcagagcatgcatttcatgcacttcattccatggtgacagatattgctactctgaggtcgtgagacattgaacctaggatttgctgtgaaactctatagactgaacatctgtctgcagtatctcctgcctctacccataacctgtgccacacaccagtggcgcactcttctctctggataaatgaaagttctggatgatccgatgtgcagagaattaggctgtttttcccaggggctctagttgaatttttttgggactgtctgggaggatgccctccacgttgtccaaggggaatcacgagaaaaccggtgaccccatgtgcctccattccctcccccttcctcccctaccsctccatcagggatcgcatttattccagaatgatacttgctttcattgtcattgggagtcacctagcagcgaccgttattgaaaatttaagcagcatagaacagaaaaagctctagtcacctgtgcacagc

SEQ ID NO: 667760 - DNA, 662 bp, Homo sapiens
catgttcatctggtgatgtcaaatattgaaattccaggattcacataacaagattcctaactcattcacaacacggtgaacactgtgaaacacaattgagaaatgggcactttggaagaaacaactggcctagggacaagagacagtgtgcaagccatctgctccatgaaatgctttgttcagagcatgcatttcatgcacttcattccatggtgacagatattgctactctgaggtcgtgagacattgaacctaggatttgctgtgaaactctatagactgaacatctgtctgcagtatctcctgcctctacccataacctgtgccacacaccagtggcgcactcttctctctggataaatgaaagttctggatgatccgatgtgcagagaattaggctgtttttcccaggggctctagttgaatttttttgggactgtctgggaggatgccctccacgttgtccaaggggaatcacgagaaaaccggtgaccccatgtgcctccattccctcccccttcctcccctacccctccatcagggatcgcatttattccagaatgatacttgctttcattgtcattgggmgtcacctagcagcgaccgttattgaaaatttaagcagcatagaacagaaaaagctctagtcacctgtgcacagc

SEQ ID NO: 667761 - DNA, 646 bp, Homo sapiens
tggctgctgctttcctggtctgggttcgggagagaggacgttgatgccaaacacaacatctctaagcctcagtcagttgcagattcccattctgtatccactggctaccaaacaggtttggccagttgaaatttgggtggaattttggtctactgtagagggctccataaatcaatcagggaaaaagcaaggacccttgggtacttcttcactttgagaattctaaagaagagagacagcgagagagaaagagagagagagggagagagagagagagagagagcccttataatattagctcytatttcttctgtcccatatagagaagataagagatggttagaagttctttttgtgcaggtggcgatttcccactgaaaacaagctgaggaaatttggttcattgcagcaaaggtcacatagttcccattttttaaattgctcaaagaattgggggcagtggggctattcaagttttttaggctctcaactaacccagcaaattgttactttggatgaatgctgtttatgtgacttactgaagtcgacttatgtgacatttacagtttctaacaggtcttatttttgcagttcctgaccaccacggctttaagaatatccttcaaccgggagggagatccattgc

SEQ ID NO: 667762 - DNA, 2045 bp, Homo sapiens
actcaccaggtgactcagtggcttggcccagtcttggacaaatcctgtcccaaagctgctccgtgtttgtcacctcaatcagactccagatygcaaactcctgacggggtgtatttccggcatgggagctgatacaaacttaaaatacaaaacaaagggtgacatatgtatttgatatctttggtggcctcatctgaggctgcccctgatatctctgttaactcaccctcggttgtaattagcccagcccaccttctcctgaccacacgtctcagaggtcactacataaaccagggaaattgatagcagaattatgcactcagaaattaattttatgttgtactgaatatatatttttttttattgtgactttatcttgctggaaaagtgcttacttctgattttgtggatattcctgaccgtggattacttttattttgatttttacacaacagttatattagaaatttgctgttttattcttaccttcttagtaaaaatccttttatcacacaatgggtaatttatatccattaccaagcctttcaatccttttcagtggggctgtcagtgccgttggcacagtaatgattaatgtgatctaataatagtgtaccattatattaccttagtaaaacatgtaccaacaccctattccgatctaccaaattcatagcttcctataatatttttgttgaaagacaggattactatttttcaaagctgattttttcccctttaacatatttaatgaaattcacaattctttgccttagtaatcctgggcatgtgactgggcttgatgggtgaactccacatctgtaggccctgttgtgatttgtcaggagaaaggtccaaccatcccagtgatctgtcagagagattattttgtttttgttgggcctggattgttttgccttaaaaaagaagaaaaaaaattgttgggtttccagtcctttctgatgcataataaggaaggtgtgttttagattgaaaggcaaagtaggaagcaatttggttttttcctcccctctgtcacctgcttctgtctgccagtgaatcggaggtatagccgagccagtggaagtggctttaaaccgcttccccagaaatgcccctctctgacccatccactcctctagctgtggccaagcctctctgggtctgacatagggtctttcacatttggcattattgaaattttggactggatagcgattggttgcggggccctcccgtgcactgcagaatgtttgcaacatccctggtctctgcccactagatgctgatagcatgcctccaccaacacttcctccattgtgacaatcaaaataactccagaaatcaccatatgtcccctggggggcccaatcatctcttgttggtctaacctataggaaaacgagcagatatttttggcatgtcggggaattcctgtcagagttccagagttccatggtgctttttcggaagtctttggctttgggagagaagatgtgtgggtgaagacgacgcagggcatcctttccttggctgaaatacagccctcttcctcctctctccctcctcctctgccatgagcctggcccgagcgagggcctgaatcttagcgtcttccacttaaatcccattataatcacgctcatgattgataacattccaccttttcaaagggctttaaaatctgtgtcaaccaaggatgacattattgtagtgcgggcgagatgtattcaaacaattacacgctcaaatcaaagtgggaagttttgtccttctatctcggcgcctttgtgtgatgtggcttcagccagcaccacagtcctcacagccccagagaccttcaacagaaaaataaatgggaagaaacaggttttgcccttggtaccattcagcttggaaggcagcttgagtatttgggctccttagggctagagggtgggggagcaaggagagattgttgagcataggagagagagagagacagacagagaaagagagacagagacagagacagagagagagagagagaaagagagagaccgaga

SEQ ID NO: 667763 - DNA, 2045 bp, Homo sapiens
actcaccaggtgactcagtggcttggcccagtcttggacaaatcctgtcccaaagctgctccgtgtttgtcacctcaatcagactccagattgcaaactcctgacggggtgtatttccggcatgggagctgatacaaacttaaaatacaaaacaaagggtgacatatgtatttgatatctttggtggcctcatctgaggctgcccctgatatctctgttaactcaccctcggttgtaattagcccagcccaccttctcctgaccacacgtctcagaggtcactacataaaccagggaaattgatagcagaattatgcactcagaaattaattttatgttgtactgaatatatatttttttttattgtgactttatcttgctggaaaagtgcttacttctgattttgtggatattcctgaccgtggattacttttattttgatttttacacaacagttatattagaaatttgctgttttattcttaccttcttagtaaaaatccttttatcacacaatgggtaatttatatccattaccargcctttcaatccttttcagtggggctgtcagtgccgttggcacagtaatgattaatgtgatctaataatagtgtaccattatattaccttagtaaaacatgtaccaacaccctattccgatctaccaaattcatagcttcctataatatttttgttgaaagacaggattactatttttcaaagctgattttttcccctttaacatatttaatgaaattcacaattctttgccttagtaatcctgggcatgtgactgggcttgatgggtgaactccacatctgtaggccctgttgtgatttgtcaggagaaaggtccaaccatcccagtgatctgtcagagagattattttgtttttgttgggcctggattgttttgccttaaaaaagaagaaaaaaaattgttgggtttccagtcctttctgatgcataataaggaaggtgtgttttagattgaaaggcaaagtaggaagcaatttggttttttcctcccctctgtcacctgcttctgtctgccagtgaatcggaggtatagccgagccagtggaagtggctttaaaccgcttccccagaaatgcccctctctgacccatccactcctctagctgtggccaagcctctctgggtctgacatagggtctttcacatttggcattattgaaattttggactggatagcgattggttgcggggccctcccgtgcactgcagaatgtttgcaacatccctggtctctgcccactagatgctgatagcatgcctccaccaacacttcctccattgtgacaatcaaaataactccagaaatcaccatatgtcccctggggggcccaatcatctcttgttggtctaacctataggaaaacgagcagatatttttggcatgtcggggaattcctgtcagagttccagagttccatggtgctttttcggaagtctttggctttgggagagaagatgtgtgggtgaagacgacgcagggcatcctttccttggctgaaatacagccctcttcctcctctctccctcctcctctgccatgagcctggcccgagcgagggcctgaatcttagcgtcttccacttaaatcccattataatcacgctcatgattgataacattccaccttttcaaagggctttaaaatctgtgtcaaccaaggatgacattattgtagtgcgggcgagatgtattcaaacaattacacgctcaaatcaaagtgggaagttttgtccttctatctcggcgcctttgtgtgatgtggcttcagccagcaccacagtcctcacagccccagagaccttcaacagaaaaataaatgggaagaaacaggttttgcccttggtaccattcagcttggaaggcagcttgagtatttgggctccttagggctagagggtgggggagcaaggagagattgttgagcataggagagagagagagacagacagagaaagagagacagagacagagacagagagagagagagagaaagagagagaccgaga

SEQ ID NO: 667764 - DNA, 3549 bp, Homo sapiens
ccctctactcctacagggactgaaggctgagagaagcttgtgagggaggttgaggcaggcatgcatagatggaggctgcataggtgtgggaaggagtgctgctcttggagtgaggaggctggttctgatgtctatctgcagtcctcagcctgggtgacattggagagcctcaggccattgcagctgcaggctgctacctgaagggtgggtgtctaagcttctttgtaggtcttaaacagaatgacctagaccagggtgtcaggaatgtacacacagagccctgggggtcttggtagcatgcagattctgattcagcacatctaggggartgagattctgcatacttaacaggctcccaagagatgctgatgctgctggtccttggaccacactttgagtagcaagagactagagggataattctcaaacttggctatcaattataacaacacagggagcttttaagacccgccaatgtctaggtctgctcccaggccaatcaaatcaggacttgccctacaggaaacagtgtgattggaggcgggggtggggaggttgtctgctggcttgtagccaaggtatgaacggctggggtagtgtcgtggatctccaacttgggcaggtgtcagaattgcgtggagggctttgaaaaaacaacattgggccccaacccacattttcagattcagaaggtcttgggtatcgtccaagaatttgaatttctaacaaatttccaggcaatgctgtttctgcggccccagggactctgctttgagaaccactggtctaatgtaatcccctcccagtggatattcatgaagcagaaacctccagggagtgggagctgggggctccaggacacgcagagccctgcctctggggtcattccgtgcacatctgttttacacagtgagcagccttggaaaactttcacttgaaaaaaatgtgggtagaaaaaaatgtttgaaaacctctgaagcaaaggcaagacttttaatcatgggaatggtgaatgttcattctttaattgaggggcaaagcaggcaggatccttggtccctcttgttgccagatgtggccgtgtttgctcctagtactgccctgtcctgcaggaggtgttttccatgctgaactcctggctccctcttgcatataagagttcacacctgtccagaggcctccatggggcccagaccagtgtcgggcagggcaggttagcttgcggggaaatccaatgtgtgcagctgctagcacctaatgactgtgtactgggcttcaagcaccgtgctcatttatatgcatgatcttatttaattctgtagtgacctcatataataagtactgtcattatcccatttcagagatgagtatttgatgctaccttccagactgacagtgtccaggaaagcagctgcagtggaggtggaagggcagtaggattccctgattggtaagggcagtggaatgtcatggggaagactttgtccttgttggtgtcttgggaagagagcagaacagtgccctgtcagccctgcaggtcccagaacccactacctgggccaggtgacagaactcagagcctttggctgcttcaggagatgtcaccatggctgtctcttcttggtcaaagttccagttggccaagacatcctggggaaaatgggcagggaggttcctcctgggtgaaacccttttgtatggctcttgacagtgcagaggggtctgggaggagattctgtgaactagccggggtgaagggtgggtggatctctccagggctcaggtcctgtttctgtggctgccatctctaaccatggaaggctggcttggacagctctcagcttgctctctacccccagggagcctaaaatgtgtccaaagctgcaggtttttgctgagacatcatgcaaaagctggttcttctccctggtcacctaatgtgcttggggcagaggctgcgagccttctggttggaggaagggaggcacagatgggtgtgtggtcttccaagcagcatctaggtccttctggtggccaggggatggcagcatcctttcgccctcatgggagccaccctctgtcacctgtgtatttccctgggttcccttcatgggacttgggcctcgcctccgtatttacagctgatgttggcagtggagaggggaaggtgagagtaaaacttccagaagaaaagcttcctatgaggtgtttgagatgctccacgatcaggcacgaggccccagccagggaagacccttccagtggccagaacggtgctgcttcccctgtacctaaaacatctccctcctcctccaagagattttcaaaagagtcttgaagctcagtccgactgcagcccaagcatctgcccttcacttccatcttcaacttaaatgagatgcatttaaggaaaggctggcctggaaactactgtgatcagtaccaggcacctttttcctgaagtccttttacatctaaaaaaggttcatatggttcatcaccatataatcccttcgtatgcctggaaatggtacgtgggggaaagtttacatccagtttaacagaatttctacttaagtgctttttttaatggcccacgtttgatcttaagccacttctttttgaacccttgaaggttttattactgaactttaaaaagaacattcaattcagagggctggcatgttcttgaatggagctgcattttgaaagaagggagatgaatttctttccccagcagagacacaggtgtcacctatcaagggtggtcagaactctattttttcctcagtgtagcaccaggatgtagtgactttctctctttgaaggactaggcatgcagatattattgttaggatttgtagaaatgatggccgctcgagtaaacgagtggccaggagctgggggtggaaattctcccacaggtagccctttctcaagactaaatgaacatcccaggcagtgaacctgcctgtattgttatgcatgtgtatagcatgggagcttgggcgccaggcagcaggagccccctggatttgcaccgtgccctttatgagttaaattttccccacaaacttcatgccttttttttttttttctcaagacggagtcccccccccctctgtcgcccaggctggagtgcagtggtgcgatcttggctcactgcagtctctgcctcccaggttcaaaggattctcctgcctcagcctcccgagtagctgaaattataggcgcgtgccaccatgcccggtaatttttgcatttttggtagagatggggtttcatcatattggtcaggctggtctcgaactcctggccttgtgatcagcccgtcttggcctcccaaagttctggggttacaggtgtgagccacctcgcctggcctcatgcccttctttaaggaatcccaccgggtcctctacagtaccctcttccctttagaatagcgggctaattccaggtgcccattagaaattcaagatgtatcaccacatactctgactcaagacccttggttgcaactggaccataggaggtatgcccaggatg

SEQ ID NO: 667765 - DNA, 1088 bp, Homo sapiens
tgagaaaaccctgtctctactaaaaatacaaaaaaaaaaaaaaaaaaaattagctgagcatagtgatgcacacctgtaatcccagctacttgggaggctggggtgggagaatcgcttgaacctgggaggtggaggttgcagtgagccaagattgcaccaatgcactccagcctgggtgacagaaccagggggaataaaactcaacaaatgctgaaagccaaagatacgcagcaatccacctaatttgcaaaattgacttttagatcccacacagtcttgagcagggcaggaataatcagagtaaaagccagtggagaactcttcctgaaatatttcttcccatctccttgttgtctacctgctcatcccaaaacataaatgtctgtgcattcaaatcagactggcctgataaatgctaccaaggaaacatagatttgtcctcacttacatagtgtctagtatagagatgatgccccatagatttcactctacaacacaaatacatacacccacatttatgcttcagtttctctaaatgagaagggattccattatttttacaggacagtaactaaatccaaataaagagcaaaattcacagtggattcccatgaattatgtctccccagagaaaatttcatttcagatttctggataagctcattttcaaaagtcagtttttaaaggataccctctgttcatggacagcagatattgcttattggttcagttggcatacttactgacaaaagcaataaagaatgagattgccaatagcaggaaaaatatcaacagtgaggcacaaagcagcttggggaatccggtattacttttgwgaggggcagtcctctccttggaagctgaagaagaagccaaattagttttatcagtaataagtttggtctttacttcctcttcttcctcctcctctttctctctcttttcttggatgacacacagttactaacggtatgacatttgaaatcacatgagaataggaatagaaaggatataataatattcactgtagaaactttaaaaaatacataaaagtacgaattcctacaattgaggataactgttatgcc

SEQ ID NO: 667766 - DNA, 663 bp, Homo sapiens
ttggaaggcaggggcgggtgaatcacttgatctcaagagttcgggaccagtctgggcaataaagtgaaaccctgtctctataaaaattacacacttcaagaccagccatgatggtgagcatctgtagtcctagctactggggaggctgagatgggggaatcacttgagctccagaagttgaggctgcagtgagctgagatcgtgcaactgcactccagcctgggtaacagcaagaccctgtctcaaaaaaaaaaaaraattggccgggcgtggtggctcacgcctgtaatcccagcactttgggaggccgagggtggtgaatcacaaggtcaggagatcgagaccatcctggctaacacggcgaaaccccatctctactaaaaaaattagctgggcgtggtggcgggcgcctgtagtcccagccactcgggaggctgaggcaggagaatggtgtgaacccgggaggtggagcttgcagtgagccgagatcgcgtgactgcactccagcctcagcgacaaagcgagactccgtctcaaagaaaaaaaaaaattagatcattctaaacatactttttgccactgccttttttgaagtaatggtgggtatcttgtatgaggaagcaaaccacgcaaatcttatcaactacagtaaaaacatgaatg

SEQ ID NO: 667767 - DNA, 606 bp, Homo sapiens
taccctgcatagtcacccttctcaccctgctaaagctctccccctgtgccaggccactgctgctctcccagccacctcaccatagacacctatcttgctactgctttatttagaatcaaattatttagtaagaaaagggaaaggggaatgacaaagcataagggaaggataagggaattttaagttctccacaaattaatgattgggcctaaccagcacatgcacgtagacaggtatacatgcacacatattccctgaaataacaatcattgattctcagagtctttacaatctaagctcataattagaaagcaaaccatattcctaaaactatagctctctccctggaataagtcacattataactggattacacygtatcaccaacaaccccaaaatccaagtggcttacaacaacaaacatgtatttctcacttacattacacttgtgcttagggccaccttggagttgactgcaactctgcttggcccctctccaagtgttttctcattctggaagctgagatcacagaatagctccttgtaagctgaaccatgtagtagcatcctttattcagataaggtgtacgttgtatttgctctgat

SEQ ID NO: 667768 - DNA, 1103 bp, Homo sapiens
tagttcagaggaaatcattccctctcagcgagtaattggtctattcttgagaaatgctattgggtcctcagtgaatcagaatatagcaacatgggacaacaggtaaagatgcaacttgaggtaaccttcatgagctgagagtcatctaactggagtagaaaatcattagatgcagtaatggctaagggtttggatttaaatacacaaaaaaatgaggaaacaaagccttggacaagcactaagcagggagctggaattgagacttccatataattcataatttttgcaaaactgtaaattaagcaaaaggtaaactagaaagagttcagcagtaatacctctcyctgggctttgggtgaaaaaagaaaaattcgtaggaaagtacaaggtgagtctacaatattttgttccatcagaaataaaggaattggccgggcgcggtggctcacgcctgtaatcccagcactttgggaggctgaggcgggtggatcacgaggtcaggagattgagaccatcctggctaacacggtgaaaccccgtctctactaaaactacaaaaaattagccgggcgtggtggcgggcgcctgtggtcccagctactcgggaggctgaggcaggagaatggcgtgaacccgggaggcagagcttgcagtgagccgagatcacgccactgcactccagcctgggcgacagagcaagactccatctcagaaaaaaaaaagaaataaaggaattgctcaaacattaatgcaagtacgtcaaaaagcaacaaattagcttgaaggctactagccaattttagggcaatttgagcaccgtatggactcctcttttgtaggtatcatatcttcaccttttacttcagctcttgctacagaaaccagcctcgggcaagtgcaacctgataacaccttgcctcagccaaccatgaatctcttgctttccgtcccagggatcctctgacattacaagtacgaatgccccctgtacagaacaaacctgaaactgtgcaggtgccaacacaccatgaggaaaccctgatccaatgatggaaggaagctagtggataaattgtcccctcttttatcacttggggacacaa

SEQ ID NO: 667769 - DNA, 1103 bp, Homo sapiens
tagttcagaggaaatcattccctctcagcgagtaattggtctattcttgagaaatgctattgggtcctcagtgaatcagaatatagcaacatgggacaacaggtaaagatgcaacttgaggtaaccttcatgagctgagagtcatctaactggagtagaaaatcattagatgcagtaatggctaagggtttggatttaaatacacaaaaaaatgaggaaacaaagccttggacaagcactaagcagggagctggaattgagacttccatataattcataatttttgcaaaactgtaaattaagcaaaaggtaaactagaaagagttcagcagtaatacctctccctgggctttgggtgaaaaaagaaaaattcgtaggaaagtacaaggtgagtctacaatattttgttccatcagaaataaaggaattggccgggcgcggtggctcacgcctgtaatcccagcactttgggaggctgaggcgggtggatcacgaggtcaggagattgagaccatcctggctaacacggtgaaaccccgtctctactaaaactacaaaaaattagccrggcgtggtggcgggcgcctgtggtcccagctactcgggaggctgaggcaggagaatggcgtgaacccgggaggcagagcttgcagtgagccgagatcacgccactgcactccagcctgggcgacagagcaagactccatctcagaaaaaaaaaagaaataaaggaattgctcaaacattaatgcaagtacgtcaaaaagcaacaaattagcttgaaggctactagccaattttagggcaatttgagcaccgtatggactcctcttttgtaggtatcatatcttcaccttttacttcagctcttgctacagaaaccagcctcgggcaagtgcaacctgataacaccttgcctcagccaaccatgaatctcttgctttccgtcccagggatcctctgacattacaagtacgaatgccccctgtacagaacaaacctgaaactgtgcaggtgccaacacaccatgaggaaaccctgatccaatgatggaaggaagctagtggataaattgtcccctcttttatcacttggggacacaa

SEQ ID NO: 667770 - DNA, 648 bp, Homo sapiens
gggggatccctgcaccatcaccccccaagaccctgggcttatataccacaagggaggggtgggttagaagggacatgtaggtcaattgaagtagataacatcaaggttgcttgatctaagggcaggatttatggtaagtacctgctctaaacaaggaacaataaactggaaatcttagaggacttcccagaacagcggttaatcagaagctaacatggtggattaacttccaggatggagctgttgtagcctcaacaccagcttacttacagacacaggtaaaggtcctcagatccccaaatgcccatgaggacagagctccacaagtgatgccaacctcacagagcaagggctctgccaggcacaaggtgccatctgccaataggaggggtgaaggggtttattgctcctacttctagccctgcaaccccaagtattttggagactggctacatacctgtccacttaccaggtgcaaggtgtggtacagaataaccctagcacattcctaagagttcatcctgaaaatggatagggtaaagtcctatttcccasgggcacccatcgctgcaaagggtttttgccccacctggaggggcttggtaggatatctcttgccaaattacattccaaattgccttcacgagg

SEQ ID NO: 667771 - DNA, 618 bp, Homo sapiens
ggtggtagaaaagtcccaggggatatgcttctagtcccatgagggacattagttagygaagctttgatctggagcatgtcacattaccttcccagatgtgtcattgataaaacaaggggctcgcaccagatgatgacctctgttccataagactccacagccaaatggaccctcagggctggcatttcacttctctattaggattttcttttgggggagcagggctggatggacctgctcaaatgttgcgagaacttgggacagttataacaccttggtgtgttttgcagcctcctttgtcatgaggctcagactgctagagactctccaccctgtgcctgatccctgtggtgcttttattttgacaggtggacacaggtgttgggggagcacaggtgtggagataggggcatgcttcactccagatgttgggggtgcccagcacagctgacctgggttgaccccagctggctgtgtggtacatctgaaaacaggagtgctgggagaaaaagcatcaatggctctcgcttaggccactctatggatggcagaccagaccagaccatttaaaatggctgtggatcatgaagggagggactcaattgggactggactggg

SEQ ID NO: 667772 - DNA, 618 bp, Homo sapiens
ggtggtagaaaagtcccaggggatatgcttctagtcccatgagggacattagttagtgaagctttgatctggagcatgtcacattaccttcccagatgtgtcattgataaaacaaggggctcgcaccagatgatgacctctgttccataagactccacagccaaatggaccctcagggctggcatttcacttctctattargattttcttttgggggagcagggctggatggacctgctcaaatgttgcgagaacttgggacagttataacaccttggtgtgttttgcagcctcctttgtcatgaggctcagactgctagagactctccaccctgtgcctgatccctgtggtgcttttattttgacaggtggacacaggtgttgggggagcacaggtgtggagataggggcatgcttcactccagatgttgggggtgcccagcacagctgacctgggttgaccccagctggctgtgtggtacatctgaaaacaggagtgctgggagaaaaagcatcaatggctctcgcttaggccactctatggatggcagaccagaccagaccatttaaaatggctgtggatcatgaagggagggactcaattgggactggactggg

SEQ ID NO: 667773 - DNA, 634 bp, Homo sapiens
tttcatctgaagagtaaacataatgcaaggaattattaaagggctaccataggaataaaagagctaatggtataaaacattattagtattattagtattgcatagtatctatgcaatagtgtaagtcagaaactgaaatggcagaaatctacttttaataaccatttacatttaatgtaattattggtatttttgagccatttttgtttttcatatttatactacttttgattgtttttctttttcctgatctatggattccttgaaaatgttttttgattccattttagttgatctgtaaattttttgcgtgactctctgtacagcattgttagtggttgctcygtgttacattatgcatacatagcttttcacagcctagtgctgtgcacattttaccctattcagtaaaatatggaaaccttgctttcctgtctttttaactgctccccctttcccactgtttgtaacagaatcatattaaatatatgtctatgtgcatttagtgccacagtaaattttgtcatttttgctttgacataaatttattgtcttccaggtttgcagctcagaaatctgaactgggtctcactgcgttaaatccatgtctcaaggctgagttccttcctggagt

SEQ ID NO: 667774 - DNA, 634 bp, Homo sapiens
tttcatctgaagagtaaacataatgcaaggaattattaaagggctaccataggaataaaagagctaatggtataaaacattattagtattattagtattgcatagtatctatgcaatagtgtaagtcagaaactgaaatggcagaaatctacttttaataaccatttacatttaatgtaattattggtatttttgagccatttttgtttttcatatttatactacttttgattgtttttctttttcctgatctatggattccttgaaaatgttttttgattccattttagttgatctgtaaattttttgcgtgactctctgtacagcattgttagtggttgctccgtgttacattaygcatacatagcttttcacagcctagtgctgtgcacattttaccctattcagtaaaatatggaaaccttgctttcctgtctttttaactgctccccctttcccactgtttgtaacagaatcatattaaatatatgtctatgtgcatttagtgccacagtaaattttgtcatttttgctttgacataaatttattgtcttccaggtttgcagctcagaaatctgaactgggtctcactgcgttaaatccatgtctcaaggctgagttccttcctggagt

SEQ ID NO: 667775 - DNA, 634 bp, Homo sapiens
tttcatctgaagagtaaacataatgcaaggaattattaaagggctaccataggaataaaagagctaatggtataaaacattattagtattattagtattgcatagtatctatgcaatagtgtaagtcagaaactgaaatggcagaaatctacttttaataaccatttacatttaatgtaattattggtatttttgagccatttttgtttttcatatttatactacttttgattgtttttctttttcctgatctatggattccttgaaaatgttttttgattccattttagttgatctgtaaattttttgcgtgactctctgtacagcattgttagtggttgctccgtgttacattatgcatacatascttttcacagcctagtgctgtgcacattttaccctattcagtaaaatatggaaaccttgctttcctgtctttttaactgctccccctttcccactgtttgtaacagaatcatattaaatatatgtctatgtgcatttagtgccacagtaaattttgtcatttttgctttgacataaatttattgtcttccaggtttgcagctcagaaatctgaactgggtctcactgcgttaaatccatgtctcaaggctgagttccttcctggagt

SEQ ID NO: 667776 - DNA, 604 bp, Homo sapiens
ttagcctcctgagtagctgggattacaggtgtgtgctaccatgcctggctaatttttgtatttttagtagagatggagtttcaccatgttggccaggctggtctcagatgggctggtctcgaactcctgacctcatgatccgcccrcctcagccttccaaagtgctgggattacaggcgtgagccaccgtccctggctgcaaacctggttttttatatgccttggcagtgcagttactatgggtatattttaagagtactagcagagatgatgatttccacatttcaatattattttcaatttctaataaattataaatcatatttcaaatccattaattcaataagcaattaatgaatcattaatttataaatggtacattacctgattaaagcagagaaaagccgtataccttcagaaatgagtaagatttgaatatttaattcttttgaggattaatttagagatgtaaacttaagagaattttcaaaagattttctgtcacattttctatttagtttgaaaattatatatttaggcagataggctttatgttagaagattatggagcaagaatagtaggtcaagaaaatgagaagagtaa

SEQ ID NO: 667777 - DNA, 1045 bp, Homo sapiens
aaggacacagctttgaagccttttctatggatggttggatactatcagtttcacatgtaatatgtaggcacatttatagagctttgaatttgtggagtcttttaaaaaactgattgtgatcaatattcacattcttccaaaagctcaagagcctccattgaaaagccccctgatatataaaagatataaatttgagtactaattatagctgagcagttagtttgggaatatggtatagaaagccttgattctctaactaaaaattttgaatttttaattagcagtaacaaaacactgaaagttccaagtagttgaatgacttaatgtccattgtgtacgatgcatgttaaatgtgctgaagtaaggtggatatgttggctgcacaataagtgattgaagattagagaccagatataaatatagcttcattattggtgatagatgatgagaaccatggtgaaagttactttggaaatgaaaaagacagcgcagtgttgtcagaaccaatttggaagatttatcaatagaatctagtgattgatgagagacwtggggaggagggaaaaatgtaataaagatgataggcctgcatgcctgggagcaccttttatgagggaacataggaggaggaagataattggagaatgagagattgcgcaaccagcatgacctaggttgtttcaataatgttaacttccaaatctcagtggattaaaatgtagtaacaaatatttatttcatgttgttactgtgtgtttattttgtcctggctggcatttctgctccacattttcctcactctggggcccaggctgacagatcaaccactgtctggaaagttactagttgctttggcccaggtagagggagaatttgagggtctagcatcagaaattactacagcctggaagtgagagtggcaaatttaaaccattgtcaggtgacactatcttcttctaatgccagtcaaatgggatatttcctgttcattgcttatggcctcacccctgatttatttcccccagccttattgaggcataattta

SEQ ID NO: 667778 - DNA, 1045 bp, Homo sapiens
aaggacacagctttgaagccttttctatggatggttggatactatcagtttcacatgtaatatgtaggcacatttatagagctttgaatttgtggagtcttttaaaaaactgattgtgatcaatattcacattcttccaaaagctcaagagcctccattgaaaagccccctgatatataaaagatataaatttgagtactaattatagctgagcagttagtttgggaatatggtatagaaagccttgattctctaactaaaaattttgaatttttaattagcagtaacaaaacactgaaagttccaagtagttgaatgacttaatgtccattgtgtacgatgcatgttaaatgtgctgaagtaaggtggatatgttggctgcacaataagtgattgaagattagagaccagatataaatatagcttcattattggtgatagatgatgagaaccatggtgaaagttactttggaaatgaaaaagacagcgcagtgttgtcagaaccaatttggaagatttatcaatagaatctagtgattgatgagagacatggggaggagggaaaaatgtaataaagatgataggcctgcatgcctgggagcaccttttatgagggaacataggaggaggaagataattggagaatgagagattgcgcaaccagcatgacctaggttgtttcaataatgttaacttycaaatctcagtggattaaaatgtagtaacaaatatttatttcatgttgttactgtgtgtttattttgtcctggctggcatttctgctccacattttcctcactctggggcccaggctgacagatcaaccactgtctggaaagttactagttgctttggcccaggtagagggagaatttgagggtctagcatcagaaattactacagcctggaagtgagagtggcaaatttaaaccattgtcaggtgacactatcttcttctaatgccagtcaaatgggatatttcctgttcattgcttatggcctcacccctgatttatttcccccagccttattgaggcataattta

SEQ ID NO: 667779 - DNA, 1045 bp, Homo sapiens
aaggacacagctttgaagccttttctatggatggttggatactatcagtttcacatgtaatatgtaggcacatttatagagctttgaatttgtggagtcttttaaaaaactgattgtgatcaatattcacattcttccaaaagctcaagagcctccattgaaaagccccctgatatataaaagatataaatttgagtactaattatagctgagcagttagtttgggaatatggtatagaaagccttgattctctaactaaaaattttgaatttttaattagcagtaacaaaacactgaaagttccaagtagttgaatgacttaatgtccattgtgtacgatgcatgttaaatgtgctgaagtaaggtggatatgttggctgcacaataagtgattgaagattagagaccagatataaatatagcttcattattggtgatagatgatgagaaccatggtgaaagttactttggaaatgaaaaagacagcgcagtgttgtcagaaccaatttggaagatttatcaatagaatctagtgattgatgagagacatggggaggagggaaaaatgtaataaagatgataggcctgcatgcctgggagcaccttttatgagggaacataggaggaggaagataattggagaatgagagattgcgcaaccagcatgacctaggttgtttcaataatgttaacttccaaatctcagtggattaaaatgtagtaacaaatatttatttcatgttgttactgtgtgtttattttgtcctggctggcatttctgctccacattttcctcactctggggcccaggctgacagatcaaccactgtctggaaagttactagttgctttggcccaggtagagggagaatttgagggtctagcatcagaaattactacagcctggaagtgagagtggcaamtttaaaccattgtcaggtgacactatcttcttctaatgccagtcaaatgggatatttcctgttcattgcttatggcctcacccctgatttatttcccccagccttattgaggcataattta

SEQ ID NO: 667780 - DNA, 958 bp, Homo sapiens
caaaatttgggactttgttccaaatttgggactttgtcccatcatgggactttggtgccatacttaaggtgggggctggctctgctccatggtagagaggcttacttcccagctgcaaacctccctctcacacgtgacatatatctaatggccttctttaagtaatgccaaggacttaaagcctaaatttgtttatattgtaatgagatataaattgcaacaatgaaaaatgtgttcattaccaatgagtaaactagttagatattcaactgaaaagtttaagaaagtgcagctaacatgacagtgaaaagcagaaaacaaagaccagsaatatagaaaaatacaggttaaaaaacagcgggaactggccgggggtgcggtggctcacgcctgtaatcccagcactttgggaggccgaggagggtggatcacaaggtcaagagatcaagacaaccctggctgacaaggtgaaaccccatctctactaaaaatacaaaaattagccgggtgtggtggcgagcgggcacctgtagtcccagctactcgggaggctgaagcaggagaacggcatgaatcatggaggtggagcttgcagtgagccgagatcgcaccactgcactctagcctgggcaatagagtgagactctgtctcaaaaaaaacaaaaacaaaaacaaaaacaaacaaacaaacaaaacagtgggaacgaattcaaatcccacttatttgaaagtgctaaaatgtagaaaatgtagaaaatgtaacacaaatcttttttactataaaattgagcaaaaagcccaaacctagtaataggcaaaatgtatcacaggaaaaaaatggcaaataactgttgaaactgttacacctcactaataaagatagaaatattaaatctgtattccagttttcatttattaaattgtcatagaataaactaaaaccccatgtaatgtccaa

SEQ ID NO: 667781 - DNA, 958 bp, Homo sapiens
caaaatttgggactttgttccaaatttgggactttgtcccatcatgggactttggtgccatacttaaggtgggggctggctctgctccatggtagagaggcttacttcccagctgcaaacctccctctcacacgtgacatatatctaatggccttctttaagtaatgccaaggacttaaagcctaaatttgtttatattgtaatgagatataaattgcaacaatgaaaaatgtgttcattaccaatgagtaaactagttagatattcaactgaaaagtttaagaaagtgcagctaacatgacagtgaaaagcagaaaacaaagaccagcaatatagaaaaatacaggttaaaaaacagcgggaactggccgggggtgcggtggctcacgcctgtaatccyagcactttgggaggccgaggagggtggatcacaaggtcaagagatcaagacaaccctggctgacaaggtgaaaccccatctctactaaaaatacaaaaattagccgggtgtggtggcgagcgggcacctgtagtcccagctactcgggaggctgaagcaggagaacggcatgaatcatggaggtggagcttgcagtgagccgagatcgcaccactgcactctagcctgggcaatagagtgagactctgtctcaaaaaaaacaaaaacaaaaacaaaaacaaacaaacaaacaaaacagtgggaacgaattcaaatcccacttatttgaaagtgctaaaatgtagaaaatgtagaaaatgtaacacaaatcttttttactataaaattgagcaaaaagcccaaacctagtaataggcaaaatgtatcacaggaaaaaaatggcaaataactgttgaaactgttacacctcactaataaagatagaaatattaaatctgtattccagttttcatttattaaattgtcatagaataaactaaaaccccatgtaatgtccaa

SEQ ID NO: 667782 - DNA, 958 bp, Homo sapiens
caaaatttgggactttgttccaaatttgggactttgtcccatcatgggactttggtgccatacttaaggtgggggctggctctgctccatggtagagaggcttacttcccagctgcaaacctccctctcacacgtgacatatatctaatggccttctttaagtaatgccaaggacttaaagcctaaatttgtttatattgtaatgagatataaattgcaacaatgaaaaatgtgttcattaccaatgagtaaactagttagatattcaactgaaaagtttaagaaagtgcagctaacatgacagtgaaaagcagaaaacaaagaccagcaatatagaaaaatacaggttaaaaaacagcgggaactggccgggggtgcggtggctcacgcctgtaatcccagcactttgggaggccgargagggtggatcacaaggtcaagagatcaagacaaccctggctgacaaggtgaaaccccatctctactaaaaatacaaaaattagccgggtgtggtggcgagcgggcacctgtagtcccagctactcgggaggctgaagcaggagaacggcatgaatcatggaggtggagcttgcagtgagccgagatcgcaccactgcactctagcctgggcaatagagtgagactctgtctcaaaaaaaacaaaaacaaaaacaaaaacaaacaaacaaacaaaacagtgggaacgaattcaaatcccacttatttgaaagtgctaaaatgtagaaaatgtagaaaatgtaacacaaatcttttttactataaaattgagcaaaaagcccaaacctagtaataggcaaaatgtatcacaggaaaaaaatggcaaataactgttgaaactgttacacctcactaataaagatagaaatattaaatctgtattccagttttcatttattaaattgtcatagaataaactaaaaccccatgtaatgtccaa

SEQ ID NO: 667783 - DNA, 958 bp, Homo sapiens
caaaatttgggactttgttccaaatttgggactttgtcccatcatgggactttggtgccatacttaaggtgggggctggctctgctccatggtagagaggcttacttcccagctgcaaacctccctctcacacgtgacatatatctaatggccttctttaagtaatgccaaggacttaaagcctaaatttgtttatattgtaatgagatataaattgcaacaatgaaaaatgtgttcattaccaatgagtaaactagttagatattcaactgaaaagtttaagaaagtgcagctaacatgacagtgaaaagcagaaaacaaagaccagcaatatagaaaaatacaggttaaaaaacagcgggaactggccgggggtgcggtggctcacgcctgtaatcccagcactttgggaggccgaggagggtggatcacaaggtcaagagatcaagacaaccctggctgacaaggtgaaaccccatctctactaaaaatacaaaaattagccgggtgtggtggcgrgcgggcacctgtagtcccagctactcgggaggctgaagcaggagaacggcatgaatcatggaggtggagcttgcagtgagccgagatcgcaccactgcactctagcctgggcaatagagtgagactctgtctcaaaaaaaacaaaaacaaaaacaaaaacaaacaaacaaacaaaacagtgggaacgaattcaaatcccacttatttgaaagtgctaaaatgtagaaaatgtagaaaatgtaacacaaatcttttttactataaaattgagcaaaaagcccaaacctagtaataggcaaaatgtatcacaggaaaaaaatggcaaataactgttgaaactgttacacctcactaataaagatagaaatattaaatctgtattccagttttcatttattaaattgtcatagaataaactaaaaccccatgtaatgtccaa

SEQ ID NO: 667784 - DNA, 958 bp, Homo sapiens
caaaatttgggactttgttccaaatttgggactttgtcccatcatgggactttggtgccatacttaaggtgggggctggctctgctccatggtagagaggcttacttcccagctgcaaacctccctctcacacgtgacatatatctaatggccttctttaagtaatgccaaggacttaaagcctaaatttgtttatattgtaatgagatataaattgcaacaatgaaaaatgtgttcattaccaatgagtaaactagttagatattcaactgaaaagtttaagaaagtgcagctaacatgacagtgaaaagcagaaaacaaagaccagcaatatagaaaaatacaggttaaaaaacagcgggaactggccgggggtgcggtggctcacgcctgtaatcccagcactttgggaggccgaggagggtggatcacaaggtcaagagatcaagacaaccctggctgacaaggtgaaaccccatctctactaaaaatacaaaaattagccgggtgtggtggcgagcgggcacctgtagtcccagctactcgggaggctgaagcaggagaacggcatgaatcatggaggtggagcttgcagtgagccgagatcgcaccactgcrctctagcctgggcaatagagtgagactctgtctcaaaaaaaacaaaaacaaaaacaaaaacaaacaaacaaacaaaacagtgggaacgaattcaaatcccacttatttgaaagtgctaaaatgtagaaaatgtagaaaatgtaacacaaatcttttttactataaaattgagcaaaaagcccaaacctagtaataggcaaaatgtatcacaggaaaaaaatggcaaataactgttgaaactgttacacctcactaataaagatagaaatattaaatctgtattccagttttcatttattaaattgtcatagaataaactaaaaccccatgtaatgtccaa

SEQ ID NO: 667785 - DNA, 1421 bp, Homo sapiens
gatcctccacaatagtggatttcttacccagctgttccagcagtgtcctaaatctacagcgcacaatggagttagagatctgatgggggcatggaaaatgaaaacttcatgtaggctttaattctccaaataaaactaagtacctcttccacgaatcgttacacagatcagaaatctgaccctgtcccaattgaacagcccaagtagaaaagaagcttttaaagccttctcagagattctctgggtgtagctggtgaaagtctagggaatatgtgctctactttcctgtgagcagtggtacagaggaagattaaaattcaggatgaggttacagttcagtgcccagtcctgatgtaagggaatgggacaaaaatgaagcgtgtcaggaggactagacttagaaccagaagaatccagcttggagtcctgattctgtcttttcctggcattgtgaccttggggaacaccacttagcctcagtggtaattaccaaaatgaggatgaaaatgagatactgggtgtgaaactgcattgtaaactatattattaataaatatggaggtttattattactgttgttattataattggctgggctcctgcagggatactcaggggattttccttggaggcaaaatgtttttgggtgaatatcccaaagagctagccccgttgaggactcttgtgaagggacaattccgagagaagggaactcatggcagctgctgtttttcttgtgcttgttttcaaaccgttcatatggagagagggagagggaaaggaagtgagcgaaggagagggaagtctcttctgaagggttaaagcaagatagtgctgtaaagtgattccagatgtacaaatattaatatctctctccctgatgaatgagaaggtatgacccagttaggaaactgctaaaattaccggcgccaccgagacctcagttgatggcccagcacagatttttatccttaccccggcaactgtaatgctgatgaagggctcggacctgctgcagcagaccttccaaaacttcactctgtcccttgtgtctgggctctctgtcgtcatagtctttccagtctattgaacaaaagaaataaacatagtgaaattttaaaacaggggaggcctcttccttgccctgcgtcaggagccggagttttgctcatactacccacagtctctgcggatgagcaccccgcacatgcagagcaagcargcgatgccaaggatttggaagctgccattgttcagagctctgtgcaaaacagtaattgtggttggtttcttgtgtcgggcagtcttagggcaagagaaaatggtaattgaaagccaaaagaaaacaggaatttgggagtccaatctaacctcttccaaccccttctccccttttagccttctacatcctaaccagttcc

SEQ ID NO: 667786 - DNA, 623 bp, Homo sapiens
tttgtatctgtgactttcaggaaaacgaaaactaacatatgtcaaatgattcctttactgcagcctcattaaagtttttggggccaaaatgtgcaacaatcaagactgtgagagacatttttgtcatattttcatgattttctttattgtgcttactacattcaaatgttcatgcatcattagttaaatttgcatgcttgtactgaatattattttctgtaatatacacattctctaaaggcactattcaatcccaaatattttaacaacatgattagctttttatttttttaatatgaagttctttttaaagataacttttctttaatgtgtcttaaattataagccacacagctagtaaacaatccagacctcaagaaaccatggtgtggaaaaatgaatttacagcaagtcatccaaagcctggagcactgaatcaatgtacagggagatgatagcacttgacttcttcccaatttccatgttcagtgcttgtttattctctgctaaagtgtgctgagccgtgttggcaaatgctrtcatggggtgcttccaattttgcttgtgtggtataaagtttccttcaaaataaaagcaagaccctctctactgcaattctggaa

SEQ ID NO: 667787 - DNA, 627 bp, Homo sapiens
tagtaatctcttaaagatacactgtaaagtattcacagaagttttaagatgtctggggtttgtttcaaaataattacatagttggagaaatagataaagcgatattggccatttgttgaagctatttgatggaaatacgaatgttcattatgttactatatctactttggcatatatttaaaatgtttgtaataaaagaggttaaaaataaaaagttacrctattaatattcatttaaaatgcaattttattaggaggaaaaccctctggctatatttctaatttcaaggatatctgcatatatagccacaaacagaatacaaagataagaaaagtaaaataggaaaaggatgtgatcctcatttcatctgagtatttcattggagagagttattttatgtttttaactttggaaataacgtatagtgaaaaaattgcgaagtactttgtaaaatattaatctgaatttagtaatatgcaacttatttttgtcaaaaagaaagcattgttatcatcaaacacttttaagttccagtcaattgatgggacggcctactaaaatatttgcctttgagggacatatgcactaaaaatttttgatgcataagcaagtacatatacatctat

SEQ ID NO: 667788 - DNA, 670 bp, Homo sapiens
gcttccagaaagatagaacatgttctcctgccttagtaactattgacagtttgtgcataggggaaaaaaatcacacacaaatatgcagaaacacaactttcgtcaatgaaactgcacatttatagatgggaaggtaagaagatgtggggcaggggactaaagtccaggcctgatgcttgtttccctttgtgttctccaaagacaagacattgttttgacttaggataaatatatgaaaggcgaggagcagtgtgacatatttgggagttttatttaaatgcgagtttgccgtccccagcagtcaggaatggtactaatctggtggaaggacttttcatgctgtggctatttacttaacgttgctatttacaaatatcttcttggagctgccagatagaggaatgcagattcacagaagacttagtggcagcaattcccagggaggatcatctgtgttctgtcaaaataaattcccttacctgagcttttggacactcaagctcatcaaaaaataattggsaaatatttagtaggaaaagaaatagaaaataacaccattctgactgaacattcttgaaagaatgggttatagcctgtatttaagtgtgtgctattttaattggaatttcctatctcacaccccaagtcctttcattaagcacatccctat

SEQ ID NO: 667789 - DNA, 654 bp, Homo sapiens
caggatggtctcgatctcctgaccttatgatctgcccgcctcggcctcccaaagtgctgggattacaggcgtgagccaccgcgctgggctaactttgcgatttttgagaaaagactagaggttgtgcgttgtttactgtgaccttccaccctgaggaatttcccacacagcgccctgttcccctgcttaagggcagacctagttgatgtgtgaatgttgaagatccccttaatgtaatggcttttaaccttctctttcaggggcctctcaaatctcctccgagacgttgataaagaaccttagtaacttgactatcaacgctagtagcsaatctgtttcccctctatcggaagctttactccgtcgagagtctgtaggagcagcagtcctcagggaaatcgaagatgagtggctttacagcaggagaggagtaagaacattgctgtctgtgcagagagaaaagatggcaagattgagatacatgttactcggcggagttcgtacggtatgttgatgtgatgtggccggggctgtccaattccggagagtgacactcataaattaagacctaattaagactccctagctctaggcccggtgcggtggctgaggcctgtaatctgagcacttcgggaggctgaggcaggtggatca

SEQ ID NO: 667790 - DNA, 2902 bp, Homo sapiens
ggaagagtcatgatatggtttggctctgtgtccccacccaaatctcatcttgaattgtactcccataattcccacatgtcgtgggagggacctggtggtagatgattgaatcatgggggcggttcccccgtactgttcttgtagtagtaagtctcacaagatctgatggttttataaggggtttccacttttgattctttctcatctctcgtgccaccaccgtgttaagaagtgcctttcaccttccgccatgattgtgaggcctccccagccacatggaactgtgagtccattagacctacttttcttcccagtcttgggtatgtctttatcagcagcgtgaaaatggactaatacaagtcagttcccttgtttattgagttaattacccaacaagtgttactctaatatctacttttccaggggatgtcagttttccacattaaaatgaaaaccatggtcctaagaaaaggtaaccaccatgggtcaattctctcattacaattaatttttaaattctttgttatatggtcactgcattcttaagcacagatgaaaagaagtgagccatctggggcttctgatctgccctgttgggctaaaattttgatggtaaacgtatctgtttgtaattggctttcctctgttattgttaatctcatttctcaggttacagaaagagaaggtcattgcttgcaaacaattaattataaacaactcagtatttatgaagagtctgcaggaaggctgctggttattatgactgttagtcaacctattttatttttctttgacagacaaggtctctctctggcacccaggctgaagtgcagtggtacgattacaactctctataaccttgaactcctgggctcaagcaatcctcctgcctcagcttcctgaagagctactgccatggctagctgtttgttgttgttgtttttaaatggatggagtttcactatgttgcccgggctgatcctgaactcctggcctcaagcaatcctcccgccgtggacgcccaaattgctgggattagaggtaggagccactgcaaccagcctcaacttatttttaaagacccttttcttcttgctgactctctgaatttagctgcaaaatcctgctatggcttaacagaggaaatgcattagaggatcagattattttgacatatgcaaatacattgcttcaaatgagctctttctgatcacacctgggacgtatgcacctagaggaggtactatttcttacttttgcttgccattcttggaggtttctgtgacattttcaaagaaaacaccagatcagtaacagggatctgtcctgaaaagtgcatctactccatgaacgaagcagatatttttaatgcttcctcttaactcccactacaagaaccacagacttcgcaaagaaatctggttctaatgaagatatgaagatttctaattcctaaatggagcaaataatcctctgaacactaagtggtcaaaacgggtggtatgattgaattgattataacaggtttcacaatagtaaacttaaagcaaagtatgtttttaaacacaaagaatacgaggaaatagggtttctagatccttggagaagaaataatcacatttttaaatgcttcaatggataaaatcatgattttgattagcttctagtggaaatatttaaagacacacttgaattccaagaattacagtgttgacaagtaaatgccatttaatgaaaatcaaacacctagcctttctgttgggttggctctgttaggttcctgaagccccaagttttcattgactgggacagctcatttaatccagaatcttgagaacaaaaaagagcctctcatcttgatgaacatcaaagtcaaccagagtcttctctacagaactttgagttcctctttagggagactattaggagttaatattgttttaggagcagatgcataagctagaactaagtcattgaaagagcctagctaaacttgtgctgatgaatggataaagacttatttttaccccattgccaggggacaacttcatcatggaacttcagagctgagttattttcagatgctccatgataaaatgtactctaagactcaaggctattttgttagctgcaagacagatttatttccccttaaaaaacatgcacagaataattaggcaagatgtttggctgaaattttggccctccagatacagtcaatgtacactttctgtggactgccgatagtgagctatctgtatgggatgcaaactattcactgtgttcactttgacttcttagatagaatcactcggttttcacttcctgggcctgaattcccttccagtagcagacactgctaggcctctgaccaaaagccattcattttttttccccttatgaatagatttctgagctttgttgaaatgacatgtttagctaacaaaatacatttccccgattctcctgcagctatcggtagccacaggccayagctctggccagtcagatctcaacacaagtctcctagacacttctagaaaagttgcattttcctgttataggtgcttccctcccacttattgcttccccttttcttctgcctacccagaggtggaatcgccatttactgaccagaggcaatcctactccctttgtggaaatggaggtttttggtgactattgtaaagagggaactggatttttcataatctcaggaaaataggcaccagctaaaataggctgttcaatgaagggctaaacagctttgtggattttatctatttcatcaagttttcactgagttagaaagaagcggcatggataatttctttgatgagtattcacgtaacacagctccttgaggaagggctgctctttgaaagctgcatgacccattctg

SEQ ID NO: 667791 - DNA, 634 bp, Homo sapiens
cagagggactcagcaccgcctggcaggtcgcgaaggggccctgggggttccggagctgcccgcaggcctcgttgctctcatagggtgcagtctcctctgccaagcacactgggcagccttggggcccgcagccctcgccacagcccttggaggagccgggcrcccgccatgcagccccgaaggtctccacactggacgctgctgagccattgggcaggacaaagtcgtcactccagttgccattgaagttcccacagaggccacagagccgtccacggaaggggctggggatggacatgaggaggtgggcatcgccatcaaagagaagccgcagccccttggtcgtctgcagaaccatgtttcggccctcggcggtcacccgcacgcggcccacagccacaggcagggccacagcctcgccgtccacggtgacctgggtggaagggtcgggtaggtcaggaactcacagaaccacaggcaaggctgtcctgtcccactcccaggccagagctgcatctccctcagtcccattaacgtcaggtcatgtttcccttaaacttcttgggccccaggcctggcgtggtgactcacacctataatcccagcactttgggaggcccagacaggtggatca

SEQ ID NO: 667792 - DNA, 634 bp, Homo sapiens
cagagggactcagcaccgcctggcaggtcgcgaaggggccctgggggttccggagctgcccgcaggcctcgttgctctcatagggtgcagtctcctctgccaagcacactgggcagccttggggcccgcagccctcgccacagcccttggaggagccgggcgcccgccatgcagccccgaaggtctccacactggacgctgctgagccattgggcaggacaaagtcgtcactccagttgccattgaagttcccacagaggccacagagccgtccacggaaggggctggggatggacatgaggaggtgggcatcgccatcaaagagaagccgcagccccttggtcgtctgcagaaccatgtttcggccctcggcggtcacccgcacgcggcccacagccacaggcagggccacagcctcgccgtccacggtgacctgggtggaagggtcgggtaggtcaggaactcacagaaccacaggcaaggctgtcctgtcccactcccaggccagagctgcatctccctcagtcccattaacgtcaggtcatgtttcccttaaacttcttgggccccaggcctggcgtggtgactcacacctrtaatcccagcactttgggaggcccagacaggtggatca

SEQ ID NO: 667793 - DNA, 667 bp, Homo sapiens
ccactgtcattttcacttggaaaaggtgaagaaagagactgggatcaaaagttcagtaacaaaagtcatgaaggtagggacttcagcctgccaggccccgtccccagtgctagggacacagagaagaaatcagtagctccctgccttgcaactcttacaaaggaaagacagccacagaaaatgactattgaaacacaccatgattcattcagcgatcatgcttgcaaaggagtaaggagaaatgatgaactttgtctcagggagagcagtggtctgaaagagcttcagatattaagggtgacaccggaatagggttttgcaggatcaataggagtttgcatgtggaagaaacagtgtctgtgaagcatggagtgaaagtgcttttggagaattccaaaggaaaagcggagagttgtttataaagctggagatactggcaaggcctgatactggagccttgagggccactctagggagcttggacayacactagcaactgctgggagccataaagacagatgcagggagtgatttggtcagaacagaattcttttttaaagcctggtgaagggagccaaagagttagtgcaacaaacgagggactatgatagagggtcgggggcaggggacaagagtcagaaggtcagagacaggaacaagttcctga

SEQ ID NO: 667794 - DNA, 881 bp, Homo sapiens
tgagggttttgccagagtgtacagataccaatatccagctttactatagaggtgaaatgagtggactatatatggaaaaagtccgaatctgtacttcctggaatatggctcaaaaggcatttagcagatgttttatactggattagtgattattaattctatctgtatatatttcagaaaacacacctggatttgaatcatctgctctgtggaaattcaagaagcaggctgagtgacactgaacaccagcatgccctttgccatattacctcatcattatactcttattttctttcaataatgcaaacattaactrtgtaatatttcttgcagagacaggatttagaaaccacaagaggatatttatcaaagaaaatggaaacaacagggtgctgagaaaacctggtgctagtacaaatgcacacaaaacatttaaaataaaattagtatcagagttgctataattaccttccaccaaatgtttcattaatttaaccctcagcttccttatgttaacataaaagcaatcactcagtacccatctttacctaacactgcttttacttcatctcctgcatgtatttccttgctatttgtttcctattataagaaaacacaggctggatgcagtgtggctcacacctgtaatcccagcactttgggaggccaagggggtgggtcgcttgggcccaggagtttgagatcagcctgggcaacatggtgaaaccccatctccactaaaaatacaaaaattagcctagcgtggtagcgcacacctgtagtcccagcttctcgggaggttggggtgggagaatcacctgaacgtgaaaggtggagggtgcagtgagccagtatcacgccactgcactccagcctaggca

SEQ ID NO: 667795 - DNA, 881 bp, Homo sapiens
tgagggttttgccagagtgtacagataccaatatccagctttactatagaggtgaaatgagtggactatatatggaaaaagtccgaatctgtacttcctggaatatggctcaaaaggcatttagcagatgttttatactggattagtgattattaattctatctgtatatatttcagaaaacacacctggatttgaatcatctgctctgtggaaattcaagaagcaggctgagtgacactgaacaccagcatgccctttgccatattacctcatcattatactcttattttctttcaataatgcaaacattaactatgtaatatttcttgcagagacaggatttagaaaccacaagaggatatttatcaaagaaaatggaaacaacagggtgctgagaaaacctggtgctagtacaaatgcacacaaaacatttaaaataaaattagtatcagagttgctataattaccttccaccaaatgtttcattaatttaaccctcagcttycttatgttaacataaaagcaatcactcagtacccatctttacctaacactgcttttacttcatctcctgcatgtatttccttgctatttgtttcctattataagaaaacacaggctggatgcagtgtggctcacacctgtaatcccagcactttgggaggccaagggggtgggtcgcttgggcccaggagtttgagatcagcctgggcaacatggtgaaaccccatctccactaaaaatacaaaaattagcctagcgtggtagcgcacacctgtagtcccagcttctcgggaggttggggtgggagaatcacctgaacgtgaaaggtggagggtgcagtgagccagtatcacgccactgcactccagcctaggca

SEQ ID NO: 667796 - DNA, 837 bp, Homo sapiens
gaattttatagggattgcattgaacctgtagattgctttgtatagtaaaccattttaacaatattaattcttctaatccataacatgggatacctttccatttatttatgtctaatttctttcaccatagttttatagtttccagtgtacagatctttcatgtccttggttaaatgtatgcctaagtatttttattctaaaggttaaagtttttctgatgatctctatcagaactctgttgtagtgtcttttagttgcttccctgtgyaaatactttacttgctctaaaatatttagaatgttttcagaataatagagattgaaaactttagcaaactgaagaatttgtacagattcagcatggtacttatcatttgttgcctaggtaagctgcatcatatttaaaggtgcagtgctctgagaaattgtctgaacctaagttttcaaagttaataccatcttgattataaagatttcaaggccaggcgtggtggctcatgcctgtaatcccagcactttgggaggccaagacaggtggatcacctgaggtcaggagttcaagaccagcatggccaacatggtgaaaccctgtctctactaaaaatacaaaaattagctgggtgtggtggcacacgcttgtaatcccagctactctggaggctgaggcaggaggatcacttgaacctgggaggcagaggttatagtgagcagagaatgcaccactgcactccagcctgggagacagagcaagactctgtctcaaaaaaaaaaatacacatatatacgtatttttaaaataaatagatgcactatactttgcaacccttttgtaatagc

SEQ ID NO: 667797 - DNA, 837 bp, Homo sapiens
gaattttatagggattgcattgaacctgtagattgctttgtatagtaaaccattttaacaatattaattcttctaatccataacatgggatacctttccatttatttatgtctaatttctttcaccatagttttatagtttccagtgtacagatctttcatgtccttggttaaatgtatgcctaagtatttttattctaaaggttaaagtttttctgatgatctctatcagaactctgttgtagtgtcttttagttgcttccctgtgcaaatactttacttgctctaaaatatttagaatgttttcagaataatagagattgaaaactttagcaaactgaagaatttgtacagattcagcatggtacttatcatttgttgcctagktaagctgcatcatatttaaaggtgcagtgctctgagaaattgtctgaacctaagttttcaaagttaataccatcttgattataaagatttcaaggccaggcgtggtggctcatgcctgtaatcccagcactttgggaggccaagacaggtggatcacctgaggtcaggagttcaagaccagcatggccaacatggtgaaaccctgtctctactaaaaatacaaaaattagctgggtgtggtggcacacgcttgtaatcccagctactctggaggctgaggcaggaggatcacttgaacctgggaggcagaggttatagtgagcagagaatgcaccactgcactccagcctgggagacagagcaagactctgtctcaaaaaaaaaaatacacatatatacgtatttttaaaataaatagatgcactatactttgcaacccttttgtaatagc

SEQ ID NO: 667798 - DNA, 837 bp, Homo sapiens
gaattttatagggattgcattgaacctgtagattgctttgtatagtaaaccattttaacaatattaattcttctaatccataacatgggatacctttccatttatttatgtctaatttctttcaccatagttttatagtttccagtgtacagatctttcatgtccttggttaaatgtatgcctaagtatttttattctaaaggttaaagtttttctgatgatctctatcagaactctgttgtagtgtcttttagttgcttccctgtgcaaatactttacttgctctaaaatatttagaatgttttcagaataatagagattgaaaactttagcaaactgaagaatttgtacagattcagcatggtacttatcatttgttgcctaggtaagctgcatcatatttaaaggtgcagtgctctgagaaattgtctgaacctaagttttcaaagttaataccatcttgattataaagatttcaaggccaggcgtggtggctcatgcctgtaatcccagcactytgggaggccaagacaggtggatcacctgaggtcaggagttcaagaccagcatggccaacatggtgaaaccctgtctctactaaaaatacaaaaattagctgggtgtggtggcacacgcttgtaatcccagctactctggaggctgaggcaggaggatcacttgaacctgggaggcagaggttatagtgagcagagaatgcaccactgcactccagcctgggagacagagcaagactctgtctcaaaaaaaaaaatacacatatatacgtatttttaaaataaatagatgcactatactttgcaacccttttgtaatagc

SEQ ID NO: 667799 - DNA, 1236 bp, Homo sapiens
agcaataaactgtgattacctagcaaatataaagtattgtaatgccataataataatggttatttaaaaaaaacactttagggcattgaaaaaagcaaacatgtgttaaagaaagggaagtcaaatgataccactggctattaacatcacataacaacagacaatcagatatttggagcctcctgatggaagtatatgttaccgcctctgaagtattgttgtagcagcaggaagaggaaaacaagtacatgtataatttccggctggcagaaaattagagatagagtgaagctcaagtcccagaggcattatcacatttaatctgcacatctttttgaaacataaaaattagttgttgttttgttttactaattttaccccattttagagaggagtaaatttaatgaataaatgatatgtctgtgaccacctgactaatacattcaagaaccaggacctaccaagccttctggcttcttatgatggaacgtgctttccatgttatagagtgaggctcagtgtcatcaaggaacagccaatccaatgagattgacatgagaaatgatacatattcagcagaagatcagaccttaaaagcatgacaattgcagttatcttctctggcaagagaagagtgtaagtataatattctgttgattcagtgaagattcatgtatttcagagatcaaaaagagctgatgatgatattggcattctcttatgcagtggaggcattttacctgctctctctccagaagggcagtcatcccartgtcaccaaagtggaccaatggagcccttgctgactaagacagagtccttttagaaagtgttgtggatctgcttgaatacatgaccaaatcgatggctaatatacaaggccagcttcagcctcatagatgtatgacctacgcagtcacacaaggatctgctctcagaggggccctgcacttggtttaatgccctgctgtcaccatttttaaatacttaaaattttatttttgagcttgagttttgtaaataaagtctgttggaacaattgaacattcacatgagcagcacagataggccaggcagcagtgtgcacatgcacaggcctgaatcgatggctgtggcagagggtgtgggtgccaagcaaataggcctgtggcctggtgctcaaatgcatgcatcagggcagtttggggtatcacagagtcccaaggcagccaggccagcacttgagtgcagattggc

SEQ ID NO: 667800 - DNA, 1236 bp, Homo sapiens
agcaataaactgtgattacctagcaaatataaagtattgtaatgccataataataatggttatttaaaaaaaacactttagggcattgaaaaaagcaaacatgtgttaaagaaagggaagtcaaatgataccactggctattaacatcacataacaacagacaatcagatatttggagcctcctgatggaagtatatgttaccgcctctgaagtattgttgtagcagcaggaagaggaaaacaagtacatgtataatttccggctggcagaaaattagagatagagtgaagctcaagtcccagaggcattatcacatttaatctgcacatctttttgaaacataaaaattagttgttgttttgttttactaattttaccccattttagagaggagtaaatttaatgaataaatgatatgtctgtgaccacctgactaatacattcaagaaccaggacctaccaagccttctggcttcttatgatggaacgtgctttccatgttatagagtgaggctcagtgtcatcaaggaacagccaatccaatgagattgacatgagaaatgatacatattcagcagaagatcagaccttaaaagcatgacaattgcagttatcttctctggcaagagaagagtgtaagtataatattctgttgattcagtgaagattcatgtatttcagagatcaaaaagagctgatgatgatattggcattctcttatgcagtggaggcattttacctgctctctctccagaagggcagtcatcccaatgtcaccaaagtggaccaatggagcccttgctgactaagacagagtccttttagaaastgttgtggatctgcttgaatacatgaccaaatcgatggctaatatacaaggccagcttcagcctcatagatgtatgacctacgcagtcacacaaggatctgctctcagaggggccctgcacttggtttaatgccctgctgtcaccatttttaaatacttaaaattttatttttgagcttgagttttgtaaataaagtctgttggaacaattgaacattcacatgagcagcacagataggccaggcagcagtgtgcacatgcacaggcctgaatcgatggctgtggcagagggtgtgggtgccaagcaaataggcctgtggcctggtgctcaaatgcatgcatcagggcagtttggggtatcacagagtcccaaggcagccaggccagcacttgagtgcagattggc

SEQ ID NO: 667801 - DNA, 1236 bp, Homo sapiens
agcaataaactgtgattacctagcaaatataaagtattgtaatgccataataataatggttatttaaaaaaaacactttagggcattgaaaaaagcaaacatgtgttaaagaaagggaagtcaaatgataccactggctattaacatcacataacaacagacaatcagatatttggagcctcctgatggaagtatatgttaccgcctctgaagtattgttgtagcagcaggaagaggaaaacaagtacatgtataatttccggctggcagaaaattagagatagagtgaagctcaagtcccagaggcattatcacatttaatctgcacatctttttgaaacataaaaattagttgttgttttgttttactaattttaccccattttagagaggagtaaatttaatgaataaatgatatgtctgtgaccacctgactaatacattcaagaaccaggacctaccaagccttctggcttcttatgatggaacgtgctttccatgttatagagtgaggctcagtgtcatcaaggaacagccaatccaatgagattgacatgagaaatgatacatattcagcagaagatcagaccttaaaagcatgacaattgcagttatcttctctggcaagagaagagtgtaagtataatattctgttgattcagtgaagattcatgtatttcagagatcaaaaagagctgatgatgatattggcattctcttatgcagtggaggcattttacctgctctctctccagaagggcagtcatcccaatgtcaccaaagtggaccaatggagcccttgctgactaagacagagtccttttagaaagtgttgtggatctgcttgaatacatgaccaaatcgatggctaatatacaaggccagcttcagcctcatagatgtatgacctaygcagtcacacaaggatctgctctcagaggggccctgcacttggtttaatgccctgctgtcaccatttttaaatacttaaaattttatttttgagcttgagttttgtaaataaagtctgttggaacaattgaacattcacatgagcagcacagataggccaggcagcagtgtgcacatgcacaggcctgaatcgatggctgtggcagagggtgtgggtgccaagcaaataggcctgtggcctggtgctcaaatgcatgcatcagggcagtttggggtatcacagagtcccaaggcagccaggccagcacttgagtgcagattggc

SEQ ID NO: 667802 - DNA, 1236 bp, Homo sapiens
agcaataaactgtgattacctagcaaatataaagtattgtaatgccataataataatggttatttaaaaaaaacactttagggcattgaaaaaagcaaacatgtgttaaagaaagggaagtcaaatgataccactggctattaacatcacataacaacagacaatcagatatttggagcctcctgatggaagtatatgttaccgcctctgaagtattgttgtagcagcaggaagaggaaaacaagtacatgtataatttccggctggcagaaaattagagatagagtgaagctcaagtcccagaggcattatcacatttaatctgcacatctttttgaaacataaaaattagttgttgttttgttttactaattttaccccattttagagaggagtaaatttaatgaataaatgatatgtctgtgaccacctgactaatacattcaagaaccaggacctaccaagccttctggcttcttatgatggaacgtgctttccatgttatagagtgaggctcagtgtcatcaaggaacagccaatccaatgagattgacatgagaaatgatacatattcagcagaagatcagaccttaaaagcatgacaattgcagttatcttctctggcaagagaagagtgtaagtataatattctgttgattcagtgaagattcatgtatttcagagatcaaaaagagctgatgatgatattggcattctcttatgcagtggaggcattttacctgctctctctccagaagggcagtcatcccaatgtcaccaaagtggaccaatggagcccttgctgactaagacagagtccttttagaaagtgttgtggatctgcttgaatacatgaccaaatcgatggctaatatacaaggccagcttcagcctcatagatgtatgacctacgcagtcacacaaggayctgctctcagaggggccctgcacttggtttaatgccctgctgtcaccatttttaaatacttaaaattttatttttgagcttgagttttgtaaataaagtctgttggaacaattgaacattcacatgagcagcacagataggccaggcagcagtgtgcacatgcacaggcctgaatcgatggctgtggcagagggtgtgggtgccaagcaaataggcctgtggcctggtgctcaaatgcatgcatcagggcagtttggggtatcacagagtcccaaggcagccaggccagcacttgagtgcagattggc

SEQ ID NO: 667803 - DNA, 1277 bp, Homo sapiens
ccctacttagtaccgagtgaagccacttaccctctaagtgccttacttttcttttcttttcttttttcttttttcgagacagagtctcgctctgtcacccaggctggagtgcagtggcatgatcttggctcactgcaaacttcgccttccaggttcaagcaattctcctgcctcagcctcccaagtagctgggattacaggcgcccaccaccatgccgggctaatatttgtatttttgatagagatggggtttcaccatattgcccaggctggtctcgaactcctgacctcaagtgatctgtctgcctcggcctcccaaagtactaggattagaggcatgagccaccacacctggccacttttcttatctatatttgttatgtggatgacttgtgttaacgcaaataagatgctgctcgtcatctttaaagaaaataggtggcaacctgttatagcaagtcctgtttttatttgtacttatgaggctttaattaaacgctaagaattaaaatgcacataataatagactttacctcacaaactggcttcaattattcgatgagacttacatgtattacttaaatgaggttaaatttaaccttttaaaaatgatttattgtggctgggcacagtggctcacacctgtaatcccagcactttgggaggccaaggcagacggatcacttgaggccaggagttgaagaccagcctgaccaacasggcaaaaccccatctccgctaaaaatacaaaaattagccaggcatggtggtgcacacctgtaatcctagctactcaggaggctgagacacaagaatcgcttgaacccgggaggcagaggttgcaaggaggtgagatcacaccactgcactccagcctgggcaatagagtgaggctctgccttaaaacaaagaaaaatgattttgggggatgatggggtgtcactatgttgaccaggcttgtctcaaactccttgcctcaagcaatccacccacctcagcctcccaagtagctggaactacaggcgcatgccaccacgcctggctaatatgtgtgtgtgtgtgtgtgtgtgtgtgtgtgtgtgtgtgtgtgtgtgtgtagaaacaaggtcttactgtgttgtttaagctgctctcaaactcctgggctcaagtgatcctcccacctcggcctcccaaagcattggaattacaggtgtgagccacctcactgagccctccacctttcagctgaacgcagaaaagtacaatcttttaacccaaagcgttcctcacactta

SEQ ID NO: 667804 - DNA, 1277 bp, Homo sapiens
ccctacttagtaccgagtgaagccacttaccctctaagtgccttacttttcttttcttttcttttttcttttttcgagacagagtctcgctctgtcacccaggctggagtgcagtggcatgatcttggctcactgcaaacttcgccttccaggttcaagcaattctcctgcctcagcctcccaagtagctgggattacaggcgcccaccaccatgccgggctaatatttgtatttttgatagagatggggtttcaccatattgcccaggctggtctcgaactcctgacctcaagtgatctgtctgcctcggcctcccaaagtactaggattagaggcatgagccaccacacctggccacttttcttatctatatttgttatgtggatgacttgtgttaacgcaaataagatgctgctcgtcatctttaaagaaaataggtggcaacctgttatagcaagtcctgtttttatttgtacttatgaggctttaattaaacgctaagaattaaaatgcacataataatagactttacctcacaaactggcttcaattattcgatgagacttacatgtattacttaaatgaggttaaatttaaccttttaaaaatgatttattgtggctgggcacagtggctcacacctgtaatcccagcactttgggaggccaaggcagacggatcacttgaggccaggagttgaagaccagcctgaccaacacggcraaaccccatctccgctaaaaatacaaaaattagccaggcatggtggtgcacacctgtaatcctagctactcaggaggctgagacacaagaatcgcttgaacccgggaggcagaggttgcaaggaggtgagatcacaccactgcactccagcctgggcaatagagtgaggctctgccttaaaacaaagaaaaatgattttgggggatgatggggtgtcactatgttgaccaggcttgtctcaaactccttgcctcaagcaatccacccacctcagcctcccaagtagctggaactacaggcgcatgccaccacgcctggctaatatgtgtgtgtgtgtgtgtgtgtgtgtgtgtgtgtgtgtgtgtgtgtgtgtagaaacaaggtcttactgtgttgtttaagctgctctcaaactcctgggctcaagtgatcctcccacctcggcctcccaaagcattggaattacaggtgtgagccacctcactgagccctccacctttcagctgaacgcagaaaagtacaatcttttaacccaaagcgttcctcacactta

SEQ ID NO: 667805 - DNA, 1277 bp, Homo sapiens
ccctacttagtaccgagtgaagccacttaccctctaagtgccttacttttcttttcttttcttttttcttttttcgagacagagtctcgctctgtcacccaggctggagtgcagtggcatgatcttggctcactgcaaacttcgccttccaggttcaagcaattctcctgcctcagcctcccaagtagctgggattacaggcgcccaccaccatgccgggctaatatttgtatttttgatagagatggggtttcaccatattgcccaggctggtctcgaactcctgacctcaagtgatctgtctgcctcggcctcccaaagtactaggattagaggcatgagccaccacacctggccacttttcttatctatatttgttatgtggatgacttgtgttaacgcaaataagatgctgctcgtcatctttaaagaaaataggtggcaacctgttatagcaagtcctgtttttatttgtacttatgaggctttaattaaacgctaagaattaaaatgcacataataatagactttacctcacaaactggcttcaattattcgatgagacttacatgtattacttaaatgaggttaaatttaaccttttaaaaatgatttattgtggctgggcacagtggctcacacctgtaatcccagcactttgggaggccaaggcagacggatcacttgaggccaggagttgaagaccagcctgaccaacacggcaaaaccccatctccgctaaaaatacaaaaattagccaggcatggtggtgcacacctgtaatcctagctactcaggaggctgagacacaagaatcgcttgaaccygggaggcagaggttgcaaggaggtgagatcacaccactgcactccagcctgggcaatagagtgaggctctgccttaaaacaaagaaaaatgattttgggggatgatggggtgtcactatgttgaccaggcttgtctcaaactccttgcctcaagcaatccacccacctcagcctcccaagtagctggaactacaggcgcatgccaccacgcctggctaatatgtgtgtgtgtgtgtgtgtgtgtgtgtgtgtgtgtgtgtgtgtgtgtgtagaaacaaggtcttactgtgttgtttaagctgctctcaaactcctgggctcaagtgatcctcccacctcggcctcccaaagcattggaattacaggtgtgagccacctcactgagccctccacctttcagctgaacgcagaaaagtacaatcttttaacccaaagcgttcctcacactta

SEQ ID NO: 667806 - DNA, 1277 bp, Homo sapiens
ccctacttagtaccgagtgaagccacttaccctctaagtgccttacttttcttttcttttcttttttcttttttcgagacagagtctcgctctgtcacccaggctggagtgcagtggcatgatcttggctcactgcaaacttcgccttccaggttcaagcaattctcctgcctcagcctcccaagtagctgggattacaggcgcccaccaccatgccgggctaatatttgtatttttgatagagatggggtttcaccatattgcccaggctggtctcgaactcctgacctcaagtgatctgtctgcctcggcctcccaaagtactaggattagaggcatgagccaccacacctggccacttttcttatctatatttgttatgtggatgacttgtgttaacgcaaataagatgctgctcgtcatctttaaagaaaataggtggcaacctgttatagcaagtcctgtttttatttgtacttatgaggctttaattaaacgctaagaattaaaatgcacataataatagactttacctcacaaactggcttcaattattcgatgagacttacatgtattacttaaatgaggttaaatttaaccttttaaaaatgatttattgtggctgggcacagtggctcacacctgtaatcccagcactttgggaggccaaggcagacggatcacttgaggccaggagttgaagaccagcctgaccaacacggcaaaaccccatctccgctaaaaatacaaaaattagccaggcatggtggtgcacacctgtaatcctagctactcaggaggctgagacacaagaatcgcttgaacccgggaggcagaggttgcaaggaggtgagatcacaccactgyactccagcctgggcaatagagtgaggctctgccttaaaacaaagaaaaatgattttgggggatgatggggtgtcactatgttgaccaggcttgtctcaaactccttgcctcaagcaatccacccacctcagcctcccaagtagctggaactacaggcgcatgccaccacgcctggctaatatgtgtgtgtgtgtgtgtgtgtgtgtgtgtgtgtgtgtgtgtgtgtgtgtagaaacaaggtcttactgtgttgtttaagctgctctcaaactcctgggctcaagtgatcctcccacctcggcctcccaaagcattggaattacaggtgtgagccacctcactgagccctccacctttcagctgaacgcagaaaagtacaatcttttaacccaaagcgttcctcacactta

SEQ ID NO: 667807 - DNA, 1277 bp, Homo sapiens
ccctacttagtaccgagtgaagccacttaccctctaagtgccttacttttcttttcttttcttttttcttttttcgagacagagtctcgctctgtcacccaggctggagtgcagtggcatgatcttggctcactgcaaacttcgccttccaggttcaagcaattctcctgcctcagcctcccaagtagctgggattacaggcgcccaccaccatgccgggctaatatttgtatttttgatagagatggggtttcaccatattgcccaggctggtctcgaactcctgacctcaagtgatctgtctgcctcggcctcccaaagtactaggattagaggcatgagccaccacacctggccacttttcttatctatatttgttatgtggatgacttgtgttaacgcaaataagatgctgctcgtcatctttaaagaaaataggtggcaacctgttatagcaagtcctgtttttatttgtacttatgaggctttaattaaacgctaagaattaaaatgcacataataatagactttacctcacaaactggcttcaattattcgatgagacttacatgtattacttaaatgaggttaaatttaaccttttaaaaatgatttattgtggctgggcacagtggctcacacctgtaatcccagcactttgggaggccaaggcagacggatcacttgaggccaggagttgaagaccagcctgaccaacacggcaaaaccccatctccgctaaaaatacaaaaattagccaggcatggtggtgcacacctgtaatcctagctactcaggaggctgagacacaagaatcgcttgaacccgggaggcagaggttgcaaggaggtgagatcacaccactgcactccagcctgggcaatagagtgaggctctgccttaaaacaaagaaaaatgattttgggggatgatggggtgtcactatgttgaccaggcttgtctcaaactccttgcctcaagcaatccacccacctcagcctcccaagtagctggaactacaggcgcatgccaccacgcctggctaatrtgtgtgtgtgtgtgtgtgtgtgtgtgtgtgtgtgtgtgtgtgtgtgtgtagaaacaaggtcttactgtgttgtttaagctgctctcaaactcctgggctcaagtgatcctcccacctcggcctcccaaagcattggaattacaggtgtgagccacctcactgagccctccacctttcagctgaacgcagaaaagtacaatcttttaacccaaagcgttcctcacactta

SEQ ID NO: 667808 - DNA, 606 bp, Homo sapiens
agaaagtgttggcaatggaagaggtctattttagataaggtcattagggaagatctttccaagtaagtggcattttatctgaaatctgagtgcaatgcagtgcacctgcagtgatctcaaaaaggaggttcaaagaaggaaaacagcaattaccaaggctgtgaggtggggatgatgtgacaatttataataaattaaggtccccagcttttccccttctcatgactcccaaggaaccctaaaaaggataaatctacatggttcagtgttagtgaaaattctttttttaaaaatttttgctggttcaacttcttcctccttgatacacacacacacacacayacacacacacacacactcattctcctaaagataatatcatctctgctagatccattctttgagatttgtgatacagcactgaaagactgagaagaaagagagaattaaagtagcaggactaaaaatgggcatgtttagccagggaggcatcattgaaagttgcaaactcaaagttctacaggaactagggctaacatatatgagtgatgcaggatgggtataaagcaatgaaggatcatggttcccactgtggcataccccatc

SEQ ID NO: 667809 - DNA, 1494 bp, Homo sapiens
caggcttccctgccaaggtctgctcacaatctcctctggccatgctcatttcgttatggaaaatagggtgaacatgagtaatgggaaatgcagttagctgttggggcgagatgggcccagtgatttcctcctgtaccatggaaagctctacatggtgactacaatggtttcaaaccagtgcagagagatacctggggagtgaatcattctgttgttggcatatttatttatctcattatatctatttatctacctttaatctaattttaggtaaatagaaatgagttgatcttggaagactgggattttaacttttaaaatttcttgataagatgtttacaataggcatatcatctactgtacaactcttaaacaataatataaaactgcataagatacatgaacttaagcgtctttagtttttttgagttctattcctgacttggcaactaatgaattagccactcattggggtgtaactttccttaccagtaraatggggctcataatgtctaccttgagagcagataggatggagagtgatgcctgatgcatagaaggtactcagtaagtgttaatccttgcctttgcccaatttcccacctaggagaatttttgtaccttgaccttataaaattccctgatgaggaatctatcccagtagcagtacctttttcccaactgaaggtattactttggtctacatggagtctacatggtaaaagccaattggtcctgtggcacagagaaaagaggagttgattatctgtaaggagtaatgggttctcatatacagtctatgtaccaggaagtgcttcataaaataaacattggtttattggaaggagacagaattactgggaacccagaggagcaggtgttgaaaacaggtaggaaccaatgggactttggaggactaggcagaaggaggaacctggccagatctctgccactctgaatatatttgagaatcattttctctagatttagaattaggcaagaagtatccaattggttgagcctgtcacgtgtctatgccttggctgcttgagcttgggaaaggaagattcttcccaattatgcttctatagcatactcatactccaagataaggagaggctggaatgttggataaccatccccaacccccaatgacagtcatccactaagctctgcattaattagctgtgtgaccatggataaatcatttcatatttttgaccctcagtttattcatgtgtagcatgagaggtctcaaacacaccagcaattttcaacttttattttttaaacaattgcttactttcataaaatgaagttttatttagatacccaagatgtaaaacatgaaaaatgtagacccactataactgggggagttcttgagggtggaaagagagaaccctgctcagccttcctattctgccccctccccagattcccttgcctttgctactggctttcccagccttggaagctactggggtacgttaa

SEQ ID NO: 667810 - DNA, 629 bp, Homo sapiens
tgagcccaggaggtcaaggctgcagtgagcagtgatcacaccactgcactctagcctgggtgacagagcaacaccctgtctcaatttttgaaaaatgaaaaagaataattattttatcccattgttctcaactttaaaatcactgatgcttgagtcttgtcttggagcaatccatccatctgtggggtgaaccctgggaattagtayttttagaggcactcttctagcgttactatggctaaatgtttccaccagtctggctaaaacttctcatttcatggatggaaaaagtgagactcaaagaggctaagtgactttcataaaagcagacttgcagggacaaagccagcacctaaggttttataaatactagtccagtgctcttgttcagacaccacattccttctcatcttgtttcctcagatttatagccaaaaacaatgggaccatcagggacccaccttaggaccctcatagcgagtggtcctccagctcagcccatgtgcatccagctgaaaggctttcatacctctgccctgcataggtcttgttcagagaagtgggtgcactgtggcagaaacaattctctactaacccatttggaacaataaagaaataaatcctaatcc

SEQ ID NO: 667811 - DNA, 629 bp, Homo sapiens
tgagcccaggaggtcaaggctgcagtgagcagtgatcacaccactgcactctagcctgggtgacagagcaacaccctgtctcaatttttgaaaaatgaaaaagaataattattttatcccattgttctcaactttaaaatcactgatgcttgagtcttgtcttggagcaatccatccatctgtggggtgaaccctgggaattagtatttttagaggcactcttctagcgttactatggctaaatgtttccaccagtctggctaaaacttctcatttcatggatggaaaaagtgagactcaaagaggctaagtgactttcataaaagcagacttgcagggacaaagccagcacctaaggttttataaatastagtccagtgctcttgttcagacaccacattccttctcatcttgtttcctcagatttatagccaaaaacaatgggaccatcagggacccaccttaggaccctcatagcgagtggtcctccagctcagcccatgtgcatccagctgaaaggctttcatacctctgccctgcataggtcttgttcagagaagtgggtgcactgtggcagaaacaattctctactaacccatttggaacaataaagaaataaatcctaatcc

SEQ ID NO: 667812 - DNA, 655 bp, Homo sapiens
tcttttaaatatgtcatatgacrgtttataattattgtgaatactttaaaaagctggtggtgaatacgttacaggtggatcacacctgtaatcccagcactttgggaggctgaggcaggtggatcacttgaggtcgagtttgagaccagtctggccaacatggtgaaaccccatctctactaaaataccaaaattagccaggtgtggtatccttcgcctataatcccagctactggagaggctgaggcaggagaattgcttgtacctgggagccggaggtagcagtgagctgagattgcgccactgtactgcagcctggggacagagtgagactccatctccaaaaaaaaaaaaaaaaaaaaaaaaagccatgctgcttaaaagatgtaattttcagaaaaattgtgctacaactaggatgtgatatttaattatttgagacatgttctataatcacaatcaccactgattagtagtcaaccatgttgaagttatagtacctgtgaggaaatagccttaaacacagaatcacataaatatcagagccatactgggaaatacctttattaattagaaaatgtttgccattctggcttctaaagaaatccaactattcttgagttgcaactgtaacatacccttaagtaaaaatcag

SEQ ID NO: 667813 - DNA, 1418 bp, Homo sapiens
tagagatagtcattggagagagagaaaaaaatgaaggccatatgacactacttaagcccttgccctcaggcatgtctgaagctagttctacttctcagctttcagttatgaaaaaacaaattaggctgggtgtggtggctcacgcctgtaatcccagcactttgggaggccgaggtgggtggatcacaaggtcaggaattcaagaccagcctgaccaatatagtgaaacatgtctccactaaaaatacacacattagctgggcatggtggcgtgcaactgtagtcccagctactcgggaggctgagacaggagaattgcttaaatgcgggaggtagaggttgcagtgagccaagatcaagccactgcgctccagcctgggtgacagagtgagactccatctcaaaaaaaaaaaaaaaaaaaaaaaagaaagaaagaaaaaacaaaatacgtttaggtagtttattgttgttttgcttaagttacttggagctgggtttctgtcagttgcaatcaaaaagtcctgatgactaatacactgaatttaatcaaatttccctatagctttatggagacacagagtcctaatgttggcatttgcttcatcaaaagccacagcaccaagtgtaacaagtgaatgtatttcactttaaaaggtaaatgaraaatttgctctatgttcctagaaatctctgcagagcacgccagtctaaagttgcccttcttaacctttttcatgttgaggcacacatagaacattacacaagtgtgtaaggtacaatggaatgggcaaattggcccaaggactaagcctccctctgaagcccctgccccccaacccaagagctgaagagatcaatatccaggcacctgtaccacccatgaaccagttgggagtgtcacatctagaataaggtaaaggtgggaggtcagggaagctgtttcaagggacagtcctcaaatgagtcctctcataacaagatgggtgacctgcctcatctgatggtacattcctcatcctccacataccatttgggaacaaagtgcttctaagtgattcgaagcttttcagaatcagcctgccaaaacccagctgtttctgcatagtcaggctttctggagtgtgtggctctggatttgtgggaaggaccccagctctgctgaaactgctcttgctctctacagcagacccagattttcagccaagaaacaagagggcagaaggtcaggggactgggggcggaaggaggagtatccatagagctgagccaaaagaatgccattatttaagatatgattgaagagtctctccaagactggccaaaagaggaattcgatttgaactctgggggcttaagaatgctgagcacccagtttgtagattcttctgttgacctactggggccaaacaaggatggaa

SEQ ID NO: 667814 - DNA, 658 bp, Homo sapiens
actttaaacatttcttgatttttctgaccccatcaggtattttttggaaactggtattaggcttgtagaaatggacaaggagctctaccatgcttgaagatggtttaagccttcagcaaaataattgagagcttcctcttctgaatattccgaatacacaggtctatcagttagtgtatcatgttatgtgtagatgtgtgttggggtgatcagatccaacaccaggtcgtgggggtgacaaaggccggcaattcaaaggaatgagaaaaagacagtttgagagagaaagtgggaccagggggccatcgcgagtgtggaggctgtgaaggccccaagttctgggagcccatgttatttatkggtgctcaaacaggtggtgaggatgtcgagtgaatgagaaacatatggctgtttgacataatgggagtactagaagcaagaagccagcaagtctagcagacatgcaagccctgcctcagcttctctcccaacactcagcttttctccaacagatgtgtatgaataaggcttattaataacaaagcctggctccacaggtgagagggaagatgtaacttaatctactggaagtcaccaacatagccctctaaaatgagtcattattttgactcaaaaatgaacagattaaaaaatgttt

SEQ ID NO: 667815 - DNA, 613 bp, Homo sapiens
ccagttatctgactccaaaaggctatactctttccactcgattatgaagcttttctaatgccacaaatttgggccttgtcccaaaacactcagtattgggtaaaggagtctttatcttttttttagaatttgtacttcaagagaagttttcatgctcaatcaattaagtcttttatccatcttttataaygtgattaccagttggatgccagagggcctgggaaagtggtctaaagctctggtctcagacactaacaactttgtatactactactctggactcaaaaacaatgtactttggtaattacactaaggaactgagaagatttggcaagctcaaagttccacctactttctttgagaaggtgataggaaaatacactttataaaatactttattatttgttttggcaactgaaagtaactgaatcactcagcaggaatgaggtttatcaaaacactaagtagtaaaggaaaaattatacaataagattccttttctctggcctccatagacagaagtgaagagggagtagtccatcagctccacaaacatagataaaaccacccattccctggcctccacaatgaagaggtaccccagaacttgctg

SEQ ID NO: 667816 - DNA, 1462 bp, Homo sapiens
ctcatcggccctgtccagtgagagtcgggcaccaaaggactgtttggacatgctgtttgttacctataaactcctgcctccctccactcaaccctgaaaaagattcttcccaagcaaaggaccctggtgrgtggtggcttgactcgcatttaattttacatataataaataaagtgaatatggtgccagaataaaactcacacaatgtctggggccacaggattctggtaattttgcttctgggcctctcctcccactctgaccaagttctaggtcatgccatccctgggcaggctcttggagctccatcccagcctccaccagctgctgctccagcggccttgatgcccccaacagttcaagtggcctcttgcctcagcctgtctgaattgggtttgtttaaggaaattaagaaccagacttggtttaactcaggctggttccaactcgttattaccccacagtcttaagcttcaagccagcctgaacaaattcctgcaagccgccgtggggagagagccaccccctcctgtaaaaacagccctgtcacacttcatggcaggtgcatgctaggcagagatctgtatttgattattcatattctcttttggttttgcttgataggatttagaatgatctgagggaaggaaaggaatgtgtcaagagaagagaggtgacgggcggatgcgggctaagggggggacactttaacagaggggaaagaggtagctccttcctcacttttgacagagttagggatctcagtggagcaggctacaaaatacaaatcatatcattcctgtgagaaaacggcaagtttgtcctcacattaggaagtcatagtaacaagaaatgttcacactaacaagtactgagtactaagtacttaatctgtgtgccaggaactgcaccatttcccacgaattatccgctctctttgccctcattgtacatatgagaagacagagaggttatgcagtgtgcgcaagaccactcagtgaacgggcggctgagatgggtctccagcctgcatctgtctgaagctcccggctcttagcagctctgcagagacgcagccgggaagaagccagaacagactgcagtcagcggttctcagccctggagatgcagtcacatcagctggggagcctttaaaacagcactgggcccaggcgcctcccggagagcctgactgaatggaactgggctgcggcctgggcatcggtttgtttctaaagctccccaggtgaatctgatgtgcagtcagggctgtgaaccatggctggatgggttggagctgaaagtaagtcctgaggtgacctgggcagaggtaagactctgagactagggagcctgggagaaggaagacaagaatcacaatttctttcttcttccttccttttaatgataagtgacactgcattcaagataaacttgaagaactttaaataccaagtttccc

SEQ ID NO: 667817 - DNA, 1462 bp, Homo sapiens
ctcatcggccctgtccagtgagagtcgggcaccaaaggactgtttggacatgctgtttgttacctataaactcctgcctccctccactcaaccctgaaaaagattcttcccaagcaaaggaccctggtgggtggtggcttgactcgcatttaattttacatataataaataaagtgaatatggtgccagaataaaactcacacaatgtctggggccacaggattctggtaattttgcttctgggcctctcctcccactctgaccaagttctaggtcatgccatccctgggcaggctcttggagctccatcccagcctccaccagctgctgctccagcggccttgaygcccccaacagttcaagtggcctcttgcctcagcctgtctgaattgggtttgtttaaggaaattaagaaccagacttggtttaactcaggctggttccaactcgttattaccccacagtcttaagcttcaagccagcctgaacaaattcctgcaagccgccgtggggagagagccaccccctcctgtaaaaacagccctgtcacacttcatggcaggtgcatgctaggcagagatctgtatttgattattcatattctcttttggttttgcttgataggatttagaatgatctgagggaaggaaaggaatgtgtcaagagaagagaggtgacgggcggatgcgggctaagggggggacactttaacagaggggaaagaggtagctccttcctcacttttgacagagttagggatctcagtggagcaggctacaaaatacaaatcatatcattcctgtgagaaaacggcaagtttgtcctcacattaggaagtcatagtaacaagaaatgttcacactaacaagtactgagtactaagtacttaatctgtgtgccaggaactgcaccatttcccacgaattatccgctctctttgccctcattgtacatatgagaagacagagaggttatgcagtgtgcgcaagaccactcagtgaacgggcggctgagatgggtctccagcctgcatctgtctgaagctcccggctcttagcagctctgcagagacgcagccgggaagaagccagaacagactgcagtcagcggttctcagccctggagatgcagtcacatcagctggggagcctttaaaacagcactgggcccaggcgcctcccggagagcctgactgaatggaactgggctgcggcctgggcatcggtttgtttctaaagctccccaggtgaatctgatgtgcagtcagggctgtgaaccatggctggatgggttggagctgaaagtaagtcctgaggtgacctgggcagaggtaagactctgagactagggagcctgggagaaggaagacaagaatcacaatttctttcttcttccttccttttaatgataagtgacactgcattcaagataaacttgaagaactttaaataccaagtttccc

SEQ ID NO: 667818 - DNA, 1462 bp, Homo sapiens
ctcatcggccctgtccagtgagagtcgggcaccaaaggactgtttggacatgctgtttgttacctataaactcctgcctccctccactcaaccctgaaaaagattcttcccaagcaaaggaccctggtgggtggtggcttgactcgcatttaattttacatataataaataaagtgaatatggtgccagaataaaactcacacaatgtctggggccacaggattctggtaattttgcttctgggcctctcctcccactctgaccaagttctaggtcatgccatccctgggcaggctcttggagctccatcccagcctccaccagctgctgctccagcggccttgatgcccccaacagttcaagtggcctcttgcctcagcctgtctgaattgggtttgtttaaggaaattaagaaccagacttggtttaactcaggctggttccaactcgttattaccccacagtcttaagcttcaagccagcctgaacaaattcctgcaagccgccgtggggagagagccaccccctcctgtaaaaacagccctgtcacacttcatggcaggtgcatgctaggcagagatctgtatttgattattcatattctcttttggttttgcttgataggatttagaatgatctgagggaaggaaaggaatgtgtcaagagaagagaggtgacgggcggatgcgggctaagggggggacactttaacagaggggaaagaggtagctccttcctcacttttgacagagttagggatctcagtggagcaggctacaaaatacaaatcatatcattcctgtgagaaaacggcaagtttgtcctcacattaggaagtcatagtaacaagaaatgttcacactaacaagtactgagtactaagtacttaatctgtgtgccaggaactgcaccatttcccacgaattatccgctctctttgccctcattgtacatatgagaagacagagaggttatgcagtgtgcgcaagaccactcagtgaacgggcggctgagatgggtctccagcctgcatctgtctgaagctcccggctcttagcagctctgcagagacgcagccgggaagaagccagaacagactgcagtcagcggttctcagccctggagaygcagtcacatcagctggggagcctttaaaacagcactgggcccaggcgcctcccggagagcctgactgaatggaactgggctgcggcctgggcatcggtttgtttctaaagctccccaggtgaatctgatgtgcagtcagggctgtgaaccatggctggatgggttggagctgaaagtaagtcctgaggtgacctgggcagaggtaagactctgagactagggagcctgggagaaggaagacaagaatcacaatttctttcttcttccttccttttaatgataagtgacactgcattcaagataaacttgaagaactttaaataccaagtttccc

SEQ ID NO: 667819 - DNA, 638 bp, Homo sapiens
ccatatgcatttcatgggaggggtgattaggaaaaaaatatctaagtgatacctagaattcacctaacaacaacccctaagaggttaagactattttgatcactttatagatgaggaaactgattcttggatagattaaaagcatgcactcaagttcacccaactgcaagtctgggagcagggactrtaagctccaaagtaccatatggttccaaaaggtttttttcataaaaaccttagtaggtgcttaggctcactcattgctgctggaataccttgctcacagagtgttaagcaaaactgggagctgagtgttcttccaacttcctgtcaggaggatttccaacatgccaagggtcccagatccccccactggaaacatatctgagacctcccgttatgtcattaagtgtcctcctatgaggacctgaggtgatgaggcccagaggaactagaccaatataacaaagcaccaaagggagattgaaaggaaaacaagacagaaatgaaagaacgcaaccatcaggcttcctaacacaggtgtctgggcccatgaaggataatgaatcccagatctgccctgatgcactgcatgacctggacaagttacttgacctctctgagcctcagttccctca

SEQ ID NO: 667820 - DNA, 637 bp, Homo sapiens
ttcatatgtgtaaaagaaaacaaaagtaggcatcagtttcttggctgactcacattagagtgcagtgcctggggaaatcacaaactcagtgtacatcatttcaacactccacgtctttctacatcaacagccctgcaccgtggacattcatcttcacaggatgatgacagggcactgcaaaatcctgaatcatcrgagaaagagttgatgctgtgcattctactctatttcctggaggtggggtgtggactaagatgtcttagaatgatctttaacaccaagagcaaaaatgcaaaatggttttgggtcaacctttattaatgtgaaaatgaaattgatcatagtcaatcattccctacacattctgatcggttgagattttattatgttattcttaaaggttagagctgagtctctttatgtaaaggtgtattgactgagtcctttcttagaatcacgagtaatagaattcacttagatggaccattagggaacttcttgggacaagactgtaaatcttcttttatcactcacactttggtgcttaatacatcaattcagcaaagatatactgagtacctgctgtgtgccaggcactgttctaggaactggggatacagcagtggacagacagaca

SEQ ID NO: 667821 - DNA, 637 bp, Homo sapiens
ttcatatgtgtaaaagaaaacaaaagtaggcatcagtttcttggctgactcacattagagtgcagtgcctggggaaatcacaaactcagtgtacatcatttcaacactccacgtctttctacatcaacagccctgcaccgtggacattcatcttcacaggatgatgacagggcactgcaaaatcctgaatcatcagagaaagagttgatgctgtgcattctactctatttcctggaggtggggtgtggactaagaygtcttagaatgatctttaacaccaagagcaaaaatgcaaaatggttttgggtcaacctttattaatgtgaaaatgaaattgatcatagtcaatcattccctacacattctgatcggttgagattttattatgttattcttaaaggttagagctgagtctctttatgtaaaggtgtattgactgagtcctttcttagaatcacgagtaatagaattcacttagatggaccattagggaacttcttgggacaagactgtaaatcttcttttatcactcacactttggtgcttaatacatcaattcagcaaagatatactgagtacctgctgtgtgccaggcactgttctaggaactggggatacagcagtggacagacagaca

SEQ ID NO: 667822 - DNA, 637 bp, Homo sapiens
ttcatatgtgtaaaagaaaacaaaagtaggcatcagtttcttggctgactcacattagagtgcagtgcctggggaaatcacaaactcagtgtacatcatttcaacactccacgtctttctacatcaacagccctgcaccgtggacattcatcttcacaggatgatgacagggcactgcaaaatcctgaatcatcagagaaagagttgatgctgtgcattctactctatttcctggaggtggggtgtggactaagatgtcttagaatgatctttaacaccaagagcaaaaatgcaaaatggttttgggtcaacctttattaatgtgaaaatgaaattgatcatagtcaatcattccctacacattctgatcggttgagattttattatgttattcttaaaggttagagctgagtctctttatgtaaaggwgtattgactgagtcctttcttagaatcacgagtaatagaattcacttagatggaccattagggaacttcttgggacaagactgtaaatcttcttttatcactcacactttggtgcttaatacatcaattcagcaaagatatactgagtacctgctgtgtgccaggcactgttctaggaactggggatacagcagtggacagacagaca

SEQ ID NO: 667823 - DNA, 608 bp, Homo sapiens
tgctttgcccttcgagcaagacttgggyaagggctcctcgagctttctggtgcggaggcttcctgggtcggcccgaggcctgtaggttcccggccacttcttgcagcttggctgcgagggagcgcttctccgggaccactttggctcgataaactaaaacccgcggggtgttcgtcggaaggatcctgggaggcaaggctcagacccgccctcccgactcgcggtgaaatccaaggccgcgccgcgcgctccccacggggcacggagccgcgcgctgctctcggcgcgccccgggaacgcgccgcagcggccttggaggggctgcagttcctcttctcactgttcttgggaagtctttccttttccgtaaacctaatttaggaatccaaaggcaccgaagcccgttaatgtcgcttttaaagtgtctaccagaaagagctggagggaggctgtggacaggaatctccggccatgttcgggagtagacagatgcccttgtgctgagaagcgggtctcccttctcccattctctcctgccgccaacggtggctgccaggctgtgccctccgcttggcaccctgccccgccgtctcggctctgctctcgac

SEQ ID NO: 667824 - DNA, 608 bp, Homo sapiens
tgctttgcccttcgagcaagacttgggtaagggctcctcgagctttctggtgcggaggcttcctgggtcggcccgaggcctgyaggttcccggccacttcttgcagcttggctgcgagggagcgcttctccgggaccactttggctcgataaactaaaacccgcggggtgttcgtcggaaggatcctgggaggcaaggctcagacccgccctcccgactcgcggtgaaatccaaggccgcgccgcgcgctccccacggggcacggagccgcgcgctgctctcggcgcgccccgggaacgcgccgcagcggccttggaggggctgcagttcctcttctcactgttcttgggaagtctttccttttccgtaaacctaatttaggaatccaaaggcaccgaagcccgttaatgtcgcttttaaagtgtctaccagaaagagctggagggaggctgtggacaggaatctccggccatgttcgggagtagacagatgcccttgtgctgagaagcgggtctcccttctcccattctctcctgccgccaacggtggctgccaggctgtgccctccgcttggcaccctgccccgccgtctcggctctgctctcgac

SEQ ID NO: 667825 - DNA, 608 bp, Homo sapiens
tgctttgcccttcgagcaagacttgggtaagggctcctcgagctttctggtgcggaggcttcctgggtcggcccgaggcctgtaggttcccggccacttcttgcagcttggctgcgagggagcgcttctccgggaccactttggctcgataaactaaaacccgcggggtgttcgtcggaaggatcctgggaggcaaggctcagacccgccctcccgactcgcggtgaaatccaaggccgcgccgcgcgctccccacggggcacggagccgcgcgctgctctcggcgcgccccgggaacgcgccgcagcggccttggaggggctgcagttcctcttctcactgttcttgggaagtctttccttttccgtaaacctaatttaggaatccaaaggcaccgaagcccgttamtgtcgcttttaaagtgtctaccagaaagagctggagggaggctgtggacaggaatctccggccatgttcgggagtagacagatgcccttgtgctgagaagcgggtctcccttctcccattctctcctgccgccaacggtggctgccaggctgtgccctccgcttggcaccctgccccgccgtctcggctctgctctcgac

SEQ ID NO: 667826 - DNA, 608 bp, Homo sapiens
tgctttgcccttcgagcaagacttgggtaagggctcctcgagctttctggtgcggaggcttcctgggtcggcccgaggcctgtaggttcccggccacttcttgcagcttggctgcgagggagcgcttctccgggaccactttggctcgataaactaaaacccgcggggtgttcgtcggaaggatcctgggaggcaaggctcagacccgccctcccgactcgcggtgaaatccaaggccgcgccgcgcgctccccacggggcacggagccgcgcgctgctctcggcgcgccccgggaacgcgccgcagcggccttggaggggctgcagttcctcttctcactgttcttgggaagtctttccttttccgtaaacctaatttaggaatccaaaggcaccgaagcccgttaatgtcgcttttaaagtgtctaccagaaagagctggagggaggctgtggacaggaatctccggccatgttcgggagtagacagatgcccttgtgctgagaagcgggtctcccttctcccattctctyctgccgccaacggtggctgccaggctgtgccctccgcttggcaccctgccccgccgtctcggctctgctctcgac

SEQ ID NO: 667827 - DNA, 599 bp, Homo sapiens
aagagtataaaccataattatgaataatattatgacaattattatcattattaacggttaccatttattgtcttttggatgtcggagactgtatatatattaaatagttttattcatcacacaactctacaaggtaagttctagtatccccaatgtacgggtaagacaactgaagttcagagagactaagtaactgagtcacagactttccacagctagcaagagasggagcgaggattcacactctgttatgtctgatttcatgttcttttgaatgtgttgcttatcatggctagttattgtatttttacattatagtatgaggatatattgaatgtaagggtgatctatctggagcatatattgccctgttgattaataagattgattcatacaagtaaattatattatcacttaacacaaacttgttttacaaaatacctttcttgaccaccagagttgatttacataagaacattttagatattatattccttatttaccaagatcacgatattaagcaaagtataccaatctgcattagatcagtttataagtcacatacgcaaacaattgattcctttaatttataattatat

SEQ ID NO: 667828 - DNA, 603 bp, Homo sapiens
gtttcttaagatgagatggaaaggacatacttcctccttatctaggtacagatgttactcacttgtgtaagactgagatattaattaaatttgagcatgctaggtagagcaaaggccaagaagatacctcacagatagccataaattacccctagaatctgagctagaatctgaggttagaaattttgtctgttttgttctctgatatatcccacgcacttaaaacagtatgatacctacaccaggcactcaatgaatttttattgactaagtggtcagtttaacaaagtctaaagtcttaactttatcagcacatctaaagtttatccacgtcttaggggttcacttcagcaattcaagagagagtggtatcaaagaagaatgatcatttattaattttgaagagaaaaatcatcgtaggaataatcaaatgtgcaacattaacataaataactttgtggtctagctaagtacaaagctaagtcatacccagcaagaaattttaaaatttacaatgagaaatataactttcctaggaatcacaatgktaatgtgtgtcagaagagcaaattaaacccctgtaaaaatcaaatgggaaacaac

SEQ ID NO: 667829 - DNA, 1164 bp, Homo sapiens
tggatcactggaattcacgaaggtgttccaggtggtctggggacaagcccaaaatgcaagttactcacacgcaacaacatatttttataaatgtattttccactgcaaagctgatcctgtgctggaaagcatgaaaatgagctttttaaaaaaatctaaccacaataatgattacagagccaagcaataacaccacaaaattgtactgaagcctttgtgatatgaaggaaaggaatacacttgagtaggtggtcctcagggccttatgccctaaggggtctgggaaactgtcccagggcagtggaaccagcagaattttctcaacgtctcttgcaggtgaatatttatcttagagaatggctcacattttccaaagtttggggcttcttgttattctattcttaatatatacttctacatgaattaaacattgattatataatactcgaagtttatcttttgaaatctctctaaactcaggagtaaacagaagtaaaatgtttttagttaggggagccacacacttatgtaaacataatccttattcgggatcacgcatttatttatcatgtacacagtcaagctaaatttgaagctgattttcagaggaagcctatggcacagtggtggtatttaataatggtacctattactatttagtggacattttggagtgcgggatggaagctgcaatgttctatcatatcaaggtaagttcatgccagattgctttttatttggatatattttgagttaagtagaagsgggaatgatggagaaacctgtgggatttgtactctatagcaaatataatgctactagctttataggaattatcttatttacttctcacaataaatctgtaagatagatattactgatggcagcaatggcccatctggaggggccactgtgaagactctggctgcagcaggggaggtgcagtagggaccacatgctccacggagctggcaggggccaggaacaggtgggagccctgtccttttctgagttggcagggcaggagccccaccctcccaggtgcagttgcagctgcccagccacagctgtggacctggacattcctgcactctcaagggcctgggaacaccctttgcccctgcaggcttgaaggtgtctgctcctgctgcctggcctctctga

SEQ ID NO: 667830 - DNA, 966 bp, Homo sapiens
attacattgttggatgcaattactaggatgttgaggattttagaatcaatatttgttagatatttgtctgtagtttccttgtaatgtcttctgttttggcattagggtaatgctggcctcaaagtatgagttaggaagcatttcttatgcttctgtcttctggaagagattagagaatttgtaaaatttttttcttaaaagtttggtagaattctccagtgaactcatctggtactggtgctttctayagaatattatttatttattcaatttatataatataggcctattcagattatctagttcttctactgtgagttttggctaattgtgtttttcaataaattggtcaatttcgtctatgttatcaaatttgagggaatagagttgctcatagtatcatcttttgaatgaacatggaatttgaagtgatcgctcttctttcgtgcctaatactagtaatttgtgtctcctctcttcttagccttgcttagtgatttaattaaacttttttttaaaaacctgcatttggttttattgatttttggtttttaatttcataatatcagctctaatccatcatatctaatttaattaatcaatttcaatgtaaaaactttacagcagttttaagttcatagaaaaattgaaaggaaggtaaaaagattttccatttgccctcctggccccaggcatgcatagcctctcccaatatcaaatccccaaccagaatactacatttgttacaattcatgaacctgtattaacacattgtaatcacccaagatatttttatagatggaaattttttaaaaaaatatagctctgataatgattaacactgaatgaaatcacatcgattttatctggtttttgttgtttttaagtttttctctatcaaaactatacctgattattctaaaattcaaattgtacaaaaagtgtaaggtgaacattacaacttaa

SEQ ID NO: 667831 - DNA, 966 bp, Homo sapiens
attacattgttggatgcaattactaggatgttgaggattttagaatcaatatttgttagatatttgtctgtagtttccttgtaatgtcttctgttttggcattagggtaatgctggcctcaaagtatgagttaggaagcatttcttatgcttctgtcttctggaagagattagagaatttgtaaaatttttttcttaaaagtttggtagaattctccagtgaactcatctggtactggtgctttctacagaatattatttatttattcaatttatataatataggcctattcagattatctagttcttctactgtgagttttggctaattgtgtttttcaataaattggtcaatttcgtctatgttatcaaatttgagggaatagagttgctcatagtatcatcttttgaatgaacatggaatttgaagtgatcgctcttctttcgtgcctaatactagtaatttgtgtctcctctcttcttagccttgcttagtgatttaattaaacttttttttaaaaacctgcwtttggttttattgatttttggtttttaatttcataatatcagctctaatccatcatatctaatttaattaatcaatttcaatgtaaaaactttacagcagttttaagttcatagaaaaattgaaaggaaggtaaaaagattttccatttgccctcctggccccaggcatgcatagcctctcccaatatcaaatccccaaccagaatactacatttgttacaattcatgaacctgtattaacacattgtaatcacccaagatatttttatagatggaaattttttaaaaaaatatagctctgataatgattaacactgaatgaaatcacatcgattttatctggtttttgttgtttttaagtttttctctatcaaaactatacctgattattctaaaattcaaattgtacaaaaagtgtaaggtgaacattacaacttaa

SEQ ID NO: 667832 - DNA, 1472 bp, Homo sapiens
aaagaataatgatgggacagatatctccagaaggttgttaacaccgcaaaacatttcctcaagaaatctgcagtttgatcattcacagctcactagaacttcagatcttatgataatacaggctgcctattaatttagtaataaaagcaaatctcctgcaaatcttaatcttggaccatcttttcatcatcactgtgccttctcagtaaatgggccatttagttatttgcccactcccttgtgtcttcaacacagttgaatacaaatccagtcaccaattctattagcatgacagaatcagaatcagcatttcaacatttatttgtacgatcaaagccttaaattggaagaactgcaggttccatatgaaactaatatccccttgaaggagctgctggaaagatctgatccaattataacagaagtcaaatccccaggttttcacagtagctaggttgtcattcagatagaggagccaaatacaaccctcttgccttggcaataccatcacttggatgcctgtcatttgctttgagacaggatggactattgaacttcttgaagattttgggactgcacttacaaaatagttttagtagcacttatgagtattgggactacaaaaatgattctgtatttaaaactggaaagcaattttatttaactgtgaacaacgcatattccagatgttttttataatgttgaataagtcacgcaaacataaaggcagtctatatatttaccagtcttattcattattattttgaatgcaatgggaaagtgaaaaatcattactcatcacagaccagtcagtcatttgcaatgattcccaatgatgggaggaatgagagaatgcctttctggagagcagattgtatgtcattagctggagtgggcaggggaaatgtgtatacacacacacacacacacacacatatatacacacacacacacattttatataaattctgtaacattttctgttgatgggactatgcataaaacaaagtgaaaagtaattgttggtttcaaaccattaagaaacattgtgtgaagattcagatattgcatttagacataggtgcaccgttttccagtttcagttctttcactgtcctaatttttatttgtagaaatatacttttccttgtgggttctcctctgtgaccaaaactaattgttacttttctatctttggatgtaaattatgtgccctaatttctctacttttctttattgttattatactttaagttctggggtacatgtgcagaacgtgcaggtttgytacataggtatacatgtaccatggtggtttgctgcacccatcaacctgtcatctatattatatatttcttctaatgctatccctccccaagtcccccatctcctgacaggccccagtgtgtgatgccccccgccactccgtgtccatgtgttctcattgttcaactcccacttatgagtgagaa

SEQ ID NO: 667833 - DNA, 1795 bp, Homo sapiens
gatgagcattttaaaaaaaatcctttcggacaaattcttaagaacaaagctcctattaaaagattctttattctaaaataaatatcagaagggaaagttcatattgaaattattagaatacttcataaagcaaaagaagaaaaagatgctgagggaagagagagccctcaaaaataccctctgagccattttagtgagttttctaaacatattgtaccaaccttagttatccatcctctccagcctcaggctggggcaacttctgaggatggtggaacatgtcctgttactcctcggggctcttgttctctgccaatgggaccctggtaacttaatggagagaatgcactgccgttggggatgtgtctcatgcccctgtaacatcaaagaaggtcttctcaggcactgtcaaagcttgttttcctgctctatttttagtagcagtcaatatatagaatctgaacatttaggcctattggggcttcatggcctgtcatcataactagtaatgacaacagaactcagtgaggatctgtatctctgctctttcaggttgagacttgcccatctcatattcctgtcgtgttgtacagtcttagtcctctctatgaaaagcaggtccctgagaaacactaaagttgtaccttaaaatctgtcaagacgctttcatgtttctctccccctttctggcaactcctttcacctttgaaggatcccggcgattcagaatttctttgaaaagcaggaatttcttgaaagtaaggttcaactcaagatgaagaagtgaaaataagtactgtcaaaagcgattatcaagggtttcacacccagaacagaaagtaagcaggtaccaatgcctacagacgctgatggatttacagcatttacagtagacggttaatgaggtcatccagagtcaaagagcaaaatcttgccgttattacctcggggtccttaagcaggccctcagccataactgtgagtaccatgtcttctcaggtacatatgttccaattatctccatagcctttaagcgagtagcttcaacaagtccattctataacactgttccctaagcaggacagagcattctgaaccagcccctgtccctaagtttccctctgcacatcagcagaaaaatattactgatttgagctgctctgttcttatggaaggcacggcttcctctggttctctatgttatttgtgcccaaacacaacccagcaaatgatactacacgactttgctcctgtcttagttcagaatgggcatggcccttgggccaagatgagatgggaggcacattttcaggtctagagtctgtgatggcctctcacatctctgaatgtgccttgcttattctgtccttcctttttcaaacaccatgaacytccctctttccaagcaccagctccaggcccattcatgtggtctctttgagaggatgctgtgcccacccctactctcctgcctctgctagtgatacatgtcaaggacttccaggtacctagatgggctccctggaccttaagttcctcatattcatcttcatagccatgtaatgtttctctcccaccagatccccacctccagcagccatggtcaacctcctgggactcttccccagaagtagattccccatagaattgctcctaaattgatgtgagagacaatagaaagaagcagttctatatcctcatgactcttgctcatttatgctttcctcaatggcatatgatgcactgggctcactgtaacaaaggaaaaaaaaaaaaaagaactaaatcagttaac

SEQ ID NO: 667834 - DNA, 1795 bp, Homo sapiens
gatgagcattttaaaaaaaatcctttcggacaaattcttaagaacaaagctcctattaaaagattctttattctaaaataaatatcagaagggaaagttcatattgaaattattagaatacttcataaagcaaaagaagaaaaagatgctgagggaagagagagccctcaaaaataccctctgagccattttagtgagttttctaaacatattgtaccaaccttagttatccatcctctccagcctcaggctggggcaacttctgaggatggtggaacatgtcctgttactcctcggggctcttgttctctgccaatgggaccctggtaacttaatggagagaatgcactgccgttggggatgtgtctcatgcccctgtaacatcaaagaaggtcttctcaggcactgtcaaagcttgttttcctgctctatttttagtagcagtcaatatatagaatctgaacatttaggcctattggggcttcatggcctgtcatcataactagtaatgacaacagaactcagtgaggatctgtatctctgctctttcaggttgagacttgcccatctcatattcctgtcgtgttgtacagtcttagtcctctctatgaaaagcaggtccctgagaaacactaaagttgtaccttaaaatctgtcaagacgctttcatgtttctctccccctttctggcaactcctttcacctttgaaggatcccggcgattcagaatttctttgaaaagcaggaatttcttgaaagtaaggttcaactcaagatgaagaagtgaaaataagtactgtcaaaagcgattatcaagggtttcacacccagaacagaaagtaagcaggtaccaatgcctacagacgctgatggatttacagcatttacagtagacggttaatgaggtcatccagagtcaaagagcaaaatcttgccgttattacctcggggtccttaagcaggccctcagccataactgtgagtaccatgtcttctcaggtacatatgttccaattatctccatagcctttaagcgagtagcttcaacaagtccattctataacactgttccctaagcaggacagagcattctgaaccagcccctgtccctaagtttccctctgcacatcagcagaaaaatattactgatttgagctgctctgttcttatggaaggcacggcttcctctggttctctatgttatttgtgcccaaacacaacccagcaaatgatactacacgactttgctcctgtcttagttcagaatgggcatggcccttgggccaagatgagatgggaggcacattttcaggtctagagtctgtgatggcctctcacatctctgaatgtgccttgcttattctgtccttcctttttcaaacaccatgaacttccctctttccaagcaccagctccaggcccattcatgtggtctctttgagaggatgctgtgcccacccctactctcctgcctctgctagtgatacatgtcaaggacttccaggtacctagatgggctccctggaccttaagttcctcatattcatcttcatagccatgtaatgtttctctcccaccagatccccacctccagcagccatggtcaacctcytgggactcttccccagaagtagattccccatagaattgctcctaaattgatgtgagagacaatagaaagaagcagttctatatcctcatgactcttgctcatttatgctttcctcaatggcatatgatgcactgggctcactgtaacaaaggaaaaaaaaaaaaaagaactaaatcagttaac

SEQ ID NO: 667835 - DNA, 1795 bp, Homo sapiens
gatgagcattttaaaaaaaatcctttcggacaaattcttaagaacaaagctcctattaaaagattctttattctaaaataaatatcagaagggaaagttcatattgaaattattagaatacttcataaagcaaaagaagaaaaagatgctgagggaagagagagccctcaaaaataccctctgagccattttagtgagttttctaaacatattgtaccaaccttagttatccatcctctccagcctcaggctggggcaacttctgaggatggtggaacatgtcctgttactcctcggggctcttgttctctgccaatgggaccctggtaacttaatggagagaatgcactgccgttggggatgtgtctcatgcccctgtaacatcaaagaaggtcttctcaggcactgtcaaagcttgttttcctgctctatttttagtagcagtcaatatatagaatctgaacatttaggcctattggggcttcatggcctgtcatcataactagtaatgacaacagaactcagtgaggatctgtatctctgctctttcaggttgagacttgcccatctcatattcctgtcgtgttgtacagtcttagtcctctctatgaaaagcaggtccctgagaaacactaaagttgtaccttaaaatctgtcaagacgctttcatgtttctctccccctttctggcaactcctttcacctttgaaggatcccggcgattcagaatttctttgaaaagcaggaatttcttgaaagtaaggttcaactcaagatgaagaagtgaaaataagtactgtcaaaagcgattatcaagggtttcacacccagaacagaaagtaagcaggtaccaatgcctacagacgctgatggatttacagcatttacagtagacggttaatgaggtcatccagagtcaaagagcaaaatcttgccgttattacctcggggtccttaagcaggccctcagccataactgtgagtaccatgtcttctcaggtacatatgttccaattatctccatagcctttaagcgagtagcttcaacaagtccattctataacactgttccctaagcaggacagagcattctgaaccagcccctgtccctaagtttccctctgcacatcagcagaaaaatattactgatttgagctgctctgttcttatggaaggcacggcttcctctggttctctatgttatttgtgcccaaacacaacccagcaaatgatactacacgactttgctcctgtcttagttcagaatgggcatggcccttgggccaagatgagatgggaggcacattttcaggtctagagtctgtgatggcctctcacatctctgaatgtgccttgcttattctgtccttcctttttcaaacaccatgaacttccctctttccaagcaccagctccaggcccattcatgtggtctctttgagaggatgctgtgcccacccctactctcctgcctctgctagtgatacatgtcaaggacttccaggtacctagatgggctccctggaccttaagttcctcatattcatcttcatagccatgtaatgtttctctcccaccagatccccacctccagcagccatggtcaacctcctgggactcttccccagaagtagattccccatagaattgctcctaaattgatgtgagagacaatagaaagaagcagttctatatcctcatgactcytgctcatttatgctttcctcaatggcatatgatgcactgggctcactgtaacaaaggaaaaaaaaaaaaaagaactaaatcagttaac

SEQ ID NO: 667836 - DNA, 1856 bp, Homo sapiens
attttactgtgttcctaagtcctatttcccatctctaagtattttcccttatgaaaccgaacagtttgatggcctctttgatattaacctgtgacattttcagaaaaaaaaaattcctcattccatttttactgccttaaggagatacaatccaattttactttttgccttcctaacaatacacagagaaatcttaaaagttctatcaagaaaatgtttactgcatatttccaattcaaatgsaaatagctttcacttttgatcttgtaggaaaagctagctaagtgatgaagtacaatactttctttgtgttacactaggctgcatgactgttacagaatatgtttgagcatttgagctaagagaccagaagaggctttccagccacatgtttaaaagaacaggcagcagaaaacggcttaagtcaattataaccttcctttcagaaccatcttgtgggacggatactactattatccagatacttgtatctaacagtcagccaattctcctcttaactggctatgtttttgaaatccacttactcttgagactgaccataaaatcaacacactgacaaagcaacagttttaaattccaaacatgcacaaaacccagaactgtaattacctcaactctaagcccagtgggaaactgaagcatgtcgcctcctgtgttttattcagtgctggggaccttgtcagtccttcacgaatgctaaataaatcctcagaacaacaatcctccaatctaagggccagtgagacagggagagatttatcctgaaaggcaatgcacatcctagactccatgctcactttgtgataagttttgccattttagccaggggccactcagagaaggaaatcaggaccaccaccccatgtgaacatggtccaccgaagaacggctggctcatacaagctgcaggcatggggtgcttattctaagcacaaactgagacacagctcactgaaatttcagttggttagataattgaagtcttatacatttaaagcccagttctaaggagaatattgaagaaaagttagttttttgttttttgtttttttggctttttgtttgttttatttggtttttgtttttttgttttttttttgagacagtcttgcactatcctctgggctggagtacaatggcgtgatctcggctcactgcaacctccgcctcccgggttcaagcgattctcctgcctccgcctcccaagtagctggaattacaggtgcctgccaccacgcctggctaattttttgtatttttagtagagacggggtttcactgtgttagccaggatggtctcgatctcctgatcttgtgatccacctgccttggccacccaaagtgctgggattacaggcgtgagccactgcgcccggccaaaaagttagtttttaataaccctctaccacctcagaaagaagaacttctttaacattgactcaaacagatagattgtttttaataggtctttatactagggatgttcattattaccattattattattagcaagacccaaggatccactctgttacccaggcttgagtgcagtggcatgatctcagctcacagagacattattttgaatgttctgaagcatactggatgttattgagaataaaaatcctgtcaaatccgtacagcaataatcaaacaagccagtgggactttttgtaactgaataatgtcaggtaagtgattattcacagagatgtattttatgaatttttttcaacaaataacaaataagtatcaattttctaccattcactgagcactatgctaaaggcactatgtatcctatgggaaacaaaagagaaaaaatggctcctatt

SEQ ID NO: 667837 - DNA, 1856 bp, Homo sapiens
attttactgtgttcctaagtcctatttcccatctctaagtattttcccttatgaaaccgaacagtttgatggcctctttgatattaacctgtgacattttcagaaaaaaaaaattcctcattccatttttactgccttaaggagatacaatccaattttactttttgccttcctaacaatacacagagaaatcttaaaagttctatcaagaaaatgtttactgcatatttccaattcaaatggaaatagctttcacttttgatcttgtaggaaaagctagctaagtgatgaagtacaatactttctttgtgttacactaggctgcatgactgttacagaatatgtttgagcatttgagctaagagaccagaagaggctttccagccacatgtttaaaagaacaggcagcagaaaacggcttaagtcaattataaccttcctttcagaaccatcttgtgggacggatactactattatccagatacttgtatctaacagtcagccaattctcctcttaactggctatgtttttgaaatccacttactcttgagactgaccataaaatcaacacactgacaaagcaacagttttaaattccaaacatgcacaaaacccagaactgtaattacctcaactctaagcccagtgggaaastgaagcatgtcgcctcctgtgttttattcagtgctggggaccttgtcagtccttcacgaatgctaaataaatcctcagaacaacaatcctccaatctaagggccagtgagacagggagagatttatcctgaaaggcaatgcacatcctagactccatgctcactttgtgataagttttgccattttagccaggggccactcagagaaggaaatcaggaccaccaccccatgtgaacatggtccaccgaagaacggctggctcatacaagctgcaggcatggggtgcttattctaagcacaaactgagacacagctcactgaaatttcagttggttagataattgaagtcttatacatttaaagcccagttctaaggagaatattgaagaaaagttagttttttgttttttgtttttttggctttttgtttgttttatttggtttttgtttttttgttttttttttgagacagtcttgcactatcctctgggctggagtacaatggcgtgatctcggctcactgcaacctccgcctcccgggttcaagcgattctcctgcctccgcctcccaagtagctggaattacaggtgcctgccaccacgcctggctaattttttgtatttttagtagagacggggtttcactgtgttagccaggatggtctcgatctcctgatcttgtgatccacctgccttggccacccaaagtgctgggattacaggcgtgagccactgcgcccggccaaaaagttagtttttaataaccctctaccacctcagaaagaagaacttctttaacattgactcaaacagatagattgtttttaataggtctttatactagggatgttcattattaccattattattattagcaagacccaaggatccactctgttacccaggcttgagtgcagtggcatgatctcagctcacagagacattattttgaatgttctgaagcatactggatgttattgagaataaaaatcctgtcaaatccgtacagcaataatcaaacaagccagtgggactttttgtaactgaataatgtcaggtaagtgattattcacagagatgtattttatgaatttttttcaacaaataacaaataagtatcaattttctaccattcactgagcactatgctaaaggcactatgtatcctatgggaaacaaaagagaaaaaatggctcctatt

SEQ ID NO: 667838 - DNA, 770 bp, Homo sapiens
taaatctgattctccttccatcccccatagataggtgacccatcttcaggctctgctgaaggctacctgtctattggcacaggcggtgttatcacaatccaactggatctcaacgcaactgcctttgaaatctcttccaaagaagatacsggaacttgtgggtctctgccatgacatgcaggatataacagtgagtgcagtgggtagatgcctttcaataagtatcagtgaaggagctttccttgcaatgaacattcacttccatttgtgaaagatgagttgaaggacttctctctggctaaccaggccgggcaaccaaatttactttcataaggttgcaataaaggttggtaaggtagggttaggaaagaaggatgtaggtggaaaagaaaagcagccaagaggcagtctattctagagtcccaattgggaatctgggcaatatttcctcttacttaacaataattcctatactactctagcacatctgccttctccaaactgcagtccaaagaagagccatcttgaccctttacatctaatagctttcttttcccccacatttcaatctccttctttccaccattatccagaggtagaaagatttggctccctgaccccagccacaatccttcctcttctgtctgcattcccttagcttaaactactgtagtagaatcttcttaatctggcttcaatctcatatcttgctaaaaagtcaagaaatccctacttcccgccttggggcactacaccacagggcacagtct

SEQ ID NO: 667839 - DNA, 2819 bp, Homo sapiens
cagtctcagtgcccagacttacacaggaattaaactcaacactgctgaaaagcactgctacttgaagccaaaaatagccctcatgcctctagtgaggtacagaaaccaacccttcaggctcccactgtccctccccacggacattctctgatttctttcaaactgttatctccttttcctaaaagtagggtatatttcctgactatgcagaatcccaagccatgtgcctgcaaagcacacctgtgattcagaggtacctctgttctgaaaaggaatgccccaaaccatatgggaaagcaaagcaaaggaagaatttgcagccttttattttatcttactttattattttattattatttttgggaaaatggcagatgagtcacttgacccactgtgaagaagcaagataaagaatgaattgtttctctgacaattacccatggctcaagtaatcactaggcccagatataacccttgagctgtgccgctttggtttgctctgagtaaataaatataatctaaaacacttagagcttacatattccaaaattgtccgcctcttggatttgccattactcttattattctgaagtgtacatatatttctgtttcaaacaatggtaatgatatacatttttgaattgaaggaagcctccataacctgctgtttctttttgtggtgcattcatctgtaaatatactttaaaaactataaaacactatacaaatataagctatttgactgcacatggtatgcatatttttatttttatgcacaaccacaataataataaaaggattctcaacttgcctgcatgctagccatagcaataatatttcaccaaactcacacctcagcaaggttcattgcatccttgtgaatttgcagactagacctggtgaaccctttcctatctgacagacgtcacaacccattcacccgagttgccatatgtggctccagctaagagtatcaccacacaatcatacatttttacaatgggtctataaaacaaccattataataaatgtctgcttaattaattcattaggacataaagcaatttattatgctcttatttgctatcattctccctgctcaaatttaataatgcaagaagctttctctgatgccaaaccctagaaataataaaaatacattcatcatggatattgaacgcagacacgcctggcagtactgctggcagagaggaggcagtcagatgtggaaaaagaaactaggggatgttttgcacaagcctggctagaatcgagtctctacgagaaaggaaggagtctagtacaatgcttggcatggcaacaacgaaggtgcacagaataactattattacaatatgcaacaaaaggaggagggagaaggagagttggggtgaaaagctttcacgtcagttaaattcatgagggctatggaggctcaaattgaaattatctcactctgtgctgataaataaagtagctctggtacctaaatcatgacactaactatacatttcgatttttttaagtagtgattaggtggatactctggggaacctaccagcctttgcagagataacagactcaacttaatatcaacttaaaaagagacttgaattctaaccaatctcatgtaatgaattgaaattctatagctttcagaaggggggaaagataaaaaagcgacacggctccattctctaacttgctgtcaggaaatataatttgtgctctcggtgattcacctagctcatatgcagcatgcaaatttatttccctaataatcagacctggagattgcccaagaggattaatagcatcattccttatgaccgccaggatattatgcacctctgacatggaaaaattgtgttagttctacagagaaaacgcaaggatatttgtcctgctagacaatataataggctggtgcatcatcagattacaatgtcatttcaaaaaccttgaatacaaataatgtacagtgagggaaatgttggaacaacctcccttaattcagtagccttgaattcacaagtatttttgtgtgtgctatgtagtgtatgcatagtttttttttaagctttccaacgttgcatgcaaaaaggcaagcacattacacattccatgagctcttgtcattgttttttggaaaatggatgaaaaagacatgagaaaagggctctttctatggttttggcttatttttgtcctgcctgtatacagctaaaggtagtgttcagaaacagaactttcacaggtacacgttgattggggtttatacatggggtgtgcttgttggcatgtacacagatagaggtatcttaagaatttccctccacttatgtctttattcaaacatagagtcattcgtaccttcaattgttcgatatttgatgctcaaagtaaaacaatatgtttcacaagcattgtttgggactatattttattttacttctttatgttttacaatcaatcggtcaggaatgttccaaaacagtaatgtctccagctgtactttagaccaaagaacgctgccttgagacaagaccaaatttcattattatgcgcatgggagcaataagattagctcctactgctgcccctaaggtggagcagcaggaagaaccaatgagatgatgctaatgtgcatgttaatrgtattctgctagaagaagttgggataattaaacatgtaccatctctttaagacagagctgcacacattttcttcggatgggtgtttacaagaattccaatttcaggtcatagccatttctgagattgcttaagaaagagatgggaataacttatcttattca

SEQ ID NO: 667840 - DNA, 2819 bp, Homo sapiens
cagtctcagtgcccagacttacacaggaattaaactcaacactgctgaaaagcactgctacttgaagccaaaaatagccctcatgcctctagtgaggtacagaaaccaacccttcaggctcccactgtccctccccacggacattctctgatttctttcaaactgttatctccttttcctaaaagtagggtatatttcctgactatgcagaatcccaagccatgtgcctgcaaagcacacctgtgattcagaggtacctctgttctgaaaaggaatgccccaaaccatatgggaaagcaaagcaaaggaagaatttgcagccttttattttatcttactttattattttattattatttttgggaaaatggcagatgagtcacttgacccactgtgaagaagcaagataaagaatgaattgtttctctgacaattacccatggctcaagtaatcactaggcccagatataacccttgagctgtgccgctttggtttgctctgagtaaataaatataatctaaaacacttagagcttacatattccaaaattgtccgcctcttggatttgccattactcttattattctgaagtgtacatatatttctgtttcaaacaatggtaatgatatacatttttgaattgaaggaagcctccataacctgctgtttctttttgtggtgcattcatctgtaaatatactttaaaaactataaaacactatacaaatataagctatttgactgcacatggtatgcatatttttatttttatgcacaaccacaataataataaaaggattctcaacttgcctgcatgctagccatagcaataatatttcaccaaactcacacctcagcaaggttcattgcatccttgtgaatttgcagactagacctggtgaaccctttcctatctgacagacgtcacaacccattcacccgagttgccatatgtggctccagctaagagtatcaccacacaatcatacatttttacaatgggtctataaaacaaccattataataaatgtctgcttaattaattcattaggacataaagcaatttattatgctcttatttgctatcattctccctgctcaaatttaataatgcaagaagctttctctgatgccaaaccctagaaataataaaaatacattcatcatggatattgaacgcagacacgcctggcagtactgctggcagagaggaggcagtcagatgtggaaaaagaaactaggggatgttttgcacaagcctggctagaatcgagtctctacgagaaaggaaggagtctagtacaatgcttggcatggcaacaacgaaggtgcacagaataactattattacaatatgcaacaaaaggaggagggagaaggagagttggggtgaaaagctttcacgtcagttaaattcatgagggctatggaggctcaaattgaaattatctcactctgtgctgataaataaagtagctctggtacctaaatcatgacactaactatacatttcgatttttttaagtagtgattaggtggatactctggggaacctaccagcctttgcagagataacagactcaacttaatatcaacttaaaaagagacttgaattctaaccaatctcatgtaatgaattgaaattctatagctttcagaaggggggaaagataaaaaagcgacacggctccattctctaacttgctgtcaggaaatataatttgtgctctcggtgattcacctagctcatatgcagcatgcaaatttatttccctaataatcagacctggagattgcccaagaggattaatagcatcattccttatgaccgccaggatattatgcacctctgacatggaaaaattgtgttagttctacagagaaaacgcaaggatatttgtcctgctagacaatataataggctggtgcatcatcagattacaatgtcatttcaaaaaccttgaatacaaataatgtacagtgagggaaatgttggaacaacctcccttaattcagtagccttgaattcacaagtatttttgtgtgtgctatgtagtgtatgcatagtttttttttaagctttccaacgttgcatgcaaaaaggcaagcacattacacattccatgagctcttgtcattgttttttggaaaatggatgaaaaagacatgagaaaagggctctttctatggttttggcttatttttgtcctgcctgtatacagctaaaggtagtgttcagaaacagaactttcacaggtacacgttgattggggtttatacatggggtgtgcttgttggcatgtacacagatagaggtatcttaagaatttccctccacttatgtctttattcaaacatagagtcattcgtaccttcaattgttcgatatttgatgctcaaagtaaaacaatatgtttcacaagcattgtttgggactatattttattttacttctttatgttttacaatcaatcggtcaggaatgttccaaaacagtaatgtctccagctgtactttagaccaaagaacgctgccttgagacaagaccaaatttcattattatgcgcatgggagcaataagattagctcctactgctgcccctaaggtggagcagcaggaagaaccaatgagatgatgctaatgtgcatgttaatagtattctgctagaagaagttgggataattaaacatgtaccatctctttaagacagagctgcamacattttcttcggatgggtgtttacaagaattccaatttcaggtcatagccatttctgagattgcttaagaaagagatgggaataacttatcttattca

SEQ ID NO: 667841 - DNA, 683 bp, Homo sapiens
tagttttaaatggggatgaactgagctatcctgagaacaactctgttgttagtattaacagcttcacagttatttggcttgaggtgtaattattttaccattattacatgcaaggcttttaacaaagcagtcgttccctccatttaagcagagagttttataatttattacatctctttggtcatcaacacactwtacaaacagttggccaccagtgaccaattacattaaggttaagcaacataactttaaattagaaataagctaatgtatcttcatcaagggcctgctgtgttttcactgctgtttatgagatgatactaaatgtggatatagagcacgctcactgggaccaattcctttcggcctcaaaatgggaaagtctcgagtgtacccaggtccaaagctaattaatgggataacatctgctttaagcattcagctggagtaatttctatcaacttcccagcgaaggtccatgggaaactgtcagagaactaagtatctatcatgagccatattaatctgtgacaggactgcaaaaggcacattgcagtcttggttttctatttatttggggtgctgctattaccaatatgagtttcctccccttattgctttcttcagtgcatgaataattgtggggtccataagcaaataacccatgatatacacatagacca

SEQ ID NO: 667842 - DNA, 646 bp, Homo sapiens
cacctacttatttctttttgtttatatatttattgatttattttgcaggggagtgagagaaagagctaattttaattaagagcgcaagaggatgtatttccacatgtatgttcttttaaagtaagcccctgaattattagtatgcttcctatacagttatacaatcaagcaaacagcaccaggcctatgcttcatcaatagaaagggaaggaaaaaaatacattgtttttactggttgagctgaaatttatgctgatgtcactttttcataataatgaacccaataaatggcatacataaaatatgatcctgaggcaacaattacaataatgatcatttacctttacctgaaaatggttgtggtcaaaggccaaatatcatctcacaatgagtataggggaatacacggtctaaaatcccaaattctcctaaaaaggagtcattmcgagttatgaaaatgaaattgagaggagaataagggtattttttaaaaatcttaacacttatagaggaaaaaaattcagcattttccttaggtatttaataattctatggaatgtttaatattgctaaattgaaattgtggctttccccaagattatggaataatcttgtagcctactaataagttgtgttggttaattgc

SEQ ID NO: 667843 - DNA, 2528 bp, Homo sapiens
gcacaagtgtttgaaaatctgaaaactgctcatttctctaaataagcaagccttcatgccaaactcctcaccaagaacaaatgagccactgacatcagcctataaaaaagtggtttccaaaccatttgcttttgtagacatgaatttacttgaaaaagtgatgtgtggaataggattccttctggctataagcagggtaagtgctgtgatagcccacaatgaccacaggggtcccagtggaggctctaaggggcacattttatcaactaatgttacaaagaaatctttgagcacattaggcttctaaatgtggtggcaatggaaatgaagcagagagcaattcacaccctcaactcaccatgaccaagaggctttgactaactgtggcttcagatcatgtgtccacgtgtctggcatactcatccaccatagttggagttcaaaatggcttgtggcacaagtcaaattcaagagttatcccaaagaacctagatctatgccttagctgaattcttttttaatattattgttactgaaacatcaggggtttggcctgggtcctcctgctctccacacagaaagccagtcactgagacaatgaggattgccaggaaagaaggttttcatcaggtgctgcagccaaggagatgggagatcagtctcaaatttgtctccctgcagaggaacattgggggtttatatatgaaagaaggaatgtaactacatgtgggtaagcaggaatttgagaggggtaaggaaatcatgggggatgaggggtctagcttcttgtctggatatgatgatctggtgagttccagttccttgatactgtctgggagacctgagggttggtttcctgaggaaaaaactcagacaagacaaatgtaagtttcaatttatatgtttatttttaaaagactgtaaacatcagttctatgggacaattgagctggtttcattatgctcttgtttttgtcaactgtctatataagaaacaactttataagaaaaactctaatttttgtaaaatttctggcaaagattctgaaaattatatagttcaatatgagttatacaaaaaccctcaaggagacttccttttggtgctcttgaggaactgaaatgcttattcacataagattatgagattaggtaacctacaatgatctcctagaaaccttgactgctagaaagtttttatattttctagtataagtattgtcctatgtcactctgcttatctatttgcccttttcttagagattttaagactcttcaaacaatttcggagataattaagatatgggtaaaacatgtaggtaacaaataccttgatgtttacttacatatactgcttctatgaaaaacaaatagctgtagcagagaaaatttagataattttatagagatttgatggaatgtactttttaattttttggttccaagtattcaatgagagtgtagtcttaagcatttgtgaaaaccttcagtttacctttctggttcccattgttaactggaaatactctacgtttgccatgacaatcatataagcaactccactaacgtaaaggaactcttcttctgatgactttaccacatcaaaggcactggtgggttggactgatccctcagattaccatttcattgtgtgcgtcattcactgtgacaacctaagctcattttgagattcatgcattagtgtctccaaatgtgttcccattttcatattttttgatagtgggtaatggaaacactaatggctaatttccagttttaatcatcactcaaggagcacaaacagaatgtattttcaagaaaaatatttgtcatcattaatgttgtttttaaaataagtgccactaaaggcaactctaaaattgaagttttaaaagtattccaagcaaagtaaaatcactggattaagtggtcactctctcaarttgaccactttaaaatatgtcacgttcatttggatattgaacccaaagatgtttctttaagaaatctcaatgtcttagaggtaccttctatgaagaacataaattcaggaatcagatgcctaaatttttgatattcctaaatagttatgcgtgtgcatgtgtatgtgtgtgtgtgtgtgtttgaccatgcattggcatgccacacttataccactacagcagaccacacatagatttgacttgtatgtccaataaaacacaaattaaaacttgagagaaacttgtgagatgtctgcagcactttaggctggttgggactatgaagaagaaatgtgtcaattttctaagcctgtaaagcagtatattcggtgaaccctaaaatgaaaaatatttcacccttatgaaatgtcttgtgaagaactaggtttactaaaattatgttcttccacttcaccacgtccctttgaagcaaaggagcccagttgtctcttctcaccaggatgcttgctgcttatttatgttatgtttgtatcaagttttagaactttgcctagatcacaagctgctagagcaactttccttttt

SEQ ID NO: 667844 - DNA, 2528 bp, Homo sapiens
gcacaagtgtttgaaaatctgaaaactgctcatttctctaaataagcaagccttcatgccaaactcctcaccaagaacaaatgagccactgacatcagcctataaaaaagtggtttccaaaccatttgcttttgtagacatgaatttacttgaaaaagtgatgtgtggaataggattccttctggctataagcagggtaagtgctgtgatagcccacaatgaccacaggggtcccagtggaggctctaaggggcacattttatcaactaatgttacaaagaaatctttgagcacattaggcttctaaatgtggtggcaatggaaatgaagcagagagcaattcacaccctcaactcaccatgaccaagaggctttgactaactgtggcttcagatcatgtgtccacgtgtctggcatactcatccaccatagttggagttcaaaatggcttgtggcacaagtcaaattcaagagttatcccaaagaacctagatctatgccttagctgaattcttttttaatattattgttactgaaacatcaggggtttggcctgggtcctcctgctctccacacagaaagccagtcactgagacaatgaggattgccaggaaagaaggttttcatcaggtgctgcagccaaggagatgggagatcagtctcaaatttgtctccctgcagaggaacattgggggtttatatatgaaagaaggaatgtaactacatgtgggtaagcaggaatttgagaggggtaaggaaatcatgggggatgaggggtctagcttcttgtctggatatgatgatctggtgagttccagttccttgatactgtctgggagacctgagggttggtttcctgaggaaaaaactcagacaagacaaatgtaagtttcaatttatatgtttatttttaaaagactgtaaacatcagttctatgggacaattgagctggtttcattatgctcttgtttttgtcaactgtctatataagaaacaactttataagaaaaactctaatttttgtaaaatttctggcaaagattctgaaaattatatagttcaatatgagttatacaaaaaccctcaaggagacttccttttggtgctcttgaggaactgaaatgcttattcacataagattatgagattaggtaacctacaatgatctcctagaaaccttgactgctagaaagtttttatattttctagtataagtattgtcctatgtcactctgcttatctatttgcccttttcttagagattttaagactcttcaaacaatttcggagataattaagatatgggtaaaacatgtaggtaacaaataccttgatgtttacttacatatactgcttctatgaaaaacaaatagctgtagcagagaaaatttagataattttatagagatttgatggaatgtactttttaattttttggttccaagtattcaatgagagtgtagtcttaagcatttgtgaaaaccttcagtttacctttctggttcccattgttaactggaaatactctacgtttgccatgacaatcatataagcaactccactaacgtaaaggaactcttcttctgatgactttaccacatcaaaggcactggtgggttggactgatccctcagattaccatttcattgtgtgcgtcattcactgtgacaacctaagctcattttgagattcatgcattagtgtctccaaatgtgttcccattttcatattttttgatagtgggtaatggaaacactaatggctaatttccagttttaatcatcactcaaggagcacaaacagaatgtattttcaagaaaaatatttgtcatcattaatgttgtttttaaaataagtgccactaaaggcaactctaaaattgaagttttaaaagtattccaagcaaagtaaaatcactggattaagtggtcactctctcaaattgaccactttaaaatatgtcacgttcatttggatattgaacccaaagatgtttctttaagaaatctcaatgtcttagaggtacctyctatgaagaacataaattcaggaatcagatgcctaaatttttgatattcctaaatagttatgcgtgtgcatgtgtatgtgtgtgtgtgtgtgtttgaccatgcattggcatgccacacttataccactacagcagaccacacatagatttgacttgtatgtccaataaaacacaaattaaaacttgagagaaacttgtgagatgtctgcagcactttaggctggttgggactatgaagaagaaatgtgtcaattttctaagcctgtaaagcagtatattcggtgaaccctaaaatgaaaaatatttcacccttatgaaatgtcttgtgaagaactaggtttactaaaattatgttcttccacttcaccacgtccctttgaagcaaaggagcccagttgtctcttctcaccaggatgcttgctgcttatttatgttatgtttgtatcaagttttagaactttgcctagatcacaagctgctagagcaactttccttttt

SEQ ID NO: 667845 - DNA, 2528 bp, Homo sapiens
gcacaagtgtttgaaaatctgaaaactgctcatttctctaaataagcaagccttcatgccaaactcctcaccaagaacaaatgagccactgacatcagcctataaaaaagtggtttccaaaccatttgcttttgtagacatgaatttacttgaaaaagtgatgtgtggaataggattccttctggctataagcagggtaagtgctgtgatagcccacaatgaccacaggggtcccagtggaggctctaaggggcacattttatcaactaatgttacaaagaaatctttgagcacattaggcttctaaatgtggtggcaatggaaatgaagcagagagcaattcacaccctcaactcaccatgaccaagaggctttgactaactgtggcttcagatcatgtgtccacgtgtctggcatactcatccaccatagttggagttcaaaatggcttgtggcacaagtcaaattcaagagttatcccaaagaacctagatctatgccttagctgaattcttttttaatattattgttactgaaacatcaggggtttggcctgggtcctcctgctctccacacagaaagccagtcactgagacaatgaggattgccaggaaagaaggttttcatcaggtgctgcagccaaggagatgggagatcagtctcaaatttgtctccctgcagaggaacattgggggtttatatatgaaagaaggaatgtaactacatgtgggtaagcaggaatttgagaggggtaaggaaatcatgggggatgaggggtctagcttcttgtctggatatgatgatctggtgagttccagttccttgatactgtctgggagacctgagggttggtttcctgaggaaaaaactcagacaagacaaatgtaagtttcaatttatatgtttatttttaaaagactgtaaacatcagttctatgggacaattgagctggtttcattatgctcttgtttttgtcaactgtctatataagaaacaactttataagaaaaactctaatttttgtaaaatttctggcaaagattctgaaaattatatagttcaatatgagttatacaaaaaccctcaaggagacttccttttggtgctcttgaggaactgaaatgcttattcacataagattatgagattaggtaacctacaatgatctcctagaaaccttgactgctagaaagtttttatattttctagtataagtattgtcctatgtcactctgcttatctatttgcccttttcttagagattttaagactcttcaaacaatttcggagataattaagatatgggtaaaacatgtaggtaacaaataccttgatgtttacttacatatactgcttctatgaaaaacaaatagctgtagcagagaaaatttagataattttatagagatttgatggaatgtactttttaattttttggttccaagtattcaatgagagtgtagtcttaagcatttgtgaaaaccttcagtttacctttctggttcccattgttaactggaaatactctacgtttgccatgacaatcatataagcaactccactaacgtaaaggaactcttcttctgatgactttaccacatcaaaggcactggtgggttggactgatccctcagattaccatttcattgtgtgcgtcattcactgtgacaacctaagctcattttgagattcatgcattagtgtctccaaatgtgttcccattttcatattttttgatagtgggtaatggaaacactaatggctaatttccagttttaatcatcactcaaggagcacaaacagaatgtattttcaagaaaaatatttgtcatcattaatgttgtttttaaaataagtgccactaaaggcaactctaaaattgaagttttaaaagtattccaagcaaagtaaaatcactggattaagtggtcactctctcaaattgaccactttaaaatatgtcacgttcatttggatattgaacccaaagatgtttctttaagaaatctcaatgtcttagaggtaccttctatgaagaacataaattcaggaatcagatgcctaaatttttgatattcctaaatagttatgcgtgtgcatgtgtatgtgtgtgtgtgtgtgtttgaccatgcattggcatgccacrcttataccactacagcagaccacacatagatttgacttgtatgtccaataaaacacaaattaaaacttgagagaaacttgtgagatgtctgcagcactttaggctggttgggactatgaagaagaaatgtgtcaattttctaagcctgtaaagcagtatattcggtgaaccctaaaatgaaaaatatttcacccttatgaaatgtcttgtgaagaactaggtttactaaaattatgttcttccacttcaccacgtccctttgaagcaaaggagcccagttgtctcttctcaccaggatgcttgctgcttatttatgttatgtttgtatcaagttttagaactttgcctagatcacaagctgctagagcaactttccttttt

SEQ ID NO: 667846 - DNA, 662 bp, Homo sapiens
aaaagaaacattccttaaggacagctagattgtgaagctcacagggatgactctaggaaaacttgtgaggcttctgaagtttgctcctttctttctttctgcactgctctactcatattcaatgccatgcctgtacctcaactccatgtatattctgggacacacagcatccatccactcaagtgtctccactggtcatgcccttcttggcagtgccctggcaaagattctggccccatcctctgtcctgtgccatttttggaccaggctgcataacttttaataagatcgtttatactgaggtattaaagaatgattgttatttcattgattcgaaaatagttattaattgtatggaagcagaagttgcaggggaaggagcattggatcaaattaaagaaagccacarttctaaccccctcttcttgcaaccttggggaggggaggtggggcaaggaccacaaactttcttccacattgaaagccaaggaattccacgcagctaaaatgtaaggaaggaaggaaagtagaatgcatgttaaatgtatacaacacagttggggtttcattctgagatcatagagggtcccctgaaagtttggttgagaaaagttacatcatcagagttgtgatataagaaaggtatccaggagtagagtaaa

SEQ ID NO: 667847 - DNA, 603 bp, Homo sapiens
gcagagggaagaaagatttgttggaggggacagcacagctgagctgtaatttgacagtagttgaggtagagaggagagcatcccaggtgaccagactacataagcaaagaagtaaatttttggcttccagcggcaccaaccagtagaacaaccattacccagtgagcaaggtggaataggctgagagttagagaatctcaaatctggttttgggaaaaatgtaatataataagtccctggggaataaggtagggttactttttcatttgctgtcctgttaaatctgggatataatgtgaagrgatcagaaaaatttctaatgttgactttttttattaatgtgggatcttcaaatgtgaccaggcgaattcagtaattttctccagtttttctaagtgctgaatttgcgaggtgctcactgagaatctcaaaatagtgaggttgatggatttacattaattattatggttgcaggaatttaactgactcaaacctctccctaagacagaaaacttaattgacagtggaaataaaaatagaaatttacattatcactgtgaatatgaacacaattatgatatatttcaaggatctgactttcaa

SEQ ID NO: 667848 - DNA, 644 bp, Homo sapiens
attaggaaatagacttaaagtgctcccatcacattaggatgcaatgtgcatttttgtttgtagaagcttgttctccatttcttcttatttgggcaaaataagctcagtttgactaactctgccatctctaacccagaccccaccatgctctgacactttgacaagcacactggatgggcaaaagagtcaactaccgaaggaagacaattttcgtttggtctaaaactttatacctgtgatattctgtgccatgragagactcgtgcttaataattcactttccaatgatcttaggcaatgtagaagattacaaatactgtgagacctgaactcctccttcagggaacttaacagttttcagtggcgggggaaataagagtagattcctgaaaccatagcagcatccgatagaacagaacatttcctcgactctagcaaatctcttaattccaggtgtactcgggaagatagtagcatttattgggtatatactatgaagagagaagtgtcatatcctgagagggggtttataggcagtaaacattgtagtctttgccttcaaggtgtttgaaacataaaacatgctcacattagctaaatatgcctgcttcaatgcctgtacttatatcacacaaccgacgtta

SEQ ID NO: 667849 - DNA, 617 bp, Homo sapiens
ggtgttattttgtctcaagcggctagggyggagatagagcatgctatttgccacattgcattctaggggttgcaagacatcctgaaatgtgggctccatgaaagcggttcatgctgtgatctgtacccccagatctcttcccaggcaggtctcatccaccaccagaaatggtccatgttttactactgtattgatgtttttccacaaatacctgtagaaatccatattagaacacagggcgtcagtcactttcctgagcctgcattccaggacatcttgcagcctctgaaatgcagcgtggcacacagcactcaggttcctgcaatcagcatgcccacatggtcataatacagacttagcaacctggaaggaagtctcagtgatctgtgacccagccctttctcctgatagaccgtggaactgcaggcagaagatgcacggcgtctcatctcagatacacagtggtggtgccgggatggtatgtgctctccattctccctggagggctcttggtccatcttgcttcagtgactagcatgagaggagtggtgatagcagcaggtgccgtggccactgggcaggcggggtatggagaacgcagccacacggccgccact

SEQ ID NO: 667850 - DNA, 646 bp, Homo sapiens
cagaccatatgtagtggttacctctttctccctgtaaagaacttccagaatttacctaatgttaaatgacgagttaatgggtgcagaacaccaacatggcacatgtatacatatgtaacaaacctgcacattgtgcacatgtaccctaaaacttaaagtgtaataataayaaaatttaaaaaaaaaagaacttccagactaatcatggggaaaagggaaagaactaacatacgtcaggtatctatcaaaaggctgatactatacaaagcacttaacagttatttttgccatttaaacttgttaccacactgtatgttatttgaattctagagattttaaaaaataaagctgaaaaagacctatgtactgaagatcccccagctatggtgtataacagtctagatttgaaccaaaatccacccgggtctacgcccatgcattaccttttctcaattctatgttagacgaaattatcgtgtggcactggaaacatacttcatactgcaattaattgttcacattttagtttgaaagaaagcactgtcaagataatctgtaatcccttatttcagagactcataatttaataattgcaaacattgtatgaattcccttactctgaagccttctgtgtgtctcatttttg

SEQ ID NO: 667851 - DNA, 685 bp, Homo sapiens
gaatcacaggtgtgagacctgaatatcttttaggttttcagatacctattctggcctctaatataatcctaggtttaagagaagccaaactgctcactctggtactgaactattgactctttcatgaacaatgaaaatgaaacttttaatccaacttctatccacagtaacctgatcaagcacagggtaatgcttaacacagtgctagaaacagaaaatggctctggagagctgcaagtttgtttggtttcctaccccatccccatgcccccaatatccacaggatacgaacacattaactcaacctaatgatgaacaggttcctgtctgcaaatacatcccaggagtttcctttggataagaaaactctttttcagtgtctggaccagcagaattataaatcggttacaaacacggcatcttcttgctgctgctagtccagtttcgtcttagtattcatcacctagctttgtaagagctaggtgctctctcagcatgagaaaacaaaaatctgtctcagagtcaaggcaggggtaaagcagagaatacaaacttgccccacttcaaaaaacaaggcatatctttcaactaactaaacagcaatcccagcaggcgtgacaatgcaagctttcttccctattattgtttgaaacaatcacaagctatttgttcrtattaattcgtt

SEQ ID NO: 667852 - DNA, 657 bp, Homo sapiens
ttccccaggccgagtgcagtggtggctcattcttgtaatcccagcactgtcggggctggggcaggaggatcacttgagtmcaagaatttgagagcagcctgggcaacatagtgagacccatctcaaacaagcaaacaaacaaacaaataatcctcaacttgcttctacaaagctctgttactgcagagagtaagaatctaactttctcatccccaatcttattctctcagaggcagatcatggggaaatattaaagacagtcctcctttgctctagggtagaaaatcaggacacatcaaaatctcactactaggaaactttggtggggcagcgaattctctggatacttgcagtttcagataccagatttagtagggagtactcttgtgttgtgggaagagagtaaattttatattaaaaactattctaatgcacatagtcctcatttgaacactcaaataagtttagattatttctaaattggcatttacagtgcatgtaattcctagcttatcaatcattgtcctcactatgacaaatttactttccacttactgctgtttctcttagtgaccggtttttagcaataatgtatctacttaattcttgtttatataaaattgttgtcatctctaatagaattatttcacaagctag

SEQ ID NO: 667853 - DNA, 657 bp, Homo sapiens
ttccccaggccgagtgcagtggtggctcattcttgtaatcccagcactgtcggggctggggcaggaggatcacttgagtacaagaatttgagagcagcctgggcaacatagtgagacccatctcaaacaagcaaacaaacaaacaaataatcctcaacttgcttctacaaagctctgttactgcagagagtaagaatctaactttctcatccccaatcttattctctcagaggcagatcatggggaaatattaaagacagtcctcctttgctctagggtagaaaatcaggacacatcaaaatctcactactaggaaactttggtggggcagcgaattctctggatacttgcagtttcagataccagatttagtagggagtactcttgtgttgtgggaagagagtaaattttatattaaaaactattctaatgcacatagtcctcatttgaacactcaaataagtttagattatttctaaattggcatttacagtgcatgtaattcctagcttatcaatcattgtcctcactatgacaaatttactttccacttactgctgtttctcttagtgaccggtttttagcaatwatgtatctacttaattcttgtttatataaaattgttgtcatctctaatagaattatttcacaagctag

SEQ ID NO: 667854 - DNA, 1041 bp, Homo sapiens
aaaataaagaagttttttttaaaaaaaaggtatgaccaaattgacatcactgcacaacaacatggtacctgacgggactttacgtatttccagtgtcagagacatgagcctttcacctcaaggaagggaaggaagggatgctatggggcagaagggtggattttgcttgacaccttccacttacttttccagattcattgtcttcccttccctacccttgtggaaacctgaataatggcccccaaagatatccagatcacaatctctggaacctgtgaatgttaccatctatggcaagaggaagtatgaagatgtgataagggtagactatcctggattatcccatgaagccctaaatgtgatcacagtgtctttacaagagggaggcagaagaagatttgctgactgtgagaaataagcgagagaagctgtatatctgctggcactgaagataaaggaaggggccatgagccaaggaatgcaatgaatgaagctcttgactctagaataaaggcaaggaaactcattctcccttagaaacttgcaggagcatagatctgctgataccttgattttagctttctagggctcatttccaacttttggcctacagaactgtaagaggatagacttttgttgcttaagcaaccaaatttgtggtaatttgttacagcaggaatagaaaacgaatacaactccattctctgccctgaagatgctgacctgcttcgactaaattgaaggtcttttgccctcygatttctggttttgtttggcctgaaaatgtttagttggtcttatccaggattgaggtttttttgtagtagattcaaggatatattggagctggtttgtaccagcttgcaagaaccaattgtgtgcatctcttccaaacccatgttcagttgcatcctagtgatagcttgaaatcattgacagtaggaaaatttacaccaagaaaattagcaaatggtacaaatcaatacatgcacacccaagcttcctgttgaacatttacaagcactctactaaacaggttca

SEQ ID NO: 667855 - DNA, 638 bp, Homo sapiens
catgacacaagtttacctatgtgacaaatttgcacatgtacccctgagcttcaaataaaagttaaaaaaagaaaatttaaaaattagttactcgacattggacaaaatatttttcacttcacaaatgttcattgagtactaaccatattccagacaccagtctacatggtggggatacaatgattccgaagacagacaagctgcaatcacagatacagttccctgttgttgaggagtttacactttagcttctctgaacctcagtttttattgaggactggaatttttgaagactaaatgagttaattttacaggcattagcatagggtatggtacttggtaaatactctgtcagtggtggcyacctttacaattaatacgtatgaggaagcaaaatgatccttcatttatatgccaacactgggaaataagatgttccatataaatgaatttttccagaatttaatacttcattgtctaggatttatatatatatgtataacatacatatagtaagtgcacaaatcttaaataggtctatatttttatgtaagtatatacctatgtaactgccattgtagatcacaatacagaacatttccagaactccacagagattcctaaaactttctgatttt

SEQ ID NO: 667856 - DNA, 589 bp, Homo sapiens
tgagaacaggaaaaaaaaaacaaaaaaacttgaggcatgcaattgttcgaaatcttactgcctccctggtttcttctgcatttgaatttctgttgaacactgataggaggattccctttaggggacacgaggaagggaattgggaagaattcggcttccgtttagccctaggaaactacagaaggacttgaagccaaactgaattaatcaagaaactgtatgtgtgtgtgcctcaggagacttcytgaaaatcggatgagaatgttgttcttggccccaggagagaggcatagggactttgagggcatgaatttttctgttgtgttttctgggatcacatctgtacaaaatcaggtaagccaagaaagtaagcagcctcttcagccccaaattgtgtgcccccctaatctctcaggtgagtcaacacccttggggccacatgctttcataaatcaatttattccttgttctgtcccaaatttgaggacatagtcccctgttatgcattaaaggagataatttgaagcactgtaacctcatccttccagattagaaaagtgttgtaccatgggtaaatgagacaacctat

SEQ ID NO: 667857 - DNA, 639 bp, Homo sapiens
tagagttgcttttttgaggataatttggctttaactgtaggaatctttatagtcaacttgacataaagatctagggtacctctacctgggaaaatcctggttctcgctgttcacagctggsggccagcaggcaagtgatttaatctctttgagtgttcagttttctcatttacaaaattgagatgataaaacctatctcaggccgggcacagtggctcacacctgtaatcccagcactttgggaggccaaggtgggcggatcatgaggtcaggaggttgagaccagcctgaccaacatggtgaaaccccgtctctgctaaaaatacaaaaatcagccaggcgtggtggcgtgcacctgtagtccgagctactcaggaggctaaggcaggagaatcacttgaacccgggaggcggaggttgcagtgagatgagatcacaccagtgcactccagactgggtgacagagtgagactccatcttaagaaaaaaaaaaaaaacacctatctcagaggttgatccatggattaaataagtagccatatctgctacacaggaagcactcaagaagtggtatctcttgctgctatatgaatagtattaagattccagtagtcttttcactatgttccttctcatttg

SEQ ID NO: 667858 - DNA, 1348 bp, Homo sapiens
tgttcaaaatatcatcatgttaaggtaataattttcagtgtattagaaaagatttgtatagaaatatttattgtaaagcacgtgcgttttacactccatgcactaggttgtttttgtttggtctctgtgtatatatgtgtttacattcctgttgaaatctgaagaaggtggtgtgtatttaaatgttacttttagtttattcacatgaatgtgaatttctgtgtaagtatgtatctaaaattggtttagaaacaacacaatcagttttggtctggtggtgcaggatgaaatttatatacatttacatacttacaagtaagttgctttaaaattaaagtaggggataaaatgtagtgtgaattgttatgcaaaatctaagcacagcataattagcaarggatagtagaaatgcaatttgttaaaacctgaattgtaacagtcaattaatttcctcacaacgtgaaatagcaaaacaattaacaaacatcatttgtcaaaaacagtattaaggcaggttaaagaactacagatacaaaatttataaattataacattgaaaacagaatgttcagtagtgtttaaagatgttttgatatcttttacagatttttttaactgattgatttatttcaataaattttccaaaatcatgttaatactttccccttatgtatgtttggacttataacacgttttagatgtgagattttcctactctggacaaagtgagtctattggagaaagaatctattcattattaaagcaggggaaagtaagctaatatacatatatgtgtatatgtatatgtataatatatattatacatatacatatatattttccattctgcacttttaaaaaaatattgttttaaaatatatataacaaaattttccattgtaaccatttacaagtgtacaatttagtagcgttaattatatttatgatgttgtgaaaccatcaccactgtctatttctaaagcttttccatcaccccagagaaactatttttaaaataaaatctttattgagatataattaatataccataacattaacgtaaagtgtacgattcaatggcttttaacatatccacacaattgtataaccattaccatagttaattttagaacattttcatcaccccaaaagaaacctctgtatccattagcagttactcactatttcccccaaatcctctttcccctaaccctagtcactcaggaatctactttctatctctatagatttgcctgttctgggtgtttcatataaatgaaattttaaaataggtaggtttttgtgactggcttcttttttgttttcaagacctctctatgttggagca

SEQ ID NO: 667859 - DNA, 1348 bp, Homo sapiens
tgttcaaaatatcatcatgttaaggtaataattttcagtgtattagaaaagatttgtatagaaatatttattgtaaagcacgtgcgttttacactccatgcactaggttgtttttgtttggtctctgtgtatatatgtgtttacattcctgttgaaatctgaagaaggtggtgtgtatttaaatgttacttttagtttattcacatgaatgtgaatttctgtgtaagtatgtatctaaaattggtttagaaacaacacaatcagttttggtctggtggtgcaggatgaaatttatatacatttacatacttacaagtaagttgctttaaaattaaagtaggggataaaatgtagtgtgaattgttatgcaaaatctaagcacagcataattagcaagggatagtagaaatgcaatttgttaaaacctgaattgtaacagtcaattaatttcctcacaacrtgaaatagcaaaacaattaacaaacatcatttgtcaaaaacagtattaaggcaggttaaagaactacagatacaaaatttataaattataacattgaaaacagaatgttcagtagtgtttaaagatgttttgatatcttttacagatttttttaactgattgatttatttcaataaattttccaaaatcatgttaatactttccccttatgtatgtttggacttataacacgttttagatgtgagattttcctactctggacaaagtgagtctattggagaaagaatctattcattattaaagcaggggaaagtaagctaatatacatatatgtgtatatgtatatgtataatatatattatacatatacatatatattttccattctgcacttttaaaaaaatattgttttaaaatatatataacaaaattttccattgtaaccatttacaagtgtacaatttagtagcgttaattatatttatgatgttgtgaaaccatcaccactgtctatttctaaagcttttccatcaccccagagaaactatttttaaaataaaatctttattgagatataattaatataccataacattaacgtaaagtgtacgattcaatggcttttaacatatccacacaattgtataaccattaccatagttaattttagaacattttcatcaccccaaaagaaacctctgtatccattagcagttactcactatttcccccaaatcctctttcccctaaccctagtcactcaggaatctactttctatctctatagatttgcctgttctgggtgtttcatataaatgaaattttaaaataggtaggtttttgtgactggcttcttttttgttttcaagacctctctatgttggagca

SEQ ID NO: 667860 - DNA, 2670 bp, Homo sapiens
ctttctttttttcttttttttttttttgagacggagtcttggtctgttgcccaggctggagtgcaatggcatgatcttggctcactgcaacctccgtctcccgggttcaagcgattctctcacctctgcctcccgcgtagctgggactaccggtatgcgccaccacgcccagctaattttcgtatttttggtagagactgggtttcaccacgttggcctggctggtctcgaactcctgaccccaagtgatccgcctgcctcagcatcccaaagtgctggaattacaggcataagccacctcgcccagcctcctgtttctttcatctattaaaactccactcttaaactcactccttgtgtgtcctcgtccttcagtttctttggcgtgagacgataacctcaggtatttacctcagacaactctgctacttcagaagtatttactttattaaatgaatatgatttattgttttgaagtaaaatgtttaaggtatgcatgtattttttatgatttcccactttaactgatttttttattaaatgaagaaatggtctcaatcacattggctaacatggcctctatttatttaattcatctgtttttcccactttggggcatcaacagcatggagtatttggaaaactacttgtatttgtaaagagtaaaatgcagtttaacaaagaagttagtttgtcattgtatagttcaggaactctggcctggatgagagcatgagtttgaaattttgtcctcaagattttgtttttatcttaccatcaccttttatgcttaagtttatgattggccataattatcaaattgacacattatgtcatgtgaaaatctgtttaccaaacttttctattaataaacttgatgtttaattgtaatattaagagtcacagagtgctgtagattctgtttgtcatagttgtgtagcttttagagtttagggaaatctagtttttagaattgacacaatgatttttaattttagcagtgtgttgaataacctgtgatataccattcacttattaacttcacattgttgtataataagttataaattttagatcagataagaaagtaaaactggtattaatttgggaagaagaaattgcagaacttgagtgatttttccaaataatgtgtcagctgtaacttgaatgtgttatttttatccccaagggtattttgaaatatacttatgtgaatttcttatagtttattttaaccataaaactattttgatatttttataatgccatcgatgatactgtatgcatagtgagggcatgggttgtctgttcttaccaccatattcccagcactagcatggaacaaatgaataagaacggagtaaaaatgcataatctaaacttgactatgtgtgtcttcaaaataatacctttaagttattttgaaggaaaaaactatgtatccaacaaattcaaacagatacttacaaaattaagacgattgtaaatgtgtgttgtcctccttctcattgtttttcacatccaaaaatgtcctcttggagcctcttatctgagtagcttctgtggatctgatgatgctaggattttattttttcttttattttaaagttcttctgattacatcatctctttgtatagacatcattcttgacagatggcatttattaaatatggacagtagcaggcagttaaaaagacctgcatgagataggcaggaacctttcttttttctttctgactctcagaagcaataccagcattagctttatttaacttctagattaatttaaaaagaaacctctttaaattatgactcaacaggtacagggtgaagtgggggaaatgtatgtgtgttttaaagcttcccaagtgattttgacsatcagttaagtttagaaaccactgattacaattaatttccttagaatttgctcatatatttaattccaaagaggaagaaaattgaaattttaaaaaacatatgagtatttttggagatgacataactttccttttattgtgttaaaaaaagctttaagaactgtttttttctgcatttttattaattatcaagatttagtgatggtttagagagctaaaaacacctttagggtgaattcagaagatctagcagatacaatgatgaaatatgatcagcaagctttaggagaggataacaaatgtgtgattttgaaatctcttctatttgaaaccaatccagagtcttgaatttgatccagtatatagtatgctacaaatggaaagattaaactggagcaatataattagggtaagccattgcatctgcacttgtatcgcagcaactgaatttgaaaccagctgcaaaatggtgactaatctctctggcaagcccacatgagagtgtagtacaataagccagcttcagcctcatgagcacatgtttcttcaacttgcctctgagcaggtgatggtgatgatgcaatctgattatacttttgaatgtattctaaccacagtcaacagtagagtctcacaagggatttcacaaaagacttcaaaccgactgtatatttttcagagagttgagctatagacagccatggaaagtagtagttttttttttcacgttagtgactactgtactttgcagtactttataatcttaagtttaggaggctttagttttca

SEQ ID NO: 667861 - DNA, 657 bp, Homo sapiens
tttctaacactgctctcctttggacaccttattagttttcatgtaacacaaaattcttagcaagtttaattatttgttttcccactgcatacagaagctcttagagctaagcacaagcagaacaggaaaaattgtatttgatggcacaaaakgtggggagaacagaaatactgtggatgtcagtgcactaggtgttggttgtgctgctgtgttcaatggcttgtctgagaaagcacggatgttagtaaaattctttagtggcatatccatcaacagtaattgagaataaaacatgtgaaagctgtagcacttgaagagtttattttgaatatggaaagtctttttgctttatgatattacatactatgagacttcgttgcacataaaatatgctgaggaagaactctgtatttcattacataagtatggaaataacaaagtatttttagagcattcctagggtagcccaaacctaaacatagaaactatccatgaatagtttctctccagttctatggagccaaggattcactaattagccaggcagaaagggaagaaagaaagagaaagtgtatgtgtgtttgtctatgtgtgtgtttagtgtgtggtgtacatatttatgtcatgcaggaggtattgtgagatagtggtggatgg

SEQ ID NO: 667862 - DNA, 657 bp, Homo sapiens
tttctaacactgctctcctttggacaccttattagttttcatgtaacacaaaattcttagcaagtttaattatttgttttcccactgcatacagaagctcttagagctaagcacaagcagaacaggaaaaattgtatttgatggcacaaaaggtggggagaacagaaatactgtggatgtyagtgcactaggtgttggttgtgctgctgtgttcaatggcttgtctgagaaagcacggatgttagtaaaattctttagtggcatatccatcaacagtaattgagaataaaacatgtgaaagctgtagcacttgaagagtttattttgaatatggaaagtctttttgctttatgatattacatactatgagacttcgttgcacataaaatatgctgaggaagaactctgtatttcattacataagtatggaaataacaaagtatttttagagcattcctagggtagcccaaacctaaacatagaaactatccatgaatagtttctctccagttctatggagccaaggattcactaattagccaggcagaaagggaagaaagaaagagaaagtgtatgtgtgtttgtctatgtgtgtgtttagtgtgtggtgtacatatttatgtcatgcaggaggtattgtgagatagtggtggatgg

SEQ ID NO: 667863 - DNA, 657 bp, Homo sapiens
tttctaacactgctctcctttggacaccttattagttttcatgtaacacaaaattcttagcaagtttaattatttgttttcccactgcatacagaagctcttagagctaagcacaagcagaacaggaaaaattgtatttgatggcacaaaaggtggggagaacagaaatactgtggatgtcagtgcactaggtgttggttgtgctgctgtgttcaatggcttgtctgagraagcacggatgttagtaaaattctttagtggcatatccatcaacagtaattgagaataaaacatgtgaaagctgtagcacttgaagagtttattttgaatatggaaagtctttttgctttatgatattacatactatgagacttcgttgcacataaaatatgctgaggaagaactctgtatttcattacataagtatggaaataacaaagtatttttagagcattcctagggtagcccaaacctaaacatagaaactatccatgaatagtttctctccagttctatggagccaaggattcactaattagccaggcagaaagggaagaaagaaagagaaagtgtatgtgtgtttgtctatgtgtgtgtttagtgtgtggtgtacatatttatgtcatgcaggaggtattgtgagatagtggtggatgg

SEQ ID NO: 667864 - DNA, 971 bp, Homo sapiens
catctatctcccccttactgcattggcttcttgagcaagttaatctctgtgcctccatttactcattgtaaaacaaaggtaaaaataattacctactacctcatgggattcagtaaaaattaaatgagataaaatatgtaaaaagtatagagtggcttctagcataaaattgctcagaaatatgttattattatgttttcctatggaaagggcattctcaagtactaaattaactgttaataataattgaattgaattgaataatgacactatatgtatttgagtgacctttaatttccttatatcagttatacttacggttagaggagaaaccagaatgaagctattagttgtgcaattgtgcttagtggggaaacagtaacttcagctaataataatcttctacagttttgtaggctttagagatcacagatttctatgtattatgcttgacaatttgcaaagtgcttcacaactattgcatcatctatccctggcaataatcaaacaattatgtttattttctttaaaaaaataggattcaaagtggttgtcatgcaaccctagtcaaacacgattgctggttaccataagtctaataaacaaaaagggccaaaaacatatagcatcctgctctttatccctccttttctctctgcctttttcycctttccctttcttctttttgttctttttttcctttcttctatccttgcaaaatatgggctaaacttaagcatgtgtcaggtactgtgcaaagtgctggatctagagtggtgcaatgaagacatatcattgccttctctgcagatcacattttgatgggcgagtcatagcgtgtaagcaagaaaacaaatctgttacattaatgactatgtattgtgaaatgatgaagaaacaaaggcagcagtgtgatagaaagaaaatgagttgggagtgggggctacttttaggcaagatggtcacaatac

SEQ ID NO: 667865 - DNA, 651 bp, Homo sapiens
aaattgagtgcttaagactgggatggctcccttgggacagagaagcccatatggcaaattccagttgatgaaacataagcacaagccttcagggagcccagggaagggcttccagatacaggtaaaaacgtgactgatgttttgctttcccttctgcatgccaggaatgtagacactatgtctgacactccaacaatcatcttgtgaccacgaggaaaaggccaaaccaaaagaggcactgaccctgacattgttgatgtcctccagtcctgtgatgatgtcatgcccactcatttcacaagtttttggagaggaaggaagcactgtgctgtccactggtgtgtctttcccaaccctcaccaagtgcagcatctcataatagctgtttaatagattttttaaatgaaatctgcttttgagatacaacaaaaaagaaaactttaggccaatatccttgaagactatcaatgcaaaaattctcaacaaaacactrgcaaaccaaatccagcagcacgtccaaaagcttatccgcaatgatcgaataggctttatccccgggatgcaaggctgattcaacatatgcaaatcaataaatgcaatacatcacataaacagaactaaagacaaaaaccacatgattatctcatagac

SEQ ID NO: 667866 - DNA, 625 bp, Homo sapiens
tcactttattctcgttctcctcggaccttcgtagccatatcacttgtataaaatargctgagatatagtgactgtaagctgtgatctcagtatacaaaggtaagctcttttattttctgattaaagagaaaaatagtcaattaagacaacatgcatatatgacaatcatatatgatgtatttgatctcttaggtcatatgtcatcgcattacctttaaaaattgtatggtctaaatgtaaaatagttatttttcaacatttgttttaatacccttgtaactgctttttactcaagacagacatttcacttacactaagtgtgtgtgtgtgtgtgtgtgtagaaacttaggatataacacgtatgtaaattacacacacatacctgtttaaatgtaagaattcagtgataggaacagttcatctaagaagattttaatgacagggcactcttttggccaaagcagtggaatttcctaagcagcaaggttggtaatagtgctggtaggatctgtatgtgtaagctgttacacaagctgaggatcaaagtgccaatttctcaaggagaaaaacttctccgagaaatgaaagtctctgatctgtgttgtatgccctaatacaacaacag

SEQ ID NO: 667867 - DNA, 590 bp, Homo sapiens
agtattgagttggagttataatttctaatatattttttaaaatgcttttcttgtggctgggtgtggtggctcacgcctgtaatcccagtactttgggaggtcgacatgggcagatcacaaggtgaggagatcgagaccattctggctaatacggtgaaactccgtccctacgaataatacaaaaaaaaaaaaaaaaaaaattagccgggcgtggtggcaggtgcctgtagtcccagctactcaggaggctgaggcaggagaatggcatgaacccaggaggcggagcttgcagtgagccaagactgcgccactgcactccatcctggatgacagagcaaggctcygtctcataaaaagataataataaaataaaataaaataaaataaaataaaataaaataaaataaaataaaatagcttttctcttctagactcttataactaaaattggtatgacacagactttgaaaataagctttcctttttactcatttgaacatgcttgcttgtatgaaggctgctcagtgtttatgaaaaacagaaataactaaaggccctagtaacatgtagccagagaaatatatgacact

SEQ ID NO: 667868 - DNA, 1138 bp, Homo sapiens
gcctgcctgtaatcccagcaactcgggaggttgaggcaggagaactgcttgaacctgggaggcagaggttgcagtgagccaagatcacactactgcactccagcctgggtgacagagtgagactgtctcaaraaaaaaaaaaaaaaaaaaaaaattcagatctgcagacttcactccgcaaatcccaaaaccactgattcacattcctagattttaggatgggcctgaaattctattcttaacaagccttcaaattaattctcatgatatggcaagtttgggaaatactgacctaatccaaatagatttagaaaggtaagacctggtctccaaatatcaggttgccttttgaactgaaattttttttttttttttttttttgcatctccaatgatatttgcctttcctctgtggttaccaatgcttagcagagaaagtctgtttggttgagtcgaataatgtaaaccttaaaattataccggaattgcgatctcctgggctttctgaggatgggattgcttttccataattgctaattaccagattgcaattgttgattaattaatgatgtgatcagaaatcagcacttcttagcaggcatttttctgattagcatgtatttgatggttcccccaagcaacagggaaaagagtttccagaaaaaagagaagctcacaggcttgggacacccccaaaataccgtcagaatgctttctggtaggccggacagggtggaacaaaacgttgtagcagactttgaccatttagtatttatttatttcatttttatttttatttttatttttgagatggagtcttgctttgtcacccaggctggagtgcagtggcatgatctcggctcactgcagcctctgcctcctgggtttcagcaattctcttccccgagcctcccgggtagctgggattacaggtgtgcaccaccacgcctggttaatttttttttttttttttttttgtatttttagagacagggtttcaccatgttggccaggctggtctcgaactcctgacttcaggtgatccacccacctccgcctcccaaaatgctaggattataggcatgagccaccgcacctggccccatttactatttataaagaccctgagcattctagaa

SEQ ID NO: 667869 - DNA, 2257 bp, Homo sapiens
ttaacccaggaggtgaaggttgcagtgagccgagatggcaccactgcagtccaggctgggcaatagagcaagactcggtctcaaagaaaaaaaagwaagtaagtttaggacaatagccctagggaattatgctgataatggtccttttttattattacataagttaacccatttattaaaggctagtgatgtctccaatggtggagaaacatctggtctttcaattccttcagtcttctgactgtagactttgctgtgacggcagaagtggtattgtaggttcagccaccaccagctactgtcttcatgcacgaaccacagtgcccgacccccatatctcgtcttttcatcttggttttgtcacagaaagagcaattgtacttggcgtgctagccggtttcaattttcttcaccattttctggaaggaggcaccatagcggatcctgtatttaccgacaattccaactttattggtgcatttagccatgtcagtgcaaagttttgagcccgcaataatctttaaaagcgttattttatgtttcattatgaaattaacttttcattatgaaattaactaactatagcggatcctgtatttactgacaattccaactttattggtgcatttagccatgtcagcgcgaaggtttgagcccgcaatagtctttaaaagcattattttatgtttcattatgaaattaactttttaaaaattttttttgagatgtagacctgctctatccctaggctggagtgcagtggtgtgatctcagctcactacaatctctgcctcccgggttcaagcgattccccagcctcagccacctgagtagctggaattacaggagtgcaccaccacgcccagctaattttttgtattttagtagagacggggttttatcatgttggccaggatggtctcgatctcctgatctcatgacccgcctgccttggcctcccaaagtgctgggattacaggcgtgagggaccgtgcccagcccaacttttttttgtttgtttgttttgagacagagtctcactctgtcaccaggttggtatgcagtggcgtgatcttggctccctgtaacctccacctcctcggttcaagcgattctcctgcctcagcctactgagtagctgggattacaggtgtgcgccaccacgcccagctaatttttgtagttttagtagagatggggtttcaccatgtcggccaggctggtctcgatctcttgacctcatgatccatccaccttggcctcccaaagcactgggattacaggtgtgagctaccaagcccagcctttttttttttttttttctttttttgaggtgaagtctcactgtgttgcccaggctggagtgcagtggttcaatcttggctcactgcaacctccatctcccacgttcaaactgagtggggccttcaaattctggtttcaaaccaggatgattctccagttccttgagagtttataggtgtgtgagctattttcactgtttccagagcctaatagaaaccttctatttaccccaaataagcctgcacaggtcaactttaaggtcaagtgttttgcattcgttagaaatgttaggaaattggagtggtcctctcatgctgatcagaatgtgcggttacggcctgagtgtggagtgggcaagtgctgctttggggcctgacttgggtcccaacccccttctattgtgagggagttctgcgggaggaaaagtggggaacaccacctcccatagcccctgaacagcaccaactttagacctgggcaagtgagacccttccccaggcctgctcctcaggaatccctgcactttggagtgtgtttctcaaaatgttccagctttcccttctgtgcttgggacatgccagggccagcaggtaagagagtttcagttgcttccagcctttccaatatttggtgttgtcaggctttttgattttagctattcttcactgtggaaattttttcccatggaaaatctctctctctctccctcacccttctctgtctctctctttccttctctcttgctgacttctctctttctttctttctttctctctctctctccttgtctcctccccacagcagatttactgaggtatcaaaaacatggcttgggtgtggtggctcatacctgtaatcccagtactttgggaagctgaggcaggcggatcgcttgaggccaggggttcgagactagcctggccaaaatagcaagaccctgtctcaaaaaaaa

SEQ ID NO: 667870 - DNA, 2257 bp, Homo sapiens
ttaacccaggaggtgaaggttgcagtgagccgagatggcaccactgcagtccaggctgggcaatagagcaagactcggtctcaaagaaaaaaaagtaagtaagtttaggacaatagccctagggaattatgctgataatggtccttttttattattacataagttaacccatttattaaaggctagtgatgtctccaatggtggagaaacatctggtctttcaattccttcagtcttctgactgtagactttgctgtgacggcagaagtggtattgtaggttcagccaccaccagctactgtcttcatgcacgaaccacagtgcccgacccccatatctcgtcttttcatcttggttttgtcacagaaagagcaattgtacttggcgtgctagccggtttcaattttcttcaccattttctggaaggaggcaccatagcggatcctgtatttaccgacaattccaactttattggtgcatttagccatgtcagtgcaaagttttgagcccgcaataatctttaaaagcgttattttatgtttcattatgaaattaacttttcattatgaaattaacyaactatagcggatcctgtatttactgacaattccaactttattggtgcatttagccatgtcagcgcgaaggtttgagcccgcaatagtctttaaaagcattattttatgtttcattatgaaattaactttttaaaaattttttttgagatgtagacctgctctatccctaggctggagtgcagtggtgtgatctcagctcactacaatctctgcctcccgggttcaagcgattccccagcctcagccacctgagtagctggaattacaggagtgcaccaccacgcccagctaattttttgtattttagtagagacggggttttatcatgttggccaggatggtctcgatctcctgatctcatgacccgcctgccttggcctcccaaagtgctgggattacaggcgtgagggaccgtgcccagcccaacttttttttgtttgtttgttttgagacagagtctcactctgtcaccaggttggtatgcagtggcgtgatcttggctccctgtaacctccacctcctcggttcaagcgattctcctgcctcagcctactgagtagctgggattacaggtgtgcgccaccacgcccagctaatttttgtagttttagtagagatggggtttcaccatgtcggccaggctggtctcgatctcttgacctcatgatccatccaccttggcctcccaaagcactgggattacaggtgtgagctaccaagcccagcctttttttttttttttttctttttttgaggtgaagtctcactgtgttgcccaggctggagtgcagtggttcaatcttggctcactgcaacctccatctcccacgttcaaactgagtggggccttcaaattctggtttcaaaccaggatgattctccagttccttgagagtttataggtgtgtgagctattttcactgtttccagagcctaatagaaaccttctatttaccccaaataagcctgcacaggtcaactttaaggtcaagtgttttgcattcgttagaaatgttaggaaattggagtggtcctctcatgctgatcagaatgtgcggttacggcctgagtgtggagtgggcaagtgctgctttggggcctgacttgggtcccaacccccttctattgtgagggagttctgcgggaggaaaagtggggaacaccacctcccatagcccctgaacagcaccaactttagacctgggcaagtgagacccttccccaggcctgctcctcaggaatccctgcactttggagtgtgtttctcaaaatgttccagctttcccttctgtgcttgggacatgccagggccagcaggtaagagagtttcagttgcttccagcctttccaatatttggtgttgtcaggctttttgattttagctattcttcactgtggaaattttttcccatggaaaatctctctctctctccctcacccttctctgtctctctctttccttctctcttgctgacttctctctttctttctttctttctctctctctctccttgtctcctccccacagcagatttactgaggtatcaaaaacatggcttgggtgtggtggctcatacctgtaatcccagtactttgggaagctgaggcaggcggatcgcttgaggccaggggttcgagactagcctggccaaaatagcaagaccctgtctcaaaaaaaa

SEQ ID NO: 667871 - DNA, 806 bp, Homo sapiens
atgctgtagcagtttggatcccagacaaggtgactaactgaggaagcaagcaggggctaaaatcgaaactctttccccaagccagcctgtgtttactgaaaagaaaagggcctttaaaaatccaccaacactccctttagctgagcagccacttatagtcccagctactcgggagtttgaggtggaaggatcccttgagcccaggagttccagtccacctgagcaacagaacaagaccccatctctaaaacaaacaaacaaacaaaataaaaaatgccattccatccccctcacctgcagtgccttcccctatgttccagtggctgcctgtaggatgctgtaagagtttgaaacaggggccctgacctagagcgagggttagagaatccctcctaaagaaatgactttcaagttgagacctggaagctgagcatgagttaaccagttgaaaggaggaaaggaaggagagtgagccaagcagaacacagtccaaggctgcaagtcagagaagagctttgaaagaawgtgcttgtggctggggggcagtgagccaatggcagaaggaatgagtgctgtggctggagtgatgggctttttaagccacattaggaattttggactttaagtgcaatgggaagccactggataatttaaaggtgacttggcaggcacagtggctgatgcctgcaatctcagtgctttgggaggccaaagtggattgcttgggaggccgaagaggatcattcgaggttaggcatcgaagacctgcctggacaatgtgaggcctcatttctacaataaataaa

SEQ ID NO: 667872 - DNA, 634 bp, Homo sapiens
aacaaacaatcaaacaaacaaacactaccagttcctagagcagtggttcacaaacctggctgcaggtaggaatcacctgtattctcccagatcccactccagacctcttgaattagactctccagggctggggcctgaagattcctatgcttaaaaagctctttctcgtccttcctacactgaatttcctcatggttcgaggactcagaattcaaactagtacagctaatgccgcggttcagctgcatcaagagtttaacacagtgacaacttgyctctacaaaaagtcaaaaaataaggcaggaggattgcttgatctcaggaggtcaaggctgcggtgaggcgtgatggtgccattgcactcccacttgagtgacagagtgagaccctgcctcaacaaaacaaaacaaaacaaaaaaagagttgaacagatctgaaggctagtttgaaggccaactaccattttcagtgtagtctctctagggtgatgtgttggaagtgcccaacaaacaatttaaaagagaagtctgaggatgtggtccacagatttttttttgtggaaactgaccacacagaacttttgaacaaaatgccttcatttgttcctaaaatttgttattgtgtctttactata

SEQ ID NO: 667873 - DNA, 634 bp, Homo sapiens
aacaaacaatcaaacaaacaaacactaccagttcctagagcagtggttcacaaacctggctgcaggtaggaatcacctgtattctcccagatcccactccagacctcttgaattagactctccagggctggggcctgaagattcctatgcttaaaaagctctttctcgtccttcctacactgaatttcctcatggttcgaggactcagaattcaaactagtacagctaatgccgcggttcagctgcatcaagagtttaacacagtgacaacttgtctctacaaaaagtcaaaaaataaggcaggaggattgcttgatctcaggaggtcaaggctgcggtgaggcgtgatggtgccattgcactcccacttgagtgacagagtgagaccctgcctcaacaaaacaaaacaaaacaaaaaaagagttgaacagatctgaaggctagtttgaaggccaactaccattttcagtgtagtctctctagggtgatgtgttggaagtgcccaacaaacaatttaaaagagaagtytgaggatgtggtccacagatttttttttgtggaaactgaccacacagaacttttgaacaaaatgccttcatttgttcctaaaatttgttattgtgtctttactata

SEQ ID NO: 667874 - DNA, 1437 bp, Homo sapiens
tcgaaggggatatctgactttttaaaaagccagtgaattccagaagacaaaagaaaattcctgatagtcagtccttcatgttcagcaaagaacaaccaagccatttggtacaatgctccagaaaagcagacaatgaaggaaatgaaggaaaaatagcgaggcagaaagatgaatacagcactcagcatctccgtgtgggagaaaggaaagtcataaaactggagtgagatcatgaaaggtttgygaaatgttcaggggccacctcaggtaaccatcaaaagttatgtatctaatatgccacctcatccaaatgtgttttgggcaatactttcttcatagcatgatttcaggtaagaaataaacattgtggatgaagccacaggacatgtaggaagttttgagataaaaatatttgcatctccggtcttgtcatgacggacagtaacatatagtggtaagaactgaaaacctgcagtaaacaaagctcggtttctgatttttccctgagtttgatattggggcatttacagaccccttggaacctcaggatgttcttctgccaagtggctggactacctgtgctaccggatccccgtaaggattaaatgaaatactgcatatctgatgcttcacgaaatgcttgcatataattctgataaatattcttaacttttaataggtaaagcctcatgttttgggtccagatctagtagaagcatattctagcatttattgagcattaagttacagagcatttgctaagttctaggcactcccctaaactgtttttataaaattttcctttttttaagagtagttttgggttcacagcaaaataaagagaaaattatagagatttcccacacacctcctcagacacgggtagccttccctaaacgttttctgtaatatttttttcatttgaaaatcttcacaacatggagttaattttactcacatctccggaaactagatctcataatgttccaagttaccctaaaatgcttcaatctttcacaaaaatcagaaaagcatcattttcataaaggtacttatttcaatgagacctgcatcgcttaataagaaagcagtctttaatcctaataaggcaaaatcctatctaggcaattggaaaaacaaacaaacaaacaaacaaaagcccacttaatttctagccatagtctacattctttggcatgtgacacccatcaaaaatacagaactcatgtatatgaaatactgaattattccacatggatttagagtctggttgtgcataatttcttttagatttgaaatatgtagagatttaaataagtctacaatttaaagaagcaaagaaaaaaatctacattccaaagtttccaggttctgtttctgatcctcaaggatttttttttcaatgacaactcataggaaataaatgtttttcaaagg

SEQ ID NO: 667875 - DNA, 1454 bp, Homo sapiens
ttgtttgagacagagtctcacttctgtcacccaggctggagtgcagtcatgtgatctgggctcactgcaacctctgtctcctgggttcaagtgattctcctacctcagcctcccaagtagctggaattacaggtgtgtgacactattcccacttaatttttctttttgtatttttagaagcgacatggtttgaccatgttggcttggctggttttgaactcctgacctcaaatgatccacccgttttggcctcccaaagtgctgggattacaggcatgggccaccatgcctggccttcatccatcttttgaagaagtggagttgtaaatataacccagacattagctgaggtctccaggcaccagaatcctcaaggccacctcctgatgaagacaatcgcctttgtcactatttctttgatgagacttacagtcccactggaacttttgtctcagagttctgcatatagaaagagtttagtatagtggtcaagagcgtagactccacagttgagatgggtggaattcaaactcagctccagcttttgcatgctgtctaactttaagaaatctatgtatcctcttccagttccagttttctcatctgtagaagagtaataattagcagaacctatctcactcagtcattataaggatgaaatgaggtgatgcttgtaaacttcttagtacacagcctggcccataagcaaaacttccaccatgttagctgttatcttaagaatgactaggaacaacaactgctttccacttcatggagtcaggtaggaattcagcacttgaaataacttccatccatgatcactctcaaaccattatgagtatgagttttgaaaggaaagattaacttcagggggaagggtagaaaagggcacacagagtcggggggattggtttaccacacagcaaaccacttcaaattgaacttcagaaccagctgctgatttcctagggactctttctttcacatagacatctgattcccacccacttgttggttggatccttgtctttcattttctctcttctctcttcttccttatcagagcacaaggttttctttaactcagcagagcagtaatcacgactcccttttgctgaaatgatcactgcccaagctatactccttgggtcccattctctatagtaaaaggtttatccctaacaggcatcccctcctcccaaaaaggaatttttatttaatcttcacaagagacctatggtttcctattgccatcctcatgagagaagatgaaactggagctgagaaggattaagtaactttcctactttgcatacatagtgaatagagggccaagatttgaatcctcatttggttgtctccaaggctgtgcattttctactgggactgctgctttgtttatttgaatcttaatgaactrctagatgtgacccatagggtctattgagcatata

SEQ ID NO: 667876 - DNA, 2461 bp, Homo sapiens
tgaagggtttaattcctttgcaaccaaacttgggcatctcctgtacccaccattcactgcgttgcttagcataagaaagacaaaactgattactttctctaagggctggacaagtttgtttccaggggtaaagcagtaggcaggaggtgctgtagctggagaaaaccaagaggcttgcggattttgagataataaaaatcctgaaaatgctcctgaagtcctcaaagtgatggaagatacaccattactcctggactcgttaattcttaagcttttttaaaaaatttttttctttgtttttggttgtggtgatgggggcggaaggggtggaatcttttacaataggataaacactatgggccttctctccagaaaatatgtacaatcacacacaaacatgcacacatacatgcacagttgtgtgtgtaattttagggattaatggaatctcttgaatccaactacaagatatgcagaccccaggtttcgaaccctttgagatttcacgtgtctattttagcttaccaccatattcacaggatgcatcagagagcttaacatataatattaggacttcacacatttctgttgaattgagttgaatttttgttgaactagtttcaattgaaattgcccaacttgagaaataggggcatggacccgctgactttctcaaaatctcatgtatcttgggaatgttcaactatacacaaggtggctccagatattgattctataaggataaaatgatttttccagcactttccatcttcagccctcaccaggacgtgtgagtctttccttccataaaggatcatggtggaaaatatgagagtgtgaagtatggttcacatctggataagcaaacagagctctgtgttgaaacagcttaattaatggtgatgccaagcccttggccttgtttcctcagtgccatatgcggtgcaaataacgcccaggtctccgctctgagtgggacacgtgaaactccggtctagaaagggcagcctagattggtgaaaaaaattaacagctgaagtggaacagaattaaaatttatcttgaacctggcgtttaatgaagggtgtttaatttcattaatagagcttagagaatctctcctgttgagaaggacttatataaggggcaaaatgaataactgtccaaccactayggaggcagaatggtaaaaattgaaaatgtcagtaattggaggtttggccagggtgtgagaaaatcggtgtttttatatactgctggaaggagggtgaaatgtgtaaatattttggagagctatttggtaataatgattaaaacaaacagaaaaagcatatagtctttgacccaagtgttccagtattgagatgttttcctacaaatgttctcattcctatgcacaatgaagatgttcattgtttataatagggtggactggagacaatctaagtgtccaagaatccaagaatagggaattggctaattaattaatccattcgctcaatggtacccattttggcatttgggaaggagaaaatagcttaatatgccctgataaggagtcatagccatgatatatgttttcagtggaaaaaaaagcatggggcttaaagaatatttctaatgataagaacagggatgtggaaatgcttggaatatctgtggaaggctgggcatatgcacacacacatactttataataatagatacttctaaagagaagttggggacggtatcagggatgggattaataattttagttaaatatactttgtactgtttggatttttactatatgcagatgttaattttttaaattaaaaatttttttaaatagaagaaatccattttaaaaacaagtaatcatttcttaggtttatttgttcatttattcacttaaatacttactgagcacatgcaaagagctgacatttgatgacccagtcttcaaaaatgtgacctgctatttgtgcgttgagggtattgaacaaagtgatatgcctcttacagtgcttcccaaccataacctcatggcaagtttgtttcgggaaggagggagaaagagaaagggtgaaattctttgagcctctgacgttttccagccactgtgctgggcactgtctatatgcttatctaatctggtcttctctttgctgaattcctagcacctagatcagggtttgcatctgatgagcaaatggatgattgaattaataaataaataaaggaatgaattgtggtgcctgggccctctgtcaagagggagcaagtggcctgaggaagggcagactctcagctgagcccaagacccaggctccctgctgggtgctgctgagaggaggacttacacactgagctttcctggtgctccccctggggaagagtgtgtgcgtaataaccactcagcgtttttgcccaggaagcagcagacaagccaggaggcttgtttaatattttaatagta

SEQ ID NO: 667877 - DNA, 2164 bp, Homo sapiens
ggttatttttaacaagctctttagaggggttatagtcggctggcaaggttgagaactataggcttaaagaaatgcattgtgatggacagggtgtggcttcaaagtccagctgacctgcgtctgggtcctgtctccacttccagattgctaattccctgaacctgtttcatctgcaaagatgcaagttataatatttaccacatcagggctattgttaaaatcacattaggtcatgtaagtgatgcacgtgggcttgacatttattaggtgctaaataaactactattattattataaagagtagatgtcaaaattgactgtaaatgtttaaaagagccattaaattataaggtaatgagatttttctgccattattcccagacgctgggctttgtgggagtaggaaggggaaagagaaaggatgtgatgttacctagataattattttctctacttatcaatgtgtttatataatcaagtctaaaataaaattagttgggatcacagtaggtgataattcctctcaactacaaaccaaaaaaaaaaaaaaaaaagaaaaagaaatcttcttcttttataaaggccctcaaagttttcttttgtgtctttgggaagtaaacaaacaacaacaacaaacaagcaaagtggtctagtggtctagggctccttggcatatagttgggttttattttatggccttgagatctggctgttgttattgttgttgttgttttggtccactctggcctctaaggagctgaatttaattcatggcctttctcaaatcattatatcctatagtcagtggcaataaatctgacaaattaagtttacccaatggctttcaattattttttgtctttatttttcctccacctccattttctcatcaatccatgcattcatttgcatgtattcatgtattcattctcttctttcgttgcatgatttcccgtaagctgctttgatgtaacgttgctgctattacctggggctctggggtcagacccagaccctgtggatttgtcaccagttctgtctttttctggacgtgtagcatcaatttttttttttaaatctctctgtgccttgatttcttcatctctacaatggggattttaacagtgtctgcctcatgggatagtcggaggattcagtgagatagtatatttatgaagagtttagcatagtcatgaagtaaaatctgagaagtgatagcgtctcatcctcagatcggatgggatcctttgggctctgagactctgtgatcacctttcctgggcatgcttcttcttagccatttggggacaacgcctctttggacagttgccctacaaagcatcatttcttcctctgagaaactgggtttggtgtcctgaattatttggctgctttcaatctctcccacccagtggagcacagcagtgtccacaccacagaccctgtccatgccacctgggtgggtagtgctgcaattagggacctctcaccctgaccttttgaacgtcactctcccaattttaattttttaaagatcttctccttttccttttgcttgagtggcaaatgcttctctcctaccacttactgcaagtgctcagaacttttctccaagtggtggccaaggcagtctgatgtgagattcatcttcatgtaaagccagtactcagacacacacacagcacatgcaatgtcaggaatgtcagtgctttacacttagcatctcacttaaatcttaaaaccacccccaagaaatgggcattttattaatcctgttttttaaagggaagaaaacaggcttaagaagtcaagaaacttttccaaaagccacagagctaataagttttaggtcggatttgaagtagacatcccaccccagaactgaggttcttaactattgtgttgaactgcctctttataacaattagctttttttcaaacctcctagtttaacgaaggaggcaataacttttcagagaggggctgcgtcctgcccktgtcacagagagagagagaggtggatacagaaccaagactacaatccaggtctcacagtcttgcatttcccccccatgacacaattttgtagttaagttccaaagtgacgcaccttctgcttgcagtcaacatcttccagtattttcctagattactccagaccaca

SEQ ID NO: 667878 - DNA, 1353 bp, Homo sapiens
aaattcacctattctggaaaattcatatgaatgaaattatgcaatatgtggttttccattatatttcataacaaggaaaattaaatctaattctaaataacttgactcattactatatttgtgaagtcaagaacttccattggggaaggcaatgtgatatcctgggctagtctcagaggaactattttgacccaagcttgtattgatcatggaaataacaaggaggctgtcagtggggaatgttaacaaatctcaagtttagttacagatagcaaaaaaaaaaaaaaaaaaaaaaaaagagagagagagagagacagagagagacaatttataactttctctcagactccatcttccctaggggattagcagctgacttaaggcagaagcatttaactgcccaagtatctcagtacaccttctttttgttcctcccattcatggagctaattgcttcaggacatcttcatatgggtccttcttgtctctaacctcttatttctctgcaggaatctagaatcccctcaggttgaaaaagctagaaaatgtaagatctttaaagtcagcgatgcaggtgttggaccaggaaagaagaaarattgagtgacccatggagattctgagcaccaaacaaatgtatcctaaaacagtgtttcttaagctatctttggaaaaggagcattttcctctaatacttcacagaccaatacttgcaaaaaaatttacaaaacagtgaattactagaaaaatgaaatcaagacaagtcctttttttagatttattagactcaaaattattttgcgaaattgccataaaagcttttaagcactggctctcaatttctgcggtcacctcattgtggtgcaatattttatgtttaatgtcttaatgacttcaacattctaggactgtatgaaatacagttatccaagcctaccttcttgatataacctggatttccatgatcagtacaagcttgggtcaaaatagttcctctgagactagcccaagacatcacattgctttcccggatggaagttcttgacttcacaaatatagtaacaagccaagttatttagaattagatttaattttctctgtttaaggtcacaacaggaccagaagagtttttctggggggaggatccctgaactatagaaaatgacggaatttcacagaagtaatggagcagaagccagattatcagaagtaggtgagtgaacaggtgtgggaaattacagaccctgagattgctacaggctaccatcgggcaataagagaagagacaaatgagatgttcagggaatttgacattttatttttgtttgcttacttgttttgtttattttggta

SEQ ID NO: 667879 - DNA, 597 bp, Homo sapiens
tcctgtgcttatttttctccctttgtttccttctggtctatattttccaagattccttcaatgatatgattttgtagtgaacaaatgccagccctccttcaactcatccctctgaaatgtctattattgagagcatgataaaaatatttaaagatttctggtgggggcaggtggtatttctgaaaaatgcacactcctggtcctgctgcagacctgcttaactggaattactgtatacatgcgggacttaggaatctgtgttttgaccaagaggccaggtgattcttctgctcagttagtgctgggaaacagtgctaagaaggatacagtggctagaagtcgtcctgtcgtcctgcctcacagtaacatcgttaccgaattctcagcaggtgaaccaaatgaaatggtcaactgaaagccaaccagggtaaaacagatcttttatttcttgttgttgttattattattwttttttatgtggggacattcaagtgaactgctatatgcatttgcccccagtctctccttgtgagaagtgaatttcttcaacgtttatagaactgaggtattacattattggatgaattaagaaaacaa

SEQ ID NO: 667880 - DNA, 594 bp, Homo sapiens
tggcgcgatgcaacctctgccacycaggttcaagtgattctcctgcctcagcctcccgagtagctgggattacaggtgcctgccactacacccggctaatttttgtagttttagtagggacggagtttcaccatgttggtcaggctggtcttgaactcctgtcctcaagcaatctacctgcctcggcctcctaaagtgctgagattacaagcattagtcaccgcgccctgtttatcttattcttttataggtgaaaatacagaaaccataagaaagggaatagggtttttttgttgtcgtttttgagacaagagtctccctctatcgcccaggctgcggtgcagtggcgcgatctcggctcactgcaagctccgcctcccgggtacacgccattctcctgcctcagcctcccgagtagctgggactacaggtgctcaccaccacgcccagctgatttttttgtattttttttaatagaggcggggtttcaccgtgttagccaggatggtctcaatctcctgacctcgtgatccaccagtctcagcctcccaaactgctgggattacaggtgtgagccactgcacctggccgcag

SEQ ID NO: 667881 - DNA, 594 bp, Homo sapiens
tggcgcgatgcaacctctgccacccaggttcaagtgattctcctgcctcagcctcccgagtagctgggattacaggtgcctgccactacacccrgctaatttttgtagttttagtagggacggagtttcaccatgttggtcaggctggtcttgaactcctgtcctcaagcaatctacctgcctcggcctcctaaagtgctgagattacaagcattagtcaccgcgccctgtttatcttattcttttataggtgaaaatacagaaaccataagaaagggaatagggtttttttgttgtcgtttttgagacaagagtctccctctatcgcccaggctgcggtgcagtggcgcgatctcggctcactgcaagctccgcctcccgggtacacgccattctcctgcctcagcctcccgagtagctgggactacaggtgctcaccaccacgcccagctgatttttttgtattttttttaatagaggcggggtttcaccgtgttagccaggatggtctcaatctcctgacctcgtgatccaccagtctcagcctcccaaactgctgggattacaggtgtgagccactgcacctggccgcag

SEQ ID NO: 667882 - DNA, 594 bp, Homo sapiens
tggcgcgatgcaacctctgccacccaggttcaagtgattctcctgcctcagcctcccgagtagctgggattacaggtgcctgccactacacccggctaatttttgtakttttagtagggacggagtttcaccatgttggtcaggctggtcttgaactcctgtcctcaagcaatctacctgcctcggcctcctaaagtgctgagattacaagcattagtcaccgcgccctgtttatcttattcttttataggtgaaaatacagaaaccataagaaagggaatagggtttttttgttgtcgtttttgagacaagagtctccctctatcgcccaggctgcggtgcagtggcgcgatctcggctcactgcaagctccgcctcccgggtacacgccattctcctgcctcagcctcccgagtagctgggactacaggtgctcaccaccacgcccagctgatttttttgtattttttttaatagaggcggggtttcaccgtgttagccaggatggtctcaatctcctgacctcgtgatccaccagtctcagcctcccaaactgctgggattacaggtgtgagccactgcacctggccgcag

SEQ ID NO: 667883 - DNA, 594 bp, Homo sapiens
tggcgcgatgcaacctctgccacccaggttcaagtgattctcctgcctcagcctcccgagtagctgggattacaggtgcctgccactacacccggctaatttttgtagttttagtagrgacggagtttcaccatgttggtcaggctggtcttgaactcctgtcctcaagcaatctacctgcctcggcctcctaaagtgctgagattacaagcattagtcaccgcgccctgtttatcttattcttttataggtgaaaatacagaaaccataagaaagggaatagggtttttttgttgtcgtttttgagacaagagtctccctctatcgcccaggctgcggtgcagtggcgcgatctcggctcactgcaagctccgcctcccgggtacacgccattctcctgcctcagcctcccgagtagctgggactacaggtgctcaccaccacgcccagctgatttttttgtattttttttaatagaggcggggtttcaccgtgttagccaggatggtctcaatctcctgacctcgtgatccaccagtctcagcctcccaaactgctgggattacaggtgtgagccactgcacctggccgcag

SEQ ID NO: 667884 - DNA, 594 bp, Homo sapiens
tggcgcgatgcaacctctgccacccaggttcaagtgattctcctgcctcagcctcccgagtagctgggattacaggtgcctgccactacacccggctaatttttgtagttttagtagggacggagtttcaccatgttggtcaggctggtcttgaactcctgtcctcaagcaatctacctgcctcggcctcctaaagtgctgagattacaagcattagtcaccgcgccctgtttatcttattcttttataggtgaaaatacagaaaccataagaaagggaatagggtttttttgttgtcgtttttgagacaagagtctccctctatcgcccaggctgcggtgcagtggygcgatctcggctcactgcaagctccgcctcccgggtacacgccattctcctgcctcagcctcccgagtagctgggactacaggtgctcaccaccacgcccagctgatttttttgtattttttttaatagaggcggggtttcaccgtgttagccaggatggtctcaatctcctgacctcgtgatccaccagtctcagcctcccaaactgctgggattacaggtgtgagccactgcacctggccgcag

SEQ ID NO: 667885 - DNA, 1485 bp, Homo sapiens
tgataagtatatgatatgtcccataaagagaaatgatataaaaaagaagctagggagtgctggatcaggcaccttactatccccagaacatgttggtattagaggatgagggaagaactagaggtaactgtgagacacaaaaggcataatgaaaatagtcatgatagtcccaaggcagatattgtttatgatgctttgagtgttggaggaagggaggattgatggtttaacagagatcatggcagttatgttcactcatataaatgttgatttagaagctggtggaagggtattttttgagtgacagctttattgagacaaagcaattctggagaacacccatatccttctctctgtatccatcagcagaagtgaagagggagccccaaagttccacttaaagtgtacaacttatggcttttagttcattcacggagttgtgcaaccatcaccaccatcaattttagaacattttcatcacctcaaagaggaatcccttgtccttttgtagttatggccatccctggaagagtacttttttttttttttcaactgaagcacccagagctcttgggttccctcttaactgctttctgtggaagtatagagggccatgtgagggaagccgttatccagagtacatgactgctagaaaatggagtttggggctccctcttcacttctgctgatagaagcataatggctaggggatgggtagtctcaccagagaatgtggagctttcagactctccttatatatgataaaaaggatttttcattgtagtggggaaaaggtggtttgatcaaatggcattgggaaacttagctcactggaaaaacagatctgtacctttcacactaatgaaatgcctgagatattaaaggtctaaatgtaaaattaaagtacatgaaaaacagaataatatatatgtaccctyggtttgaaatagactttaagcactaatgcataaccccaaagctgacattaggcttttatatggtggaaaacatcatagtcaatagataaatgagagactgacacaaagtgtttgcaacagatataataaaggactgtaattcgtgatattcaaagtactattacaaaccaataataatctgcaacttagaaaaatggactaatgtcccattcacaaaagatgcaataaaagcagttaatgaaaattatccaatatcactagaaatcaagaaatgcaaattaaagtgattatctactttttccccaaaagactgactaatcgagtgataacattcagtattggtgaatgtgtggaaacaagggaattccattgttgattacatatctattgctttatgtatataccctttgaattaatattccttggaaaccaacatatacaaaggtagataaatgtattagtggcaaaaaaattaatggtaaactattaaaacaacaagtgtccatcagggtaataaataaattaattatggtatatatccattcaa

SEQ ID NO: 667886 - DNA, 1092 bp, Homo sapiens
gttgagaatatgtgctcttaaatctgtttagagtttgtattctattcatagtgtgtttatactcattagtcacatttctattgggttgtatattttcctgtatgtatgcaacattgatatgaatgctattttttaataagtttgataaaatttttccccaattttgtgtggtctagaagtttgcatatggtatttcttactatatagtagcttaacttgggaattatcttcatttatagaagcacgtactttgttgattttttcatttgtttcactcctatctcttaaaaaatgaatagatgtatagtcccatttgaatcatataatacatttgtttgaccttctgtaacttaattatttctctctcctttatcaccttccttccttttctttctttccttctcatttttcccttctttccttacctttctcttctgtattttgctgtgtggyctgttttttgtttgttttatttacatatttttattatagaagagtacacataaaatttaaccattttgaagtgtacaattcagtgacagtatattatgtgaggtgatatggtaattagcttgattgtggcaaacatttcaccatgtataagcatatcaaaacattttataccttaaatatatacaatttttatttgtcaactatgcctcaataaagctggaaaaatattgccaaaaagagagaaattgcaaggcttcattatagaatggccagagaattgaggatgttttcaggcttgtggaagtaaccaggaaaatgtgaaaataattgtttttttttttgagtcagattctggctctgttccccaggctggagtgcagtggcttgatcatagtttactgccacatcaacctcctaggctcaagcaatccccctgcctttgcctcctgagtagctggaactacaggcacatactaccatgcctggctaattttaaaaagttttttagagatagggtcttgctatgttgtgcaggctatgttgtcctggcctcaagtgatccgcctcaagtgatctgcctcaggtgatccacctcagcctcccaaagcactgggattacaggtgtaagccactgtgcct

SEQ ID NO: 667887 - DNA, 531 bp, Homo sapiens
acaaccctttgagatgggatggctaccttgattttacggatgaaaaaaataacaaggctcagagaatccaggtcatttaactcttctgagctctccattttcccatgtacgaaatgggtgtcagtagagctccgcagattgttgagtgggtgagggggtgatacaaagcggtcagcagttctggcacaggaaagcgctcgcgaacttcctgcgcatcattattctggcttgtgctcatgtagcctgtaagtggcctggccaggatttgaacctacagccttccatcatccccctgcacaactsctgccaccccatgctgcctgcctctgggagattaggtgagcaaaggggtcttggccatgtctttccatctgaggcactcagtacagagggtgaggggtccctgagccacctctgctgcctgccctaactccgggctgtgatgaagcagctctgttggatgaagcagccctggctccgatgctcttcctcccctcaccttccttacccaaaggatgaggttggaataca

SEQ ID NO: 667888 - DNA, 599 bp, Homo sapiens
ttgaaaagggtatcaaattcagttataaactcattttctgaattgctttttccatgcttgtttgcataacctatccttccaagctcagttcaaaatctagtgactccatcagtcacactgagactaacttgctctcatcttagtttatgtcttttatacacttgtaacttgaatcatgtgctctgttaagactgcaaatgatagaacaaagacatgggtttctcttctcatccttcacagcatccagcagcrtactctgcatatagcatgtgctcagtaaagaacagaagataagtagttaaaagtgggagaaaataaggccagggaagtgccatttctctgggattttgctgaaatgcatagcaatcctatcatcatcttatttcaaatggctcatgcaataaaggttgataaattatatttttaatgattcatttcactatgttggcttcttgatgtttatgttataaagtattagttatcttgatggtaaataagacattacccaggaaaagaagaatggaataaaaatggtcaacatttgttgaactctgaaaaactgactctgtgataagtgctttatatacatattcttgttg

SEQ ID NO: 667889 - DNA, 652 bp, Homo sapiens
agaaggattgaaaatattttaaacaagtttcaaaaaatgacattcctaggtttaaacctgtaattcactttcttttctcccccaaaaagccttccattgcctggaagaagcttgttgccttttcatggtgtgttttcatacttaacagctgtagggaaccaagaagtcawtttgttacacaattccttagtgtcctttatcttctataccactaaacttgtatacaaaattatgtaaaatatattggcaaaaactagagcattcaggccattacgtaagtaccataaagtaacacaagatgtttgtgttccagagataaaatgccaatatttggtttatatggttgaaattctccatttgcattttggggaaggttgaaaccttcctcatctaacaaatctaagtctaaggttactcatttatatacacgcacatgcacacacactatgtatatagtgtgtgtatgtgtgcacttgtgcaagtctttagaacacttataagacaaaattcctaaatcaattttatttcagtacatggactatccataggtactgtaaatatcaatgcattgataacaaaacaagcccacactgtaagtttgaaaggtgacagatctgttctaggtgtaagcattgtaatcctagcactttgg

SEQ ID NO: 667890 - DNA, 652 bp, Homo sapiens
agaaggattgaaaatattttaaacaagtttcaaaaaatgacattcctaggtttaaacctgtaattcactttcttttctcccccaaaaagccttccattgcctggaagaagcttgttgccttttcatggtgtgttttcatacttaacagctgtagggaaccaagaagtcatkttgttacacaattccttagtgtcctttatcttctataccactaaacttgtatacaaaattatgtaaaatatattggcaaaaactagagcattcaggccattacgtaagtaccataaagtaacacaagatgtttgtgttccagagataaaatgccaatatttggtttatatggttgaaattctccatttgcattttggggaaggttgaaaccttcctcatctaacaaatctaagtctaaggttactcatttatatacacgcacatgcacacacactatgtatatagtgtgtgtatgtgtgcacttgtgcaagtctttagaacacttataagacaaaattcctaaatcaattttatttcagtacatggactatccataggtactgtaaatatcaatgcattgataacaaaacaagcccacactgtaagtttgaaaggtgacagatctgttctaggtgtaagcattgtaatcctagcactttgg

SEQ ID NO: 667891 - DNA, 652 bp, Homo sapiens
agaaggattgaaaatattttaaacaagtttcaaaaaatgacattcctaggtttaaacctgtaattcactttcttttctcccccaaaaagccttccattgcctggaagaagcttgttgccttttcatggtgtgttttcatacttaacagctgtagggaaccaagaagtcattytgttacacaattccttagtgtcctttatcttctataccactaaacttgtatacaaaattatgtaaaatatattggcaaaaactagagcattcaggccattacgtaagtaccataaagtaacacaagatgtttgtgttccagagataaaatgccaatatttggtttatatggttgaaattctccatttgcattttggggaaggttgaaaccttcctcatctaacaaatctaagtctaaggttactcatttatatacacgcacatgcacacacactatgtatatagtgtgtgtatgtgtgcacttgtgcaagtctttagaacacttataagacaaaattcctaaatcaattttatttcagtacatggactatccataggtactgtaaatatcaatgcattgataacaaaacaagcccacactgtaagtttgaaaggtgacagatctgttctaggtgtaagcattgtaatcctagcactttgg

SEQ ID NO: 667892 - DNA, 673 bp, Homo sapiens
ttgttttaggggaaaaaaaggccacttaacaattttatgtcttttgaaagttaatgccatgatttttccaaaaggaacagatcaattttcactgatatagtaatataggagtgtcccattttcactacacttcacaaggggatggcacttttcctagaaatcctcttaataaaagttaacatgtgtttagtacttacagatttcagacataacaatgaggattttgggatataatctcacttaatcctgcaacaactatatgaagtgggttctacttttattcccacttcatagctgaagcaacttagtccagagtgactttgtaatttgcccaactttacacagtctgtaagcaaagagtcagggctcatctgyggtaaaactggccaaaatccatgctcttaacctacagattcatacgatcatttcctatgtataaactgtctcttctaacatttgtctacttatttactgattatgctatattattaatctataccttatttccattgggaaatggtatgcaataaatatgccaatctgctttttccttcacattccaatatcaataatcgattatttaaaatctagcttcaaaaatacaaacatttttccaaactatactgcagatttactatttagccatggaacatcactctgcctcagtcttgcc

SEQ ID NO: 667893 - DNA, 673 bp, Homo sapiens
ttgttttaggggaaaaaaaggccacttaacaattttatgtcttttgaaagttaatgccatgatttttccaaaaggaacagatcaattttcactgatatagtaatataggagtgtcccattttcactacacttcacaaggggatggcacttttcctagaaatcctcttaataaaagttaacatgtgtttagtacttacagatttcagacataacaatgaggattttgggatataatctcacttaatcctgcaacaactatatgaagtgggttctacttttattcccacttcatagctgaagcaacttagtccagagtgactttgtaatttgcccaactttacacagtctgtaagcaaagagtcagggctcatctgcggtaaaactggccaaaatccatgctcttaacctacagattcatacgatcatttcctatgtataaactgtctcttctaacatttgtctacttatttactgattatgctatattattaatctataccttatttccattgggaaatggtatgcaataaatatgccaatctgctttttccttcacattccaatatcaataatcgattayttaaaatctagcttcaaaaatacaaacatttttccaaactatactgcagatttactatttagccatggaacatcactctgcctcagtcttgcc

SEQ ID NO: 667894 - DNA, 630 bp, Homo sapiens
agtttatcttgtctctcagtaaacaaaatccctttgtatttttgtgccagatacaatgcttcttatgctacggttttaaatggaatttaatataatgtcatataggttataagaatgtatcttaaactattctagttgtcttcaaaaygcctcttggtattcaatataagcataacataaaaatatggatatgtgaacaaacgaaaagccaagaaagagttccacatgtctaaaaacgttattggagggataacattcatagcagcattatacgaatgcaaaatcctgaaaacaaagctaatgtccatagacatggaaatgagtaagcatattttggtatcattcatgcaatacaattttaaagaacactgaaaattagtgaactacaactttccttatcacatagaagactcttataaaaataatgtgtaaaaaacgtatgacaacataacacatattactactgtatttatgtaaatttctaaaaaaattgcaaaactgaaaaatattgacaaaattattttaaaaataagaggataattaacttctaaaggatagtggcagggtagagagattaaagatgaatgtacctgtcacttcaaaatttccttaaacaggattttggattag

SEQ ID NO: 667895 - DNA, 630 bp, Homo sapiens
agtttatcttgtctctcagtaaacaaaatccctttgtatttttgtgccagatacaatgcttcttatgctacggttttaaatggaatttaatataatgtcatataggttataagaatgtatcttaaactattctagttgtcttcaaaacgcctcttggtattcaatataagcataacataaaaatatggatatstgaacaaacgaaaagccaagaaagagttccacatgtctaaaaacgttattggagggataacattcatagcagcattatacgaatgcaaaatcctgaaaacaaagctaatgtccatagacatggaaatgagtaagcatattttggtatcattcatgcaatacaattttaaagaacactgaaaattagtgaactacaactttccttatcacatagaagactcttataaaaataatgtgtaaaaaacgtatgacaacataacacatattactactgtatttatgtaaatttctaaaaaaattgcaaaactgaaaaatattgacaaaattattttaaaaataagaggataattaacttctaaaggatagtggcagggtagagagattaaagatgaatgtacctgtcacttcaaaatttccttaaacaggattttggattag

SEQ ID NO: 667896 - DNA, 630 bp, Homo sapiens
agtttatcttgtctctcagtaaacaaaatccctttgtatttttgtgccagatacaatgcttcttatgctacggttttaaatggaatttaatataatgtcatataggttataagaatgtatcttaaactattctagttgtcttcaaaacgcctcttggtattcaatataagcataacataaaaatatggatatgtgaacaaacgaaaagccaagaaagagttccacatgtctaaaaacgttattggagggataacattcatagcagcattatacgaatgcaaaatcctgaaaacaaagctaatgtccatagacatggaaatgagtaagcatattttggtatcattcatgcaatacaattttaaagaacactgaaaattagtgaactacaactttccttatcacatagaagactcttataaaaataatgtgtaaaaaacgtatgacaacataacacatattactactgtatttatgtaaatttctaaaaaaattgcaaaactgaaaaatattgacaaaattattttaaaaataagaggataattaacttctaraggatagtggcagggtagagagattaaagatgaatgtacctgtcacttcaaaatttccttaaacaggattttggattag

SEQ ID NO: 667897 - DNA, 2570 bp, Homo sapiens
ataaaattgaatctcgggaccttaaacttaccatgccaaaggaaagctaagcttgggaacggagtcacacgaaaaccaccttccttttgttcccaaacacagggctgtaatttcacacacttccttcatcttatgtaacatgcagaactacagagcatgagatgaaggcatgagtgagtttgtccccactccctcttttcacatgtaaaatgtagattcactgagcgctaatcagagcctcacaagaatgtgacacttgcctcattgcctaaccaccctctttttaaaaaaattatttccttcttgcttgctatttcccctttaaatactgaagttctcaaaactctcttcagaaaaagcacacgtcacagatcctcctttgactcgtgtctctttttcctgggtgcatccttaaccttggctaaataagcctctccatgactaagacgtgccttggtcactttttgatttacatggcacatctgggtcacaggatggaagtggcctgggtcagagagaaaagccatatcagaaaagcatcctcatcacacaaagtcaaaatttagaaagagtgcattttagtataaactttcaaatctttgtgaggaaggttccagaagccaaatcactttcacaggaaaaaaaaatacataaggaagctttctcaatgaaaaccctcgagaatgaaggggaaatcatttttgtaatcaaatatgcatggtaatgctccaaatagctgtagagcctgttataggcaaaatgccaaaatcatagtttaggtccagtaaggagaagtgaaatagaaaaaagtcagaattttctttctaaggtagaaacacagaagaagagttttaagtactatttaaaatttgagataatgaaataaaggaaatgcaatcagaaattttagttttgaacaaatgggttggagtccaactctttaaacaggattctgacaacatcagcttggcagacttgatttgagaggttcacgtgagaaagactatgttagaagaatctcaggttgatcttatataatatatccgggacacatatttcaaaaatggctcttactatctgatgggattaggattaactattttttctttgttgaatacattctatccagttcaacatcttaagttaggaaggccctaatattgcaaatattaactttcaaactcagaaaacagaaaaggacaatgaagagtacctccgagtgagcatcagaaatcggagatgaagaacatgaaccacacatctacacttataacaaagcagttttaaaaacgtttctgctggctcaaaggtacaggtaatagtttaaataaaaatgcctgttacagaatatatacagtacatttttctataagataatattttatttgggaatgaaaaagaaatgttaacagctatactactcattatatgtccaagtatttactcatattcttagaaacttatttccctctcttatgagaatctcctattacgaggatgtggctctccaaatgtgcaatccctagccatgacatacttccttctttctgccctgtcatgaaagtacatgtgacatggtttggctctgtgtccccacccaaatctcatcttgtaggtcccataattcccatgtgttgtgggagggacttggtgggagatgattgaatcatgggggtgggtctttcccatgctgttctcatgatagtgactgggtctcaccagatttgatggttttaaaaatgggagtttccctgcacaagctctgtttttgcctgctgccatccatgtaagatgtgacttgctcctctttgccttccatcatgattgtgaggcctccccagctatgtggaactgtaagtccaataaacctctttcttttgcaaattgcccagtctcaggtatgtctttatcagcagcatgaaaatggactaatacaatatgggttcacaaaagtaatgatttctcatgaattgtaacagacacttatttaaagtgaattataaatgctgatcattattgaagtggggtaacaagtacatgagggtttatattttggcaaatggctgaaaattcctataataaaaagtttattttgaaatcgaatagactttcatcactgttttaaataagcaccgacctttttatggatgctattgttactgttgtcaagagaatagtaatcagaacataaattagtagggcatcttaatcctgagaagaacaaggagcaattgctcatagctttattgycggagacattaacaggatttctctacgacactaaggacctaataaagtttcttctatgttaaaaactatactgaaagaaaatgtgcatgcaataaacttatgagctcaaatgtagaaaataagttgtgtcatgattacaagcttattctctccatctgtctggaaaatcacacctatgaatatcccactagtttcaacagcttggaagcagatggactctatctacatgcagacggtatggacaaacagagcagcagacaccaccactacacacacatgcagcagaggcactgctacagatgaaaaagcagacaggatgt

SEQ ID NO: 667898 - DNA, 715 bp, Homo sapiens
aggaatattcttttaagttccttctcccataacactgttatctgcctcagcccccagcccaaaaagggataatgaaagggataattcagtttcaagttttaagtaaccctggagaaatttttgaaaacttattgggagtaaaatcatcagaagaaaacaatgcataccattaagcccyctcttaatgttgccttctagaataccgaagaaccagacaatggaggcaggccctggggttggaggccctcgcagtggtagagtatgtggctttgtggcctctcaatgctgctctgaggcagtgccgagcagggccccctcccgcctcatgcacggacctaatggccctggtccctttgtttcccttctcaaagtgccacccagtggtgggctcttggtaaaaggggcctgatggtgaatttggggcactctaatgataataataaccaccaaacagtaataagaataataagatctaaatactattgagttctccctgggctgagtgctcacttcatcacattctctttctcccggctccattctcatccttttcactgtcctgcttcattcctttctccacgtcaccccagtttcccattcccgtttccatgcttaggcccagtcagccacaggccctgagggcctatatgcaacattgcaatgctgatactgagcagctgggattagtctttctgagaatctgataataatgttg

SEQ ID NO: 667899 - DNA, 669 bp, Homo sapiens
aagcaagagtctgaacattgagcaataactgttaggcaaaatggacaagagtagcaagataagaaatattggaataaaatctcagtgctgcttcagcatatccaaattataaacaaattggtacaacatcccaatattgcattaaagaaaagatctttcaggtatgatgcatttcagagagagattaatcctagacaggacaattaatgtcatcaccttatattcagtggtacatctaaaccatgctggaaagacccaactattcgrttttgaaagacttccaaagaaagggattttatggcatttcttgttgacactttctaataattttaatgttaattctcatcacattcttggacacgattaggaactttgtctcttttgctcctgtatttcattttctgcagatttttcacccttgcaaccccctctaattctctctcaacttcttagttcctctctgttattctaccttgttctcaaactctttgtctagaaaatatgtggagctcatactcattaaaatcatgcaactagccaggtatggtggctcatgcctgtaattccagcagtttgggaggccgaattgggcagatcatttgaggtcagaagttcaagaccagcctggcgaacatgacaaaaccctgccactactagtaatacaaaaat

SEQ ID NO: 667900 - DNA, 669 bp, Homo sapiens
aagcaagagtctgaacattgagcaataactgttaggcaaaatggacaagagtagcaagataagaaatattggaataaaatctcagtgctgcttcagcatatccaaattataaacaaattggtacaacatcccaatattgcattaaagaaaagatctttcaggtatgatgcatttcagagagagattaatcctagacaggacaattaatgtcatcaccttatattcagtggtacatctaaaccatgctggaaagacccaactattcgattttraaagacttccaaagaaagggattttatggcatttcttgttgacactttctaataattttaatgttaattctcatcacattcttggacacgattaggaactttgtctcttttgctcctgtatttcattttctgcagatttttcacccttgcaaccccctctaattctctctcaacttcttagttcctctctgttattctaccttgttctcaaactctttgtctagaaaatatgtggagctcatactcattaaaatcatgcaactagccaggtatggtggctcatgcctgtaattccagcagtttgggaggccgaattgggcagatcatttgaggtcagaagttcaagaccagcctggcgaacatgacaaaaccctgccactactagtaatacaaaaat

SEQ ID NO: 667901 - DNA, 669 bp, Homo sapiens
aagcaagagtctgaacattgagcaataactgttaggcaaaatggacaagagtagcaagataagaaatattggaataaaatctcagtgctgcttcagcatatccaaattataaacaaattggtacaacatcccaatattgcattaaagaaaagatctttcaggtatgatgcatttcagagagagattaatcctagacaggacaattaatgtcatcaccttatattcagtggtacatctaaaccatgctggaaagacccaactattcgattttgaaagacttccaaagmaagggattttatggcatttcttgttgacactttctaataattttaatgttaattctcatcacattcttggacacgattaggaactttgtctcttttgctcctgtatttcattttctgcagatttttcacccttgcaaccccctctaattctctctcaacttcttagttcctctctgttattctaccttgttctcaaactctttgtctagaaaatatgtggagctcatactcattaaaatcatgcaactagccaggtatggtggctcatgcctgtaattccagcagtttgggaggccgaattgggcagatcatttgaggtcagaagttcaagaccagcctggcgaacatgacaaaaccctgccactactagtaatacaaaaat

SEQ ID NO: 667902 - DNA, 669 bp, Homo sapiens
aagcaagagtctgaacattgagcaataactgttaggcaaaatggacaagagtagcaagataagaaatattggaataaaatctcagtgctgcttcagcatatccaaattataaacaaattggtacaacatcccaatattgcattaaagaaaagatctttcaggtatgatgcatttcagagagagattaatcctagacaggacaattaatgtcatcaccttatattcagtggtacatctaaaccatgctggaaagacccaactattcgattttgaaagacttccaaagaaasggattttatggcatttcttgttgacactttctaataattttaatgttaattctcatcacattcttggacacgattaggaactttgtctcttttgctcctgtatttcattttctgcagatttttcacccttgcaaccccctctaattctctctcaacttcttagttcctctctgttattctaccttgttctcaaactctttgtctagaaaatatgtggagctcatactcattaaaatcatgcaactagccaggtatggtggctcatgcctgtaattccagcagtttgggaggccgaattgggcagatcatttgaggtcagaagttcaagaccagcctggcgaacatgacaaaaccctgccactactagtaatacaaaaat

SEQ ID NO: 667903 - DNA, 1631 bp, Homo sapiens
tgttcctttgtcctttttgaattgtctaattaatatttattacttttgtaaagaaaaacagcttggaaaattaaaatatttctttaacatcttctttttctgtcctgttgtgtcttccaataggcaataacagaccttagataccatgtgtttttctaaaagcttgataggtactgaagtttttgcctttgaggctcatcatttcatgattaaaacaacataaaataacatgttataaagcaacaatgttatgaaagcaatttggaatatatttgtattagtcccttctcacactcctataaagaaatacctgagactgggaaattgataaagaaaagaggattaactggctcacagttcctcatgctgcacaggaagcatggctagggaagcctcaggaaactttcaatcatggcagaaggcgaaagggaagcagatacatcttttttttgttttgttttgttttcagacagagtcttgctctgtcaccaggctggagtgctgtggtgtgatctcggctcactgcaacctccacctcctgggttcaagtgattcccctgcctcagcctcctgaatagctggactacaaatgcacaccaccaccatgcctggctaattttttttgtattttagtagacacggggtttcactgtgttggccaggatggtctcaatttcctgaccttgtgatctgcccacctcggcctcccaaagtgctgggattacaggcatgagccaccacgcctggccagcaggtacatcttacatggccagagcagaaggaagagagagaaggggaaggtgcttcacacttttaaacaaccaaatcttgagagaactcactatcatgagaacagcaaagaggaagtccactcccatggtccaaacacctcccaccagactcctcctccaacactggggattatgattcgacatgagatttgggcagggacacaaatccaaaccatgtcaaaatgttgctctccacaaacaatcactgaggacaggtaaaattattaactattataaactggtgaagatgctgaagatcagtcaaaaaccgcagtatctatcagcataagatatagtcatttactgtgatgtagtcaactgagccaggcatagacagtggtaaaaacaactcttctcccacgtcacctcttaagaatcaaatcccctgcttttattaataaaaaattcaatacaggaattgtttagagtccaaatggagcccatttttaaaaccctctttctgaatcttttatttcacacctctctttcataagctgcactttccttttatcttaaagcatttttctkgctcaaaaatggataacttcaatgatgtggaatctattaacaagtccaatgttctagtgcaatattatgatacgccttttgattggccctagacagaaagctgagtattcccattaaaccagtggatggcttttggacagtcactgggattcttccagataggaacaaaactaaactaatgttgagaatgtgctattgacattgcttcactttctttctaaggcctaatttgaatgggtttacatatctcctttaaaagttaatgtaagcatatctccttgaggatgcattatgtgctattttctttcagtg

SEQ ID NO: 667904 - DNA, 602 bp, Homo sapiens
cacccaacagatcgttggtgtttaatgtcagcattcactgagtgcagtacctccctgggcatcttttacagacttggctcttctagggatggagctaaaggaatgtggtggaaatgtctgctggtagccttgagttgtcctcactgacctgacaactatttrctgtgtcttctttagaaggaagtcacttaaccaacccccttagttttttgtttgtttctccataaaaagagaatcaacagcatcagaagtcacttctgactcttctgcttagagtcccagcatgtagattgtcaatatttctttttgataatgaactgcatacattgaactttccagtttctatttgaaaaaaccagccatctaaaattgcccattttacgcaggaaatcattgcaaaaatcaaacatagtgttcccatagctactctgtatatggtttaggagggggtttcattttccttatttatttgcagtgataggatatatctttggaagacttcctctctagctactcaacatagcaagctgttacagcaaattccctccatagtgcataacaacagctgttgctctggaaacaagttaacactttgctttcca

SEQ ID NO: 667905 - DNA, 2134 bp, Homo sapiens
atttatatttcaatggtttatggttcaaattccatgcaataatactaaatctttaacacatgcatatataaaagtagattttttttaattaggggaaaagaatataagactttgttgttactatttatcacaattttggtctttgtcagagaaaaggatcatctttctggactaggttcatcaatgaataacattttctcaccatttttggtttatgaaaaatatataaacatcaccataaaaatgtagctagagtgtttataggacagggaagagcccrgataaatgccatgaaagaccactccctaggggggcattgcctcaggaactaggtatgtgtattcaatacattaaatcagccattaattttattaacttcagaatttccaacctttcatatgtgttcatctattgagaaaaatagaatacttttgctatcataaaactgagccattttagcttgataattttcaatgcttagcataggacttggcacacaacaggcactgaaataaaatagaaatcaatttgtgttaggagtcttggctgagatgcaaatacatgacctcctgagcaatccaactggcaatctacccccaaaagaaacagtgctgatctggcccagcttggtacttgttaagctctggagagctggattttagcagggtgcatgtttcctgtacagatgttttcaaaccatcttttaacaaatccttattagacttttgctaatgaagacatgaaatggagcttaccatggaggaggtaaaaggtgtcttttttcttcagaaaattggacatttgcctgtcacttgaaactcttctagttttccatgattcctaaggaattttaacagccattcagtgttgcttccccaagtaatcttagaagcctaagaaaatgtccatgcactaggaaggctgttaagcagctgtggtgttcttcacaaatttacaaactgagacataggttctctcttccctttctctctcttttttaatgaaaggccaggaaaaggggcctttcaatagaaagggctggttaagcctcaacctcaactcctaataatcctataataaaacggctccattgctagtctatgtatctattccttatgggaatattgactctatctttacattgataaggttatcacactgagtgatatggtttggatttgtgtccccacccaaatctcatgtcagattggaagagggacctggtgggaggtgattggattatggggatggatttcccccttgctgctctcatgatagtgagtgagttctcatgagatctgatagttttaaagtgtgtagcacttcccacttcactctctttttcctgccacattgtgaagaagatgcttgcttcctctttgccttccgccaagattctaagtttcctgaggcttcccagtcatgtttcctgttaagcctgcagtactgtgagtcaactaaaccttttttcttcataaattacccagtctctggtagttcagttctttatagcagcgtgagaacagaataaaacactgagtcatcagggccacaagaataagcatcatgtctcaggatcaatactgtagaagaagttgattgtcaaaaatgtaaactgaggtgcctaatagtagctaatatgcataagactctaccaagtggcaggcaccatgacgagtactccaataccttgaatacagataagtctttagtaggcagaatatgaaacaaccagtgtctctgtgggcatccactctcctgggcaggaatttcatcttctgaaggtcttcatggttggaggagttaaagatcttctctgtgacacgaaggacagaggtaagcaaagagggatcttcatggggtcccactactaaaggcaactcacaataatttatgggtaacgacaatgttaatttcctaaatgttaaatgtttgtttaagactttcagcctgtcctccctgtgctcccaagtctaaatgaggaggcaaaggggctgagtagggactgtggagtgattgtccaagagtagatgagcctgggggaaagaataggtagcaggtctgctccccatgtagatactctactctccctccttgccaatcttaagaataggattttggccaggcccggtgg

SEQ ID NO: 667906 - DNA, 1143 bp, Homo sapiens
tacaccactgtgcaataaggcttcctctccaatcctattaagctgtcaggaggagtgattactcacaggaatggcaaataggttttaactcatgccaactctaatctatcagtggttgttttgataaagtgtccaatgtttcatcgggactcagtgaagagaatgctgtgatcatctagcaatgtctgccattggtgagaaaatggtagagtgacaatatttgctgcatgtttgccattcctggaatagtgaattctcagaagagtttctatatttaactctagttagaattataagaaaaataacattgacaatgctgccactcctgatttattttttaatggaaagacacccatctgtgatataaaacttaaaaatggaatacaagctgctaaattgttgtgaagtctgtattagtaaaatttaacctcaaataccatcactttcaacattttataatttttaagtgataaagtgataatacagcagyaaagacaaaataaagtggtatgctttaaaaaaaaatacaaaacccactcataactgacaaccaactgccaggagttcctgggtcaagcacccagattaataaatcctagtttcccatcaacccagcaagacacacatgaaaatcacatctgtctaaagatatccgccatcaccagagaagtaactaccatggcccaagccagcctcatctctcacctagctgacaaatagccctctacctggtatcattgcttccacttttatcttctatattttttacccaagtgctataattcttttaaaacgtaagtcaaagcctatcattctttcccctctgctcaaaacaatccaaggacattccacattattcagagcaaacgtcaaagtccacacaatgggctaggaggctttgtctaagctgtcctactttcttcccatcttcatctcatccttaaccccacacccctttgctctaacaccatcagcccttttgctagtctaaacatgctatgcatgttcccatctcaagggttttgtatctgtggtcccctctgcctggaatgatcttccatcagacaaccccacagtgtaatgtctcacacgtccttcttgtctttgttccaatgtcattttctccatgaacctttctactta

SEQ ID NO: 667907 - DNA, 1143 bp, Homo sapiens
tacaccactgtgcaataaggcttcctctccaatcctattaagctgtcaggaggagtgattactcacaggaatggcaaataggttttaactcatgccaactctaatctatcagtggttgttttgataaagtgtccaatgtttcatcgggactcagtgaagagaatgctgtgatcatctagcaatgtctgccattggtgagaaaatggtagagtgacaatatttgctgcatgtttgccattcctggaatagtgaattctcagaagagtttctatatttaactctagttagaattataagaaaaataacattgacaatgctgccactcctgatttattttttaatggaaagacacccatctgtgatataaaacttaaaaatggaatacaagctgctaaattgttgtgaagtctgtattagtaaaatttaacctcaaataccatcactttcaacattttataatttttaagtgataaagtgataatacagcagtaaagacaaaataaagtggtatgctttaaaaaaaaatacaaaacccactcataactgacaaccaactgccaggagttcctgggtcaagcacccagattaataaatcctagtttcccatcaacccagcaagacacacatgaaaatcacatctgtctaaagatatccgccatcaccagagaagtaactaccatggcccaagccagcctcatctctcacctagctgacaaatagccctctacctggtatcattgcttccacttttatcttctatattttttacccaagtgctataattcttttaaaacgtaagtcaaagcctatcattctttcccctctgctcaaaacaatccaaggacattccacattattcagagcaaacgtcaaagtccacacaatgggctaggaggctttgtctaagctgtcctactttcttcccatcttcatctcatccttaaccscacacccctttgctctaacaccatcagcccttttgctagtctaaacatgctatgcatgttcccatctcaagggttttgtatctgtggtcccctctgcctggaatgatcttccatcagacaaccccacagtgtaatgtctcacacgtccttcttgtctttgttccaatgtcattttctccatgaacctttctactta

SEQ ID NO: 667908 - DNA, 1081 bp, Homo sapiens
gtgacttatttcactaggataatgtcctcaagttgtagcatgtaataggatttccttcctttttgaggctaatgtttcattgtaaacatatatcacattttatttatccattatccattgatggacaatgggttccttctacctgttagctatagtggatagtgctggtaagtgaatagtatattttgacaagcctgattctccccaaatattatctttgtcatttgatgtggtttttgctttttagaaaaaaaaaaaaagattacatgccttgtcatttgtatttaactaaattttctgttctatcaacactataatatccatttttcttgtaatcaataacactcatttatgactaacaggccagggcaaatatktgatgaatgggctcataataaagcataaaaatctaaagtgtctcgttaggtattgtcttagggttttttgtgctgctacagtagaatgccacagatgggtaattaatgaagaacataaatgtattttctcacaattctggaggctggaagtccaagattaaattactagcattaagcatctgatgaagatcttgatgcagcctcacatggcagaaggtgaaatggcaagctagccaaatgatacatgaagcctctttttaaaaggtcttaatcccattaatgaggaagcagcccttgtggcctaatcacttcttaaaggcccaacctcctaacacgatcacacttgcaacacctgaattttggaggagacacattcaacccatagcaggtattgaacccacaacaatgacatcatgatacgatgattcaattgaaatcagcagatattgtcttctaccacaatattgccttctcctgacctaaagcagcaaatcaaaactgaacagatcatcgtgaattttcattaaaatgctctggtattttgtattttctccatcttttttgtattcatgttttcaaggaaagtcccaactagctagcatgcatcttggtacgggacagatcttgtccctgaactcttatctccttttctaatccgttggctggatcaaacaatccacaaataaacctaaaatgaccttcac

SEQ ID NO: 667909 - DNA, 2238 bp, Homo sapiens
cgatgtgacatgcaataattcaagtttctttcattttaggcacttttcctatacaatatcagtttttcttcccctaaatgagggggaaatgaaatgtgaatatgcatatcttgaggacttgcaaaatacttttaatttcaccttacctcatttacctactcagtcctatctgtttgctttagcacgtgacccatattttgaggtagaaacattaatttaagccaatagctgtcaacagcactgtggaaacacaaaatggtataatacggagtacttgctgtccaaggaaaatgcactgtttagttttatctctctagctcatctttctgctgtttatatcagagataaacattaagagtcaagccaatggaatggcttcttgcttagcagttcatgggtgtggctgaaactgtcaccaaatagatcctctccacagatagtcccactcttctccttctctgttcccatgctcactaccaattcactccacttctgtgtctggctgccaaaagaacagacaggcttcagaaagagtaattggctcccggctgcaaaatgcacggcacccctagctggagatagatggctaaaggctggcagcccaggagagagccaccacctgtgtgcagcagcacgtggacatggctaagccctgcaggcttggttgaagacaaggtcctcgatgttcagttgaaggaaaatcaggagagacagcttgtagagtggagagtaaggaaagattgggatcgacagtgccaaaaccaaaaaccaaaattccaacttcttcaatatctaggaaggaaaattgtcaaggaattaacaagtagtcacatctccttggttccctcagaaatgttctatataaagatttataactgcatgtatatttaatatgtatacatatatgcatacttacaagtcaccactattatcatttgttatctaatcttttcttaacatggcattacatataggcccttacgtgcctatattttactattcattgggatagaaattacacggaaatattttacagctgaaaatctattgttataatgatgatgccatctagaagcatcaggggtaaagtccttatggcaatgtgcttactcagagcctaataataaagttctttggggcagaaatctcctggtgcaatgagaacagaaaatatactcactccttagtttttaaaatcatgctaatttatagtcaccttgaaaaaaatacttttgtttctcaatattttattttgttccaaaatgagtttagccagcaaggtaaaataaaactgaggtggaggagtggatactaaacaaaacaagaaataagattaacaaataatacaaaaaagatgtgaaatagagtcaggaatgagtctgcattctccttgaatggcctgtactatttagcatagtccaatgcccttccattcattcatttaataattacttagtgtctattatgtgccagctactctctatgcaactgttactttttgacttgcagagcaatatcttctttccacggtcctcctctttatactcttaactgcttccctttccttcctccataccttaagtgaaggagtcttttttgttgtgcctcaatccctctgcttgtaacttctcttctaaagtaattaccaaagacaggcgcaaactgtttctaaaattcaacttctgtatttctaaaaagccacaggatgtctccatcttaatgtcctgccagcaccacaaatgcacgtgacaaatgctgctctgtgctgaccctgaaatctcactctccatactgcacacccacacgctgcaggcacaaaactagctcggggttccttcgcattggtgaggtcacacccaaacttccagccacctaggcattaagccatgaaaggatcttgtccctttcctccctcaacctctcgtctaccctccccaccacctttacaacagcataagcaaargtaggtgagcagaatcagggatgtctggaagtcactgccacatgtactgacaagaagaaggcatgacggccatctacttatagaaagatgagttgatgacaagacaaatcacactatgagagaaaaaagggtaaaaataacctggtttaggaatgaaagagatgtaaccatgattgcaaaagattaaaatatttataaaacagtactatatgcaattatgtgataacaaatgtgagaaactaatgctcatacatctgatgactgcccctcagtaa

SEQ ID NO: 667910 - DNA, 1570 bp, Homo sapiens
gaagagtaggggaattgctaaagcaaccaaggacaatgagaagtctgacatgattcacacataaagatcaatggtgaatggaaaaaaaatagatgtagctggagacagggaagaagagcaaatttctgtgttattttatattttgagaactatcttcacaatcccaaaggaaggaagtgaaagttgccaatgagcataagatcaaatttgaagtttatttatttgttactgattcactcaacaaatatttattgagtgcctactgtataacaggtactctttgagagttgcaayatattgctgaacaaaacaaacaaacaaacagaaacctctataaatctctatcacccaagatgtgaagtgggctgcctgctagcatttgaccaacttagcttttctgttccagacctgtggttctgaaaatagcaagtttcatgagtttaaaagaagccaaaggattttcaattcctcttttgctcatttcttagcaggaggctcttgaaggagccacatttgtgcataaaaagacattacaagcaccaggggaaggaaacatgtagagaagtgggataaagaacttttataaattagaaggtacacaaagccaagccatcaaaaccagaaaatgtgctgataatatcaagtgaaagaagcagagaaccaagccctttgaaacaatttctacttgcttaacatctgtgctagagttactaaagctgaagaaatgagggttaatttaccgctttctccaagctaactcagttaaaccagtaagcatcatggagccaatgtgatacacctgttcagatttcccttaatggcacttgaaggtatgcaaacagcagcctctcagtccatagttcttacacatttttaagttagaacctagaaacagaaggagtacaagtctatcctctgagtctccacagaattgaagacaaagatacatgttgatagtggactaatgactaattctgaacatttacaggttttattcaggaaagtctactaaagaattgaaagatgacagcacaagcagttgtcagaagaatgaggtttagtgaatatagtttactttttcttctattcattaccatacaaaatagtaactgacgtcagaaattctactgcaaccaaataatttgaaaaatacccagtaacttttaacttcctcgcctctagagcatagctgttatctgcagactatactaaatttcattagcaatatttagctctttaaagcaatgattatggttatatccttatgtttacccagatgattatttgacttgtctgtttccccccactagactataagtaccacaaaagcaaagtcatgttttttgcttatcacagaatcaccagcatctagcaggtagtagggcctcaataaatatttaagtgaatgagccttcaacctttaagaacatggaattggttctattccaaacataatactatagtatgcaatgcttctgtgaataaaatcatgaggaattgggaagtaagatttgtggtaattcaaattccagaaaagggcacacatagatccatggaaccagatgtactg

SEQ ID NO: 667911 - DNA, 1570 bp, Homo sapiens
gaagagtaggggaattgctaaagcaaccaaggacaatgagaagtctgacatgattcacacataaagatcaatggtgaatggaaaaaaaatagatgtagctggagacagggaagaagagcaaatttctgtgttattttatattttgagaactatcttcacaatcccaaaggaaggaagtgaaagttgccaatgagcataagatcaaatttgaagtttatttatttgttactgattcactcaacaaatatttattgagtgcctactgtataacaggtactctttgagagttgcaatatattgctgaacaaaacaaacaaacaaacagaaacctctataaatctctatcacccaagatgtgaagtgggctgcctgctagcatttgaccaacttagcttttctgttccagacctgtggttctgaaaatagcaagtttcatgagtttaaaagaagccaaaggattttcaattcctcttttgctcatttcttagcaggaggctcttgaaggagccacatttgtgcataaaaagacattacaagcaccaggggaaggaaacatgtagagaagtgggataaagaacttttataaattagaaggtacacaaagccaagccatcaaaaccagaaaatgtkctgataatatcaagtgaaagaagcagagaaccaagccctttgaaacaatttctacttgcttaacatctgtgctagagttactaaagctgaagaaatgagggttaatttaccgctttctccaagctaactcagttaaaccagtaagcatcatggagccaatgtgatacacctgttcagatttcccttaatggcacttgaaggtatgcaaacagcagcctctcagtccatagttcttacacatttttaagttagaacctagaaacagaaggagtacaagtctatcctctgagtctccacagaattgaagacaaagatacatgttgatagtggactaatgactaattctgaacatttacaggttttattcaggaaagtctactaaagaattgaaagatgacagcacaagcagttgtcagaagaatgaggtttagtgaatatagtttactttttcttctattcattaccatacaaaatagtaactgacgtcagaaattctactgcaaccaaataatttgaaaaatacccagtaacttttaacttcctcgcctctagagcatagctgttatctgcagactatactaaatttcattagcaatatttagctctttaaagcaatgattatggttatatccttatgtttacccagatgattatttgacttgtctgtttccccccactagactataagtaccacaaaagcaaagtcatgttttttgcttatcacagaatcaccagcatctagcaggtagtagggcctcaataaatatttaagtgaatgagccttcaacctttaagaacatggaattggttctattccaaacataatactatagtatgcaatgcttctgtgaataaaatcatgaggaattgggaagtaagatttgtggtaattcaaattccagaaaagggcacacatagatccatggaaccagatgtactg

SEQ ID NO: 667912 - DNA, 869 bp, Homo sapiens
tgctggtttgttcattttatttttttacttaaaaggctattttgagccctgtttctttcactgtccagtctagtcctctttgattatatcagtagttgctgagtaagaaagaagccagggtgaccaacgggcctttaaaagtgttgtctcctctacttatgctgaaagagaaggcaattaaataagactagtacctcccaggaggattggactgggatatttttaaccctttaaaaagaatagctgtttctatgttaaaataccaaagaacatggataaacccaacattccaaagtagtgagtccactaatgagaaaaataatagaatgactttggtcacctctcggagacttctgtgtctataaggaatcccaggctggagacattcctagccctctgtattgattcaaaaatacttaataaattaaagctgttgagacttattttttcttctgtcactcagtaaccatgatccttcctcatttaataaacatttggtgactgaatgagtaattaaatgctggttacccacttaatgtgccaggtagtatgatactttctggggactaagccatgaacaaaacagtctagatccctgccctcagaagggttacagtttatgtgattactattttcatgagtaaaagtgaagaaagccatatggaaagatttttatcttgcaagaaaaaacaattatgaaactcttttaacataaacacactgaaactgtatcaaagcaattgtccaaattgtatttatacccaagaatttctttaactaagagagcataaggcatatgtttggaaaaccaccctctttatctttgaccgrcttgcagataaatatatctctccattttaaaccaagaa

SEQ ID NO: 667913 - DNA, 586 bp, Homo sapiens
cccatactaatccagtatgatgtcgtcttaattatatcttcaaagaccctatttccaaataaggtcatatgcacagtgacccagggttaggagtgaagcacacctttcgggggatatacratgcaacccgttataggaactgtaattgacattttcaggaaccctcaataggaaggatctctagcctcaccctaaaggatgcattgtcagtaatgttaaagtttacagtttcattaaagatttttatgtccatgaaaaaaggtctttagatgtaatctaattgctcctaagtgtcaaccccttggtccaggcataactgctgatttccatggctattgattttaacatctgtaaagaaaagttttcatggatttttcttatcagtgcttcattgctctgatagaaagtggtgaaacttagttattctttgtctcttatctttaccaagcatttcttcattaaaagaggcaccaaaaaaactttaaaatagctggtgagcttccatttttagtagcaagttgaaagtgtctatttgctgtagctggttcatattcagagtatgtgttatactttataatcaaattta

SEQ ID NO: 667914 - DNA, 946 bp, Homo sapiens
ggaggggcagtaagactgttccttcggcacttctgtgtgtctctcacatcgagagtcgccatctgtccctggagaataatcggcgtggcagctgggcatggtgtgtcatcagagacaaggaaccttgtctcagatcagaaggcagcaggtttggaggtcagcagcagttttaggactgagccaggttaatcgttgacacctgatgcttaaatggcctcaaataaaaccaggactatacagcttgaactagcccaattgcaggaaagacggcaggtcccaccctgatctttctcatttctttggcgccatggcaatgtgtttgcgtttagttatatgtctttgttgtcttcctcctctttcaggactgaaaaccataaacaaagaatataacaaacagggcaattcttaggaaaggcaaggatgattcatttggcagtatgcragagggttcaaagtacataggatcaagcaggctgggttgataaaagataaccacccctttgattatcattcggcaattggagcttatttcacttagcatttctagttttttctcttcccaaaaggaatagagaaccagctccacaatgccatagcaaaaaaccagagtggacatcaccgcacctccttatccaccagtcccctcaaaatccccatagaagcttttcaaaacaaaatacacacacacacacacacacacacacgcacacacacacattagacacagaaataggtagtaggcatacccttagtataccaccaaccaacattaaaagtattttagtgtgacccacagagcgtgaaaacaaaggaaagtgtagatttcccacaccatccagggctgtacgaatggctgcagcattttgctgcgtgttcctggatctgggcaggatttaacattttgtggctttggggaaataacgggacacccagggtcatcacccaa

SEQ ID NO: 667915 - DNA, 946 bp, Homo sapiens
ggaggggcagtaagactgttccttcggcacttctgtgtgtctctcacatcgagagtcgccatctgtccctggagaataatcggcgtggcagctgggcatggtgtgtcatcagagacaaggaaccttgtctcagatcagaaggcagcaggtttggaggtcagcagcagttttaggactgagccaggttaatcgttgacacctgatgcttaaatggcctcaaataaaaccaggactatacagcttgaactagcccaattgcaggaaagacggcaggtcccaccctgatctttctcatttctttggcgccatggcaatgtgtttgcgtttagttatatgtctttgttgtcttcctcctctttcaggactgaaaaccataaacaaagaatataacaaacagggcaattcttaggaaaggcaaggatgattcatttggcagtatgcaagagggttcaaagtacataggatcaagcaggctgggytgataaaagataaccacccctttgattatcattcggcaattggagcttatttcacttagcatttctagttttttctcttcccaaaaggaatagagaaccagctccacaatgccatagcaaaaaaccagagtggacatcaccgcacctccttatccaccagtcccctcaaaatccccatagaagcttttcaaaacaaaatacacacacacacacacacacacacacgcacacacacacattagacacagaaataggtagtaggcatacccttagtataccaccaaccaacattaaaagtattttagtgtgacccacagagcgtgaaaacaaaggaaagtgtagatttcccacaccatccagggctgtacgaatggctgcagcattttgctgcgtgttcctggatctgggcaggatttaacattttgtggctttggggaaataacgggacacccagggtcatcacccaa

SEQ ID NO: 667916 - DNA, 877 bp, Homo sapiens
tttttgtatgaaacaacaatactatgctctcttagcctgagaacattttttaaaatggattcatctcctgttttgattgatttcatgatttcaggcaaacttctgaatatttcatggttccctaaaatagtctgctgagaagaaaaattgctcataccatcacgaatattcagacccatgtgacagttgtatttctcatcatcaataaattggcaaactgatttatgtttttgtttaaaacacctagttagtgttcactatgttcctaacattgttataagtgcttcwaataataatttattacatcttcatagcaactccatgtggtaggtacaatcctataaagataataatagtaaagtaatgcactttttctgttaaaaactatttttaattgacaaataattatatctatttatggggtacagtaggatattttgatatatgcatacattgtgggatgatcaaatcaggctaattaacatgtacaccaccttacgtatttctttgtgatgagaacacttaaaatccacccttttttcaattttgaaagatttgggagattttatgggtcctttccaaaccatcacaataaagtaagtcgcacaattttattttgttttctggtgcatataaaattatgtttacactacatggtgtagtctaccagtgctaagatttctctgtagcatgcaatgctgtttgatagcattttacatgcagtggaatttctttcaaaattggagtcaatcttctcataccctgcttctgctttatcaactaagtttatgtaatattctaaatttctttgttgtcatttaaacaatacgcacagcatcttcacctggactagattccatttcaagaaaccactttc

SEQ ID NO: 667917 - DNA, 797 bp, Homo sapiens
attgggaagggcaagctgctttattgagtttaccaattcaaatgtcaatctcatccagaaacatcctcacagacacaacacgaaataatgtttaagcaaatatcttcatatcccatgacccaatcaagctaacacataaaattaagcattatacttgtgtacacaaatagacatttttaacttagctgtgcatttctccaaatcctttagcaaattacaaataccaatcaagaatgctgacggaaacatacctacttgtgtgactacaagttaaaacactgataacaccaggtgttggtgaggatgtagagttgactggaactcctatagatcactggtatgagtgaacatgttacaatcactttggaaactggaagtttttgtgatagttaagtatacacttacctatgatccataaatcatattcctagatatttacccaagagcaatgagtatgtgtgtccataaaatgatttgtacatggatgttcttcatagcagctttcttcataatagccccaaactagaaacaaccatcaactggagaatgaacaaaaaaatgcatattcataattagcaataaaaatcactactgatacatgtaataacatagatttgtctcagaaacattatgttgaayaaaagaagcaaggcagaaaagtggctaatttttgattatttatgtgaagttaataaacaagaaatctgtgatgatagaagtcagaatagtagttatcctatagaagagcaggattgctgatatagtttgactgtgtccccactcaaatctcatcttga

SEQ ID NO: 667918 - DNA, 797 bp, Homo sapiens
attgggaagggcaagctgctttattgagtttaccaattcaaatgtcaatctcatccagaaacatcctcacagacacaacacgaaataatgtttaagcaaatatcttcatatcccatgacccaatcaagctaacacataaaattaagcattatacttgtgtacacaaatagacatttttaacttagctgtgcatttctccaaatcctttagcaaattacaaataccaatcaagaatgctgacggaaacatacctacttgtgtgactacaagttaaaacactgataacaccaggtgttggtgaggatgtagagttgactggaactcctatagatcactggtatgagtgaacatgttacaatcactttggaaactggaagtttttgtgatagttaagtatacacttacctatgatccataaatcatattcctagatatttacccaagagcaatgagtatgtgtgtccataaaatgatttgtacatggatgttcttcatagcagctttcttcataatagccccaaactagaaacaaccatcaactggagaatgaacaaaaaaatgcatattcataattagcaataaaaatcactactgatacatgtaataacatagatttgtctcagaaacattatgttgaataaaagaagcaaggcagaaaagtggctaatttttgattatttatgtgaagttaataaacaagaaatctgtgatgatagaagtcagaatagtagttatcctatagaagagcaggattgctsatatagtttgactgtgtccccactcaaatctcatcttga

SEQ ID NO: 667919 - DNA, 1402 bp, Homo sapiens
gcagttgtttttttttttcaaggtggattttgcccactctgggtgtcactgaccaaaggaattccatggacatagtgggttaaaggagagtcmaacaatgatcaagtggggattgtgattgaagccactgggaaggcacagattggctgctttagcatcttagccaggtctctgaatgcatttgagatttattgactctccctttgtcatacttaacaatgccctgaatactgggtgttctgccactaccagaagatgccaagtttgggctatacccttgaggtgtttgtaaaccagatgcctcaaaaatcactacctcaacaagaacagttggtcaaatgccaccacaccataagccaagtcttctattttttcactctttatgattttttctttaaagcaatcgtctgtgtcaccctaagagtttaacactgcccactttactgtcttgatgaaaaagtatgttgatttattttctactcattcacatattcatccaacaaatagttacagagatggtgaacttggcactgggtagacatagaactttcattctggctggggagacaaaaaataaagtaaacaaataaataaacaaggtaataattatggattgtgataatgctgtgaaagaaatagagagtgtatggaggcaaaatggtaatggctactttagattagctagttctcaatctctatttaagaagaaaattgggccggcacggtggctcatgcctgtaatcccagcactttgggaggccgagttgggcagatcagttgaggtcaggagctcgaaaccagcctggccaacatggtgaaaccctgtctctactaaaaatacaaaaattagtcaggcatgatggcgatcgcctgtagtcccagttactcaggaggctgaggcaggacaatcgcttgaacccaggaggttgcagtgagcagagatcgtgccactgcattccatactgggcgacagagtgagactccatctcaaaaaaaaaaaaaaaaagaagaagaagaaaattgaaagacccaaaaatatataccaatttatgacatgtcattttgtggagtctcagcacttactcgtcatttagtgattccctcatcctgcccagaaaggagagatttcttcagcactggtgattggtaaaactcttcttcctcccacggtttcaacgaagactcatgcctgggtccagttaaccaggagggaagtttctctgtgagggctctggagaagaaatccttccgactgaaggcttaatattattattaaccattacccttaaaaatgttccaccatgaagagcaaaccccgtaagtagaataatggaagcattagccatatctaagcagaccttctgagggtctctgctatattcttttgcatcaacaggtggcc

SEQ ID NO: 667920 - DNA, 1402 bp, Homo sapiens
gcagttgtttttttttttcaaggtggattttgcccactctgggtgtcactgaccaaaggaattccatggacatagtgggttaaaggagagtcaaacaatgatcaagtggggattgtgattgaagccactgggaaggcacagattggctgctttagcatcttagccaggtctctgaatgcatttgagatttattgactctccctttgtcatacttaacaatgccctgaatactgggtgttcwgccactaccagaagatgccaagtttgggctatacccttgaggtgtttgtaaaccagatgcctcaaaaatcactacctcaacaagaacagttggtcaaatgccaccacaccataagccaagtcttctattttttcactctttatgattttttctttaaagcaatcgtctgtgtcaccctaagagtttaacactgcccactttactgtcttgatgaaaaagtatgttgatttattttctactcattcacatattcatccaacaaatagttacagagatggtgaacttggcactgggtagacatagaactttcattctggctggggagacaaaaaataaagtaaacaaataaataaacaaggtaataattatggattgtgataatgctgtgaaagaaatagagagtgtatggaggcaaaatggtaatggctactttagattagctagttctcaatctctatttaagaagaaaattgggccggcacggtggctcatgcctgtaatcccagcactttgggaggccgagttgggcagatcagttgaggtcaggagctcgaaaccagcctggccaacatggtgaaaccctgtctctactaaaaatacaaaaattagtcaggcatgatggcgatcgcctgtagtcccagttactcaggaggctgaggcaggacaatcgcttgaacccaggaggttgcagtgagcagagatcgtgccactgcattccatactgggcgacagagtgagactccatctcaaaaaaaaaaaaaaaaagaagaagaagaaaattgaaagacccaaaaatatataccaatttatgacatgtcattttgtggagtctcagcacttactcgtcatttagtgattccctcatcctgcccagaaaggagagatttcttcagcactggtgattggtaaaactcttcttcctcccacggtttcaacgaagactcatgcctgggtccagttaaccaggagggaagtttctctgtgagggctctggagaagaaatccttccgactgaaggcttaatattattattaaccattacccttaaaaatgttccaccatgaagagcaaaccccgtaagtagaataatggaagcattagccatatctaagcagaccttctgagggtctctgctatattcttttgcatcaacaggtggcc

SEQ ID NO: 667921 - DNA, 1402 bp, Homo sapiens
gcagttgtttttttttttcaaggtggattttgcccactctgggtgtcactgaccaaaggaattccatggacatagtgggttaaaggagagtcaaacaatgatcaagtggggattgtgattgaagccactgggaaggcacagattggctgctttagcatcttagccaggtctctgaatgcatttgagatttattgactctccctttgtcatacttaacaatgccctgaatactgggtgttctgccactaccagaagatgccaagtttgggctatacccttgaggtgtttgtaaaccagatgcctcaaaaatcactacctcaacaagaacagttggtcaaatgccaccacaccataagccaagtcttctattttttcactctttatgattttttctttaaagcaatcgtctgtgtcaccctaagagtttaacactgcccactttactgtcttgatgaaaaagtatgttgatttattttctactcattcacatattcatccaacaaatagttacagagatggtgaacttggcactgggtagacatagaactttcattctggctggggagacaaaaaataaagtaaacaaataaataaacaaggtaataattatggattgtgataatgctgtgaaagaaatagagagtgtatggaggcaaaatggtaatggctactttagattagctagttctcaatctctatttaagaagaaaattgggccggcacggtggctcatgcctgtaatcccagcactttgggaggccgagttgggcagatcagttgaggtcaggagctcgaaaccagcctggccaacatggtgaaaccctgtctctactaaaaatacaaaaattagtcaggcatgatggcgatcgcctgtagtcccagttactcaggaggctgaggcaggacaatcgcttgaacccaggaggttgcagtgagcagagatcgtgccactgcattccatactgggcgacagagtgagactccatctcaaaaaaaaaaaaaaaaagaagaagaagaaaattgaaagacccaaaaatatataccaatttatgacatgtcattttgtggagtctcagcacttactcgtcatttagtgattccctcatcctgcccagaaaggagagatttcttcagcactggtgaytggtaaaactcttcttcctcccacggtttcaacgaagactcatgcctgggtccagttaaccaggagggaagtttctctgtgagggctctggagaagaaatccttccgactgaaggcttaatattattattaaccattacccttaaaaatgttccaccatgaagagcaaaccccgtaagtagaataatggaagcattagccatatctaagcagaccttctgagggtctctgctatattcttttgcatcaacaggtggcc

SEQ ID NO: 667922 - DNA, 1402 bp, Homo sapiens
gcagttgtttttttttttcaaggtggattttgcccactctgggtgtcactgaccaaaggaattccatggacatagtgggttaaaggagagtcaaacaatgatcaagtggggattgtgattgaagccactgggaaggcacagattggctgctttagcatcttagccaggtctctgaatgcatttgagatttattgactctccctttgtcatacttaacaatgccctgaatactgggtgttctgccactaccagaagatgccaagtttgggctatacccttgaggtgtttgtaaaccagatgcctcaaaaatcactacctcaacaagaacagttggtcaaatgccaccacaccataagccaagtcttctattttttcactctttatgattttttctttaaagcaatcgtctgtgtcaccctaagagtttaacactgcccactttactgtcttgatgaaaaagtatgttgatttattttctactcattcacatattcatccaacaaatagttacagagatggtgaacttggcactgggtagacatagaactttcattctggctggggagacaaaaaataaagtaaacaaataaataaacaaggtaataattatggattgtgataatgctgtgaaagaaatagagagtgtatggaggcaaaatggtaatggctactttagattagctagttctcaatctctatttaagaagaaaattgggccggcacggtggctcatgcctgtaatcccagcactttgggaggccgagttgggcagatcagttgaggtcaggagctcgaaaccagcctggccaacatggtgaaaccctgtctctactaaaaatacaaaaattagtcaggcatgatggcgatcgcctgtagtcccagttactcaggaggctgaggcaggacaatcgcttgaacccaggaggttgcagtgagcagagatcgtgccactgcattccatactgggcgacagagtgagactccatctcaaaaaaaaaaaaaaaaagaagaagaagaaaattgaaagacccaaaaatatataccaatttatgacatgtcattttgtggagtctcagcacttactcgtcatttagtgattccctcatcctgcccagaaaggagagatttcttcagcactggtgattggtaaaactcttcttcctcccacggtttcaacgaagactcatgcctgggtccagttaaccaggagggaagtttctctgtgagggctctggagaagaaatccttccgactgaaggcttaatattattattaaccattacccttaaaaatgttccaccatgaagagcaaaccccgtaagyagaataatggaagcattagccatatctaagcagaccttctgagggtctctgctatattcttttgcatcaacaggtggcc

SEQ ID NO: 667923 - DNA, 1432 bp, Homo sapiens
ctgagaaaatggtaaagcatgtccttctgattcgttattccacagtgtcttgcacaaagtccaccacattgcagaaacaagattattattgctgaacacagttgcttcagaaagtacttgagaattttcagtatcttttaagaaaattcaattggcctgtttttcccaacattcatgcactatcgacccttcctttttcttaagtttgttcttctctgtatgtaaattatctcaagcctcctgtatccttaaaaacaaagaaaaaaaggaaacagtaataccttccctagtttcctggatctaaggattgtattctgtatctccttctgtcaaatattacacagtttaccattcctgcatttataagctcttttaaaagccagccaaagcaatcctggtgcttcccagatgccagttccacaggaatattggtcccccatgaggcaatttgctaaagcactctggctctttcctgatgtctgcacttatgactcatggctgatttgattacttcccggtgactccctgaatcctttgcttgtttctatacttcaacgctagttcaattttcttacattaattatgttttaagcattaattatgttttaggcttgattcaagtcttatgctgcatcccacactttttaaaaaattaaaaaacaaaacatttttattgcatcccatgcttttaattgacagctcaattcacctgggatttctccatcaggtcacgcagctctgaaagctctctattgcccccttctggtagctggcagactagctcctcaattagcttacatcgtcaatgctaaccttgttgcttgatgttgctatgcctcagatactagtatcttcctttctttcctatattcttcactgccgctgtttcttcatcatctatttattcctcattcctttcagactgacttctgctgcctccagccttctaccaaaacttgccatcccattgatacaaggccctctcaagtcttctggatgatctctgtatatgaaaatattgcccttccctttcytacttcgccccaacactttattctaagaacttgaaattctattagaaattatctactctaggagtcttcaaatttgacaacagattaaaattgccaggacaacttaaaaatactgtttcctgggcccccttcctgaaaattctcaccttttaggtctgaagtagaggtctcttttgacctattgtcatcattaaaatcccaactcccatttgaactttaatttaaatgtatttattcagttaggtaaatcatgcattgggtaaaaatttaaacaatacttaaatccacccttcctgtataagtgttcttacaagctatagagaaatacctgagactgggtaattgataaagaaaagaggtgtatttggcacagagttatgcaacctgtacaggaagca

SEQ ID NO: 667924 - DNA, 1432 bp, Homo sapiens
ctgagaaaatggtaaagcatgtccttctgattcgttattccacagtgtcttgcacaaagtccaccacattgcagaaacaagattattattgctgaacacagttgcttcagaaagtacttgagaattttcagtatcttttaagaaaattcaattggcctgtttttcccaacattcatgcactatcgacccttcctttttcttaagtttgttcttctctgtatgtaaattatctcaagcctcctgtatccttaaaaacaaagaaaaaaaggaaacagtaataccttccctagtttcctggatctaaggattgtattctgtatctccttctgtcaaatattacacagtttaccattcctgcatttataagctcttttaaaagccagccaaagcaatcctggtgcttcccagatgccagttccacaggaatattggtcccccatgaggcaatttgctaaagcactctggctctttcctgatgtctgcacttatgactcatggctgatttgattacttcccggtgactccctgaatcctttgcttgtttctatacttcaacgctagttcaattttcttacattaattatgttttaagcattaattatgttttaggcttgattcaagtcttatgctgcatcccacactttttaaaaaattaaaaaacaaaacatttttattgcatcccatgcttttaattgacagctcaattcacctgggatttctccatcaggtcacgcagctctgaaagctctctattgcccccttctggtagctggcagactagctcctcaattagcttacatcgtcaatgctaaccttgttgcttgatgttgctatgcctcagatactagtatcttcctttctttcctatattcttcactgccgctgtttcttcatcatctatttattcctcattcctttcagactgacttctgctgcctccagccttctaccaaaacttgccatcccattgatacaaggccctctcaagtcttctggatgatctctgtatatgaaaatattgcccttccctttcctacttcgccccaacactttattctaagaacttgaaattctattagaaattatctactctaggagtcttcaaatttgacaacagattaaaattgccaggacaacttaaaaatactgtttcctgggcccccttcctgaaaattctcaccttttaggtctgaagtagaggtctcttttgacctattgtcatcattaaaatccmaactcccatttgaactttaatttaaatgtatttattcagttaggtaaatcatgcattgggtaaaaatttaaacaatacttaaatccacccttcctgtataagtgttcttacaagctatagagaaatacctgagactgggtaattgataaagaaaagaggtgtatttggcacagagttatgcaacctgtacaggaagca

SEQ ID NO: 667925 - DNA, 625 bp, Homo sapiens
aaaatgctaggattacaggcgtgagcccccacacccagactgggacagccctgcttctgagccagccctccagagggttggagagattggcagggcatgggattgtctgaaggccaagagggctgtagaatctggcaagtgtgggcagcagcrgcagcggtctaagctctcagcagctgcctgagctgcacggcccactccctggctcgaagcttgttgcctctgtctttacttattctcggaagatctctgaatgctaaagcacactgtttgttatagttgttgttgttttcccctggaaaaatagaggagcattttaaatagattatactgagttgagtgaactagaaacttaagaagagctaaaagggcacttggcattcgcccctcgtctcctgcaactcttcgcaggcccttcctggccctctagctcagcaaaccttctcccttctccccccggaccagcctctttcctcctgcagcccttgtcgtgttctcctgcctatctaaccctccagccagtctctgctctaatatcacttccttctagtgactgtccccgagggccgcctgccagtctatgttatgtgccctgattaaatgcattcaaagcactagagacttt

SEQ ID NO: 667926 - DNA, 2361 bp, Homo sapiens
ctttgtgtacgtggcaaggtagtgccatagaaggaaaagtttctgagtctacaattgaaggcaaatggaaccagctcaagattttcctcaaagaataacaatggtcaagctctgctcccacaccaaactctccttattatatgatcctctggccttctacagagtgctacattgctcttccatgttgaaaaactttgaactatttcccacagagctagtccagtggtctatttgggtgattctactctgtgttgcatttctagtctctgacctaaccttgaccttgaccctgatcttgggtacttgcttggttttcctggttctcacacccctcatcataaaccatgccctccccagctcccaggccaggtgtgtagcaggctttatctccccttctttactggggtgtctcaatgtctcagccaccctacatacctggaggttcctaacctccatgaaaccctcaaaccacaacctccctcattttgcctaacatgaagtggatcacaggtaacatggcatcctcaggatcacaccataagcaccagatggagaagggttttgcctgggatgagtcaaggtattacattaatgggaccagcttgggccagccactggctgggatcccctctcgtcacatggaatcccttccttattctctttcctcccatgactggtatggttagaccatcctggggacaaactcacccttctcttcactagaggaagggtggtgggagaggaaataacttcttctgcagcctagaggtgagacccagaggaccacaggaatgggcctggagggcaagtggccatagctgagactttaaaccagagaagaaagagggcaaggaaaccagatcagtcaccaatgctaatgtcctctgggcatgtcaacactaagaagatgaaaatggaaaacatgaaaaggaagtatcacttctggcttatgttatgtacttggcacagtgttaatttccatccttgcaccttccccgtgcccttctctgcttcacaggggcctaattaacattacacagtgtcctataggcctcagatgaaagctattataaaagtgcagaaacggtcaccgtcatcacagaccctaatttgataagaaattcctttcagcctgaagtgagtattaactatattcgaaggtctaggaatgttgtcagtgtgtgtttcaaaggttaccactatctggggggaatgcaccatgaaaggagatttttcatggtgaaattataaaagtatttagagttgaaaaaaagaaaagacacaaacattgagagattatgagtgacaatgaaatcagactagttagcagaaacaaagcagggcctcaaccaggtgacagcaggactgatttttacgtcaggtcttcaggtcaagtctattaaaggaacagctgggcccatgagctttcattgcagtgctatttctctgcattgaatactggctaaaattaatggggcataggatagggctggaaaatttttattaaaatgagaggcttttgtggtaaattatggtagctaggggtttaaggttgaggggaggggaaggtcctggaacatttcttctaccaattgccctagcaattatatccatctttggaatcttaatgcctggcttctaatcccaggtaaacttggaacaagtgatttaacctttttgtgccttaatgtcctcatttgtcaaatgaaaatagtgaaaatgccaaccgggcacagtggctcacacctgtaatcacagcactttgggaggccgaggcgggcagataacccgaggttgggagttcgagaccagcctgaccaacatggagaaaccccgtctctactaaaaatacaaaattagccaggcatggtggtgcatgcctgtaatcccagctactcgggaggctgagacaggagaattgcttgaacccaggaggcggaggttgccgtgagccaagatctctccattgcactccagcctgggcaacaagagtgaaactctgtctcaaaaaaaaaaaaaagaaagaaaagaaagaaaaagaagaaagaaagaaagaaggaaagaaagaaaaagaaaaagaagaaagaaagagaaagaaagaaagaaagaaagaaagaaagaaagaaagaaagaaagaaagaaagaaagaaagaaagaaaragaaaagaaagaaagaaagtagtgaaaatgcctaccttatagggttggtgtgaggataggtgagttcatatacagaaaacactgtcacatagaaggtactgccagagagtttgccatcattattattatggtcaccattgttattgttttctgccctgggaaacctcttgaatagggaatctgttagagcctgaatgcact

SEQ ID NO: 667927 - DNA, 2036 bp, Homo sapiens
gttctaatcttagagtatgtctgcctgggcattacttctatcatatcactatgctacacacactaaaaaattttttaaaaatttaaagaccaaatcgttctgcaaacttgtagtttaataaaactctgtaaaaagttctaaattttgccttttttaatgtcgatgctttagtggctgcagtagttgcagtgatgtcgttacactaaggaacaacagatgggttgaagggaagaacaaagmatttcctactatctggaagcctgcagatattgaaaaagcagtgagataactttttaactgcatccctccattattccccatgtgattgtgttttaatttttcatatatttgacttaaattttaagtactctggatattgtctccatataaactgtgttgcagctgcttgatcactcacacaccagccccatgctgcattcacatggcatgcacgttgctaaggttttggaaagtggaggtctttatctaactataggaccttaacagatatatttgcttgctccatcattagtaaagttttataaaaggcaaaaagcagaatttttacattcctaaatgctttaagttattgcgacattcaatcctaaatgcgaactgtagatattacaattcaaagtaatttccttctaaaaaaatttttttttttttttgagatagagtctctctctgtcaccaggctggagtgcagtggtgcactctcggctcactgcgacctctgcctcccaggttcaagtgattctcctgcctcagcctcctgagtagctgggactacaggcacacctgtagcactacgcctagctaatttttgtatttttagtagagacagggtttcatcatgttggccaggatggtcctgatctcttgacctagtgatctgcccaccttggcctcccaaagtgctgggattacaggcgtgagccaccacacctggccccaagaaaatttttaaatattcaattaatatgaattgtaactacccatttacaagaaaatttttaaatattcaattaatatgaattgtaactacccatttaaaatttggaggtaacaagatggaataagaagatgagagaaatggaaataaatacaagttaaagataaaaagtagtatacaaaatgttgcatctgaaatgcaaacactaccatttttttcattgtattttgactactgaaatactagtaatttctaattcacaagccataacttttctctcaaataaaaagaaaaaacacttttacataacactgtccttaaaatacttaataatttatctttcattttttattcattccaaataatttatgtttgaatctaatgcatctaaactattttagatttaaatgaaagaggcttggctgcatcattagttttccaaagactcaagttgattttcagaatgtctgagactttctaaaagatatttaaggaactcatccaggcccttccacccctcagttccacactccaaaagtaataacttttgttttaggcttccactttctggtttttccaggtgtttaccctaacaactctaaataacatacgtcttgttagatagaatattgaatcgcactaatctgaaagggaagcaattatcttagagaagggaaatgtatcagagtttttcagtaaaagcaaaaattgttgggacttctagcaatatggtggataaatactctgaatggacctaccgtattctgcttttctatattgtaacaccaactcacttaggctgtaattagctgtttacatgttttcttatgagctcgtgcatgttatttgatctctctatgcctcagttacatcatctataaaatgaggataacaataatagtaataatagtagtaactgttttagaattaaatatgttaatatgtccaaagaattcagaatattgcctggcacataatgatacaaattgctattatcatcatataaattcttagaacagtgttattgggaaataacatgttactcattagccaataaatgtatgctcataaaacatcttca

SEQ ID NO: 667928 - DNA, 1861 bp, Homo sapiens
tggctcacacctgtaatcccagcactttgagaggttgaggcaggagaatggcttgaggctaggagttcaagaccagcctggacaatataacaagatcctatctataaaaaaaagaatttttaattaactgagtgtggtgacacatgcctgcagtcccagccacctgtggggctgaagtgagaggattgcttgaactgaggcattcaaggctgcaataagctatgattacaccactgcactccagcctgggaaacagagtgagaccctgcctcaaaaaaaaaaaaaaaaaaaaaaaaaggcatagaccacagcataccaataactaatatctaagtgaactcaaagcaaacaaatgaaaaaataagcaaacaaaaaaaattaaatggaacccaaaagaggtcattttatagtgacaaatttttttaactcaccaaaaaaaacagctatcaggaatataagctgactaacatagaatatctaaaccaaaaagcttattcaacagaaaactgacagaaaaatatagtaatgaaaaactaatattctactcttgcattataacaaatacaagaaaatatcaataaaaatgcagaggtgctaaatatcagaatttataccttacataaattccagaaatatttatgaattttctgtggaatgtaagaattcaaaaagaaaatccttaaaatacaggatagcaaaaagtatataggctcacattctctttctataatgcaaaaaaaaaaaaaaaaaaacaaaaacgacaaattaacagcaaaacttaaaccaaaaaagaaaatgtcactttggaactaaaaatattttgctaataaattcggtttcaagaaaaaatccttcttccctctatgagtctgttttttcatattttaaaaaggtttttcaactaagagatcttataaggtctttagagccacagctcttcccctgacacataaaaaccacaatgacttttaagtatttaggaagcatatatcatatgttcatctttctcactgattattcagtgtgatatgcaaaagtaaaatggaatgtattatctagtcggagagttaggaaagtcaaatagtagttcatcaacataattatgaatgtgatagaaattcagagaagagggagaccatgataagcaggaaaggcttatttatgtgacttgagctatgtctcgaaatagaaacatgaaaatccagaaaagatatgggggaaacattctggtcaacaatattagatcaatgaaagctaaagaacaaagtattattgagcacacatggacataaacatgggaacaacagacactgtcgactacaagagtggggagggagggagtggctgtgggtggaacacctacttattgggtactatgctgactacccgggtgacagaatctgtaccccaaacctcagcatcacacaatatacccatgtaacaaacttgcacttgtacctgctgtatctaaaataaatgtttaaaaaaatttaaataagctaggaaattttttaaaaagaagaaactgttaagtaacaaayttaaaataagtgactattgtggacctagcctaggaagaaaaacattgaagtactagaccaaattgctcaaactaaaaaatgagctgcaataagtactgcaataagattttaaagcttgctgtgagctgccagcaaagtttagaatggttctcatctttgtgaagtttcattcaaatggacttccacacttgtagatatatttatttgatatctccagagaaagtaacattactgataaatgatgatctttatttgccacttgagaaactgaccacagcagaagtaagatgctgggctcttctgattctgtaacctgtgta

SEQ ID NO: 667929 - DNA, 1837 bp, Homo sapiens
atttaagttaatatctgactaaaatttgaccagaaacatggttttaaaacactgattctattataagttaataagcggcatgaggcatacattattaactcattatgaaatttcttccaggactttcaacgtgcccctaggttttagctgccaccaccaaaacaacctctattaatctactttgcagatgctctacaccacttggccattacacacaatgagccaagaatgacccttttggctaactttatgcttaacagattagaaagaatttcttcaattaacattttaatgcaaaaaaacacctttcaagaagatactaggtttttaaaaagtggcttttattattttttagagatacggtctcactccaggctggagtgcagtggcacaatcacagctcactgcagccccaacctcctgggctcaagtgatcctcccacctcagtcaggctcccaagtagctgggaccacaggtgcaccaccgcacccggctaattttttattttttgtagagatgggtctcactatgttgcccaggatggtcttgaattcttgggctcaagcaatttctcgtgccttggcctcccatagtactgggattacaggcatgagccactgaaaacagggcttttaaataaagcttagttactacactgacttaaaataagcaattctttcaacttcagattccaaaactgggagaggaggtatacaaagtcagtaactcacatggtgggatgcaggaagctggtgatgtcagtttaccgattccagctgagttactgggaaacagaagggacgtttccatcccctacagggttgtttcatcaatattccccctcaggtcaactaattgttgtcaaaggatattgtgtatccttcagatacaaaaactttggctactgagacccatttagatagctcaggactgatactaaattcctttttatttgtaccattttcaatggaaagttttctaaactgtactgtaaacttacctgttcacttaagtagatgacagagaatcttacacatttaggactgtcttattgttccttctctgctacaggcttggaagccagatgaaacggcttactcagaattgtttgtcaatcagagtaaacagccctgaacactgctggaaaaagctgacctgtttgtgatggactctgactctgctgaacagactactttactatttctccactgttgagagtaaacaagattgcaggcagttgagttctgaatattatttgtgtgacagacctatacaaaagtttagtaaatcataagatattaaggaacttggcctgtttattatttgtatgtacctaaaaacagataaacccttacctaaaattctaagatattaaatgcagcaagtttccctgattaaacatcatttccaagaaagacttacracgaagggaaaaagaaaggtaagatcgagttcctgatcctaaactagtaaggaagaaaaaacactgcaaacacgtgctactaggcctcttctgagggctgctcggtagtgctgaaagtgccacaggagaggacagaaaaaggaatcccaacaaaagacaccccaggaggggccctggggggtgcagcatcagggagggggcttgaaagatgagtaggtttcaacaagtagaaatctgaagaaacagcatttccagccgatgggagtggtgaatagtctggcgacataagaatgatgcaatttcaaaacaattttttgattgggtcatactgtaaaggattttaaataccatgactgttattttgaagatataaggggaaaccactagcgaagaggaggagggggaggaagaag

SEQ ID NO: 667930 - DNA, 1837 bp, Homo sapiens
atttaagttaatatctgactaaaatttgaccagaaacatggttttaaaacactgattctattataagttaataagcggcatgaggcatacattattaactcattatgaaatttcttccaggactttcaacgtgcccctaggttttagctgccaccaccaaaacaacctctattaatctactttgcagatgctctacaccacttggccattacacacaatgagccaagaatgacccttttggctaactttatgcttaacagattagaaagaatttcttcaattaacattttaatgcaaaaaaacacctttcaagaagatactaggtttttaaaaagtggcttttattattttttagagatacggtctcactccaggctggagtgcagtggcacaatcacagctcactgcagccccaacctcctgggctcaagtgatcctcccacctcagtcaggctcccaagtagctgggaccacaggtgcaccaccgcacccggctaattttttattttttgtagagatgggtctcactatgttgcccaggatggtcttgaattcttgggctcaagcaatttctcgtgccttggcctcccatagtactgggattacaggcatgagccactgaaaacagggcttttaaataaagcttagttactacactgacttaaaataagcaattctttcaacttcagattccaaaactgggagaggaggtatacaaagtcagtaactcacatggtgggatgcaggaagctggtgatgtcagtttaccgattccagctgagttactgggaaacagaagggacgtttccatcccctacagggttgtttcatcaatattccccctcaggtcaactaattgttgtcaaaggatattgtgtatccttcagatacaaaaactttggctactgagacccatttagatagctcaggactgatactaaattcctttttatttgtaccattttcaatggaaagttttctaaactgtactgtaaacttacctgttcacttaagtagatgacagagaatcttacacatttaggactgtcttattgttccttctctgctacaggcttggaagccagatgaaacggcttactcagaattgtttgtcaatcagagtaaacagccctgaacactgctggaaaaagctgacctgtttgtgatggactctgactctgctgaacagactactttactatttctccactgttgagagtaaacaagattgcaggcagttgagttctgaatattatttgtgtgacagacctatacaaaagtttagtaaatcataagatattaaggaacttggcctgtttattatttgtatgtacctaaaaacagataaacccttacctaaaattctaagatattaaatgcagcaagtttccctgattaaacatcatttccaagaaagacttacaacgaagggaaaaagaaaggtaagatcgagttcctgatcctaaactagtaaggaagaaaaaacactgcaaacacgtgctactaggcctcttctgagggctgctcggtagtgctgaaagtgccacaggagaggacagaaaaaggaatcycaacaaaagacaccccaggaggggccctggggggtgcagcatcagggagggggcttgaaagatgagtaggtttcaacaagtagaaatctgaagaaacagcatttccagccgatgggagtggtgaatagtctggcgacataagaatgatgcaatttcaaaacaattttttgattgggtcatactgtaaaggattttaaataccatgactgttattttgaagatataaggggaaaccactagcgaagaggaggagggggaggaagaag

SEQ ID NO: 667931 - DNA, 1837 bp, Homo sapiens
atttaagttaatatctgactaaaatttgaccagaaacatggttttaaaacactgattctattataagttaataagcggcatgaggcatacattattaactcattatgaaatttcttccaggactttcaacgtgcccctaggttttagctgccaccaccaaaacaacctctattaatctactttgcagatgctctacaccacttggccattacacacaatgagccaagaatgacccttttggctaactttatgcttaacagattagaaagaatttcttcaattaacattttaatgcaaaaaaacacctttcaagaagatactaggtttttaaaaagtggcttttattattttttagagatacggtctcactccaggctggagtgcagtggcacaatcacagctcactgcagccccaacctcctgggctcaagtgatcctcccacctcagtcaggctcccaagtagctgggaccacaggtgcaccaccgcacccggctaattttttattttttgtagagatgggtctcactatgttgcccaggatggtcttgaattcttgggctcaagcaatttctcgtgccttggcctcccatagtactgggattacaggcatgagccactgaaaacagggcttttaaataaagcttagttactacactgacttaaaataagcaattctttcaacttcagattccaaaactgggagaggaggtatacaaagtcagtaactcacatggtgggatgcaggaagctggtgatgtcagtttaccgattccagctgagttactgggaaacagaagggacgtttccatcccctacagggttgtttcatcaatattccccctcaggtcaactaattgttgtcaaaggatattgtgtatccttcagatacaaaaactttggctactgagacccatttagatagctcaggactgatactaaattcctttttatttgtaccattttcaatggaaagttttctaaactgtactgtaaacttacctgttcacttaagtagatgacagagaatcttacacatttaggactgtcttattgttccttctctgctacaggcttggaagccagatgaaacggcttactcagaattgtttgtcaatcagagtaaacagccctgaacactgctggaaaaagctgacctgtttgtgatggactctgactctgctgaacagactactttactatttctccactgttgagagtaaacaagattgcaggcagttgagttctgaatattatttgtgtgacagacctatacaaaagtttagtaaatcataagatattaaggaacttggcctgtttattatttgtatgtacctaaaaacagataaacccttacctaaaattctaagatattaaatgcagcaagtttccctgattaaacatcatttccaagaaagacttacaacgaagggaaaaagaaaggtaagatcgagttcctgatcctaaactagtaaggaagaaaaaacactgcaaacacgtgctactaggcctcttctgagggctgctcggtagtgctgaaagtgccacaggagaggacagaaaaaggaatcccaacaaaagacaccccaggaggggccctgsggggtgcagcatcagggagggggcttgaaagatgagtaggtttcaacaagtagaaatctgaagaaacagcatttccagccgatgggagtggtgaatagtctggcgacataagaatgatgcaatttcaaaacaattttttgattgggtcatactgtaaaggattttaaataccatgactgttattttgaagatataaggggaaaccactagcgaagaggaggagggggaggaagaag

SEQ ID NO: 667932 - DNA, 1406 bp, Homo sapiens
tatcagtacaggtagtcttcaacagccctgtaaggcaggtgagaattccgaggttgggtaatttctaccactattaagcctgaattggatctttcttgagcccagtgcccctgttcttttctctctaccatggttctgaaaccaccgatgctgattccacaggtctggagtgggactcaagacacacgtaagctttacaagctccccgtgtcatgaatctgatgcacacccaagtcatagagccgtgctgtctcttcaagtgccctgaccggcatggagcagctgctcactgtacaggtggctgatgagccataggagcagggccctgaacaaggcaggaaggcagaaccatttcccaatatactgagcagccttggtataagaaaaatattacaaaaccataatcatgattatgcttcaattactccaaaatgagtaagtgaaaagaaaaaagaaagacagtttcagcttttctaaactatgattaagcccacaatgattaagcaccagacacaaagagttgaacgggaggaaaaggtgtgggaaagcaaggaaaagcggagtgcaatcatccgccacactcagatccaagccacaaagaaggggcgcctacgggtcttgttctgcctgctctcttatgaaataaattatttggctagcttttctactcttgattaacctcttacgagttattagatagtaacagtcattcctttgtccaaaacatcatgcttaaagttgctggtttgcaagaaactgtactttgtaatgacgacatcacttaacaatgggatcaaccttacccctctccaatactgcaacgacctggagacctcagcagcctgcacattactcttgccccaaatttaatctaaacttaattaagtctttagacttaacttctattttagaaaaaatacacggtagaggatcaagttaaacaacatcacgagaaaaaaaaatcacataaatcgaggatgaaggatattctgagaccactggcctgatctttgaaaagtcaacgtcatggagaagaaaagaaaaagatgtgggggactatactggattgaaagaaactaaagatacacaacagcgaaatgtaacacacaacctcagttatatcctggttcaaaaaaacacaaaaaacaaacaaaaaaaccacacctaactaaaaaagggcatatggggaacaattaggaaaacctgaaaatggactggatgtaagataatattagaaaagggctgccatttttattaggcacaataagggacctaataatttcaatgattttcaggagatcaatgccrccctgggtgcaggtgagtgccaccatgtctgcagctggctttcgagtgattccacaaagaaaccacaacaaccacagaagcacagagataaataaatc

SEQ ID NO: 667933 - DNA, 935 bp, Homo sapiens
cctgctgtcaacttcctgggaaggagacctctggaaagttggtgtttccaccattcaagttccctcgcacactccatgactgaacagcggtgtaaccttcagcaagttccaagtttcttaagctctctgagtcccagttttacttcctagtatgttgtaagaatcaaatgacagactgctggtgacacatagtaattggatcacagtaaatctttgagagatatggggagagagatagaaggtcctatctattggtgactcctccttgttctggatcccctgcccatcattcctgccagctcaccctgtagttttttttttttttttttaaaaggtggaaatatgaacagaggcttaataagaacaaaataaaaatttatttgcaaaaaataragtcttaatttggggttaattgctctgtttactgaatgaagctcatgaggcactgtgctttggactgctctcctttcctcccctctattattttggtcataagttgtttagcaaaaccaacatgttaggtcctttaggaaactgaacgctgatatgtttccataaataatttggtcaacttttagtctggaggctggatctggaatgtaaacaattacatggcagtagctccctaatactgaaacagtccctgacagtctctgtctttctgcaccatccttctacttgccctggtgaggaattagcttgccactggaagcagcctccattcaatcactacagccccaggggaatgacaagagcagccaggccctctattagatgtgagcatcccagaccacactttgacacttctacctatttcctttgacctttgatgaaactgtcagtttcctcatttattatcctgtctcagattagcttttttttccccctccctggtttctagtttgcagctgtctcttccccatcaagttaacttt

SEQ ID NO: 667934 - DNA, 651 bp, Homo sapiens
ataattatatacaaatggtaaatataaataagtaattctcagatcttggccacaccagaaaacttttaaaaattccctgccaactcaagtgaaaaggggcatgtgttagccgcaggctccagggctaattttttaaagaaaaasaatataacttgtaacccaggcctttgcaaaagcagacaccatttttgtgtcagcaaaacatcttagctaaccccctgaatgcccgtgcaatcatctttttctcagctaaaggatggagactggcactagagaaagaagtgtcaccagcatcttggtttctctcatcctgacagaccatggactccaccattcaaaactggtcagaaatgaggtcattaatcacacaatagctttgcttcaaagatctgaaaacaattcaccaaagtttttgagtagagataattttaacatctgtgtagcttaaaaatagtgtaagtggtaattgtacttttcaactgccaagtagggaaacttttaccttacctagggaaactctggtctaggtaaaatgatcaagagggttgattttctccaaaagaaacaaaacttttaagtttagcggagtaaatccagagatatatttctcatctccctatgtccctgcagtccctgttaagatgcccaaaa

SEQ ID NO: 667935 - DNA, 588 bp, Homo sapiens
ttttatttgtttgacatgcttttcatcacatgctggtcttgaaatgatgaatgtcatctgaaatctctatcagaatgcttaaaatgtcttccatattatgttctattaacaatcatagtttttgtcaaagaataattttatgtttaattatttggtctctcatttttatgttgcaattttttcttaaacatatggtgcaattggttatgcaattttatttaagaaagaagcaatgaaaagctattgaaagttctctgtgtgtgaatagggattatctatttgtgaaagtttaatggaagataattaggcagaagaccagcagttctgttaagatgatctcagtatctcaacaatgaccactcaattgttgtgatcctccgtcataagttgagagatggaacatttaatccttcttccccctccttccagctcatctcatgcrttccattaatcatgtaggatgtttttagatcctctctgagtctttccagagttctgaaaagcagagctgcagttcctttgtcaagagaatcttactataagagtattttatattgaagcttcttccttttttgctaaacccattat

SEQ ID NO: 667936 - DNA, 1661 bp, Homo sapiens
ggagagtttttagttttaagcatatgtttatttattaagtacctgtaattttcattttttagaaaaaaaatctaactatctttaaggtgaaaattctaaaaccaacttaaatatttatttggaagaagtttcagtactagtacctttttgtttkgccctaggtttagtagtgcctctcatctaggcttgtttttttaaatgtatcaacttatgcacttatactttcaatcatatctttggccaaggggaattgcttaggactaactctcaaaacaagctgagtcttatccatttgaaatcaatagaagagaaaacaattctgctttgttaaaagaatggaacaacaaacctcaaaagacaaatgacagtttagagccatgctgaaaacatttaataattaataggcagcaaataaattcatcaaattcctgattgctagcaatccctactttggatattagactttattaaatatacatgtaaaatttctagcctaaacaatgaaaaaataaagtgttaccttttcaaagtagtagaggggattatttgagttaaatggaaaaaagtacagccaatcaaaagaagataggtaaagaaagagaaagaagtcaaatagtggaaagaataaaggagaaaaataagatgatgaaaaaaaagctagtatcattaatccaacaaatcattgtagcatactcttcaataaaaagaataaattgttaaactggattttccctaagatatatgtgttttataaaatattattaagttggcacaaaagtaattgtggttttgtcattacttttaattgcaaaaatcgctgttacttttgcaccaacctaataaaaatatttcaaaatactaagcaataaaacattaaattgcagtagaaaatttaaaatgtgacagtatgaccagagattttattaattttctttgtttataatagacaaagcaaatggaaaaacagaatataatatatttaaactatatagttaacaaatataatctaatagatacacataaaaccttgaaccaaacagttgaaaaatacgtattttttcacacatacaagtaaatgaacaagaattggttacattctggattataccactagaaacactagtatcacacaaacatgttctcaggtttccttgtctcatctgtaccatgttctttatggggaagttagcctagatatcaacagggaaaatgtaaaaaaagaaaactatacatttgaaaattcacaaaaacacttcaaataactgagtggccaaagaagaactcataataaaaattaaaaataactttaaataataataaaatatatctcaaaacttatacatctaaagttgtacagagaggaaacttagagacattacaatacagatcatattagaaaagctaaaaggctgaagattaatgagctaagaattttaggttatctaacattaccacaaaagtaaccacaagagtaaccacaaaagtagcagagattaagcataaaaatggaagtttatgagtaggccaggatccgtggctcgtatctgtaatcccagcactttgagaggctgaggcaggaggattgcttaagcccatgagtcttctcacttactctaaattccattactggccagataacagaagaaatgttaattatttcc

SEQ ID NO: 667937 - DNA, 1661 bp, Homo sapiens
ggagagtttttagttttaagcatatgtttatttattaagtacctgtaattttcattttttagaaaaaaaatctaactatctttaaggtgaaaattctaaaaccaacttaaatatttatttggaagaagtttcagtactagtacctttttgttttgccctaggtttagtagtgcctctcatctaggcttgtttttttaaatgtatcaacttatgcacttatactttcaatcayatctttggccaaggggaattgcttaggactaactctcaaaacaagctgagtcttatccatttgaaatcaatagaagagaaaacaattctgctttgttaaaagaatggaacaacaaacctcaaaagacaaatgacagtttagagccatgctgaaaacatttaataattaataggcagcaaataaattcatcaaattcctgattgctagcaatccctactttggatattagactttattaaatatacatgtaaaatttctagcctaaacaatgaaaaaataaagtgttaccttttcaaagtagtagaggggattatttgagttaaatggaaaaaagtacagccaatcaaaagaagataggtaaagaaagagaaagaagtcaaatagtggaaagaataaaggagaaaaataagatgatgaaaaaaaagctagtatcattaatccaacaaatcattgtagcatactcttcaataaaaagaataaattgttaaactggattttccctaagatatatgtgttttataaaatattattaagttggcacaaaagtaattgtggttttgtcattacttttaattgcaaaaatcgctgttacttttgcaccaacctaataaaaatatttcaaaatactaagcaataaaacattaaattgcagtagaaaatttaaaatgtgacagtatgaccagagattttattaattttctttgtttataatagacaaagcaaatggaaaaacagaatataatatatttaaactatatagttaacaaatataatctaatagatacacataaaaccttgaaccaaacagttgaaaaatacgtattttttcacacatacaagtaaatgaacaagaattggttacattctggattataccactagaaacactagtatcacacaaacatgttctcaggtttccttgtctcatctgtaccatgttctttatggggaagttagcctagatatcaacagggaaaatgtaaaaaaagaaaactatacatttgaaaattcacaaaaacacttcaaataactgagtggccaaagaagaactcataataaaaattaaaaataactttaaataataataaaatatatctcaaaacttatacatctaaagttgtacagagaggaaacttagagacattacaatacagatcatattagaaaagctaaaaggctgaagattaatgagctaagaattttaggttatctaacattaccacaaaagtaaccacaagagtaaccacaaaagtagcagagattaagcataaaaatggaagtttatgagtaggccaggatccgtggctcgtatctgtaatcccagcactttgagaggctgaggcaggaggattgcttaagcccatgagtcttctcacttactctaaattccattactggccagataacagaagaaatgttaattatttcc

SEQ ID NO: 667938 - DNA, 633 bp, Homo sapiens
tgttggtcaggctggtctcgaactcccgacctcaggtgatccgtgcgtctcggcctcccaaagtgctgggattacaggcgtgagccaccgcgcccggctcagatgaaaatttctkgagatgctctttgaaaaaggagtctatagtcagatacatttcagaatgacttcattctaaatttcatctctgggagaatcaccatgtatattagtgtcacaggttccttaaggtgttgctttaccagccagaaacctctgtggtcagcagcaccttctgcctgagtattgcttgcacccactgggctcgttctgcccactctgtccggcaggctgtactcagctcacgctaccagccaggatcccatacctgctaaacgcaaaccaggcgcagagctgcgaggattgtgtaggtgagcaagcgcggggtccacccactgtgcacagccaggcgtgctggctgctgcagcagggcaagcagctccaggtgccagcacaggccccgtgcaaggctgtgactgaaccagatatactgcacgcagcttctgctgcaggcacccgtacctggacaaggggaatgcagtggcacctggaagcctggaggcagcaggaaccgtagaaccccaaagagggggtcgc

SEQ ID NO: 667939 - DNA, 620 bp, Homo sapiens
cgttactctgaatttcataaaacagaattatacaaataggaactaccagtaagatatattcwaaattatctaacaaatattcttaacaaaaccaaggatttattgttaaaaatatttttaccaagcattctctggaataagtcacatataaagctgtgccttcataacctcagtaagtactcgaaagctaatttaaaagtgctttttaaatatgtggaaaattgttgagatttgtctaatttccacaagaacaggcacattcttattttgagctacgttttgacttattttctgggttttgtctagatcattccatgctttattgtatagtgaaacataaggtttataatatattcattgtaatatgaaagactcaatttgttatgaacacttaaccaatatatttcaaattgtgctaacccactagtagcttataggtataagcattgcatttcatgatttagaaaggacaggtttaatgagtgatcttttattttaatagcacatttctctgccttatgtcctcattgatgacaagcacatgatgcaatgtatcatatgtagtaatgggatgtgtaatattcacagattgctgccatgtgttcttttagctttctgtc

SEQ ID NO: 667940 - DNA, 620 bp, Homo sapiens
cgttactctgaatttcataaaacagaattatacaaataggaactaccagtaagatatattcaaaattatctaacaaatattcttaacaaaaccaaggatttattgttawaaatatttttaccaagcattctctggaataagtcacatataaagctgtgccttcataacctcagtaagtactcgaaagctaatttaaaagtgctttttaaatatgtggaaaattgttgagatttgtctaatttccacaagaacaggcacattcttattttgagctacgttttgacttattttctgggttttgtctagatcattccatgctttattgtatagtgaaacataaggtttataatatattcattgtaatatgaaagactcaatttgttatgaacacttaaccaatatatttcaaattgtgctaacccactagtagcttataggtataagcattgcatttcatgatttagaaaggacaggtttaatgagtgatcttttattttaatagcacatttctctgccttatgtcctcattgatgacaagcacatgatgcaatgtatcatatgtagtaatgggatgtgtaatattcacagattgctgccatgtgttcttttagctttctgtc

SEQ ID NO: 667941 - DNA, 2164 bp, Homo sapiens
gcctattaactacatgctatcatctatttttagaaaaagccaagaatgtttaatggctcaagatcacttgataatttattaaagatatttctttccgcttttcaatccacattatgggttaataaaaatatgcctgttaaaatgaggtatttaatttatttgttggacaaaaatattttgaaaaaaactcacttcaagaagaatttgagaattaccagtttgttttgttctagctgtggatatacatttgtatgtggagaggtgtctgcgaagagcaccatgtagaaatagaactggaggcaggacagctgcaggacacattgctgtgaggcttcagagtcaggtgcacctggattttaattcgatcccagatcctggctctaactcaccacagttgtgtgtactcgcacagagaactttacctccttctatacgtgaattccctcatttgtaaaatggggataaaaaatatttacatcataagagtactgtgtaattttaaatttaaaatgagattattattgatatgctgtggctctgtgtgtgtccctatccaaatttcatctcaaattgtaatccccacttgtcgagggagggacttggtagaaggtggttggatcatgaaggtggtttccccatgatgttctcgtcatagtgagtgagttctcacgagatcgaatggtttaaaagtgtggcacttcccccaccccgtcctctcctgctgctgtgtgaagaacgtgcttgcttctcctccgcctttcgtcatgattttaagtttcccgagtcctctcagccatatggaactgtgagtcagttaaacctctttctttataaattagccagtctcacgtagttcttcagagtggtgtgaaaatgggctaatataattgcaaataatttttcacaatggttgttatctaaatccccaacacatgcattttgttattttttgttgttgctaaagatgaatcagtcataccagctgaagaaatgacaggaagacttctctgtttggattttagagttttccaatgattactatatgttggtaattttgttcactgattaactttaaaaagcactaattaagatgtgagattaaaaacaaaatatgcaaacatgaactttaaataagctctggcatacaagtagtgagaaccagactaagaaggctaaaggtagctggcatataatgactcaaattgagagctgaatgcgtgccaagctgtgttctaagtagttaaccagggttaagttgattcccctccgtattcacctgtgtagttctttggactctagccatcagcctccaaaaaagacccttttgaacttagtgggccctcggcacttttgtcttcacagacccctctctccatttaaaaatatcaaaaagtatattttataactgggttgatataaagatgaatacgttaatatcatatattaaaatagtttatttgacctaaaagttttttaatactgattttaaaagacatgaaacatttttgtgggcctttaaaaatactgtgggccatagccgatgtacctcccccgctgatcaaaatggggcccttcctggcaagagtattgtagtcttaagcataccagttcagagactacagtactcttatcaacggccactgcagatgctttgagaaaataaaagaaacggaggacaaagcaggtggcattccaatttatttttttattgtaaggacagacttatacatcattgttgaaagaattttaacctgttttaaacttctgtaaaattgtttctactgccagatgaaattagcttattttgcctgcagatggtgctagatcctcagttcccaggtaacacattttgataagagaaaatattaaatatttaaggcaaacatgacatttttcaaaaataaaattcttcataattaatatgacatcagtttttcctgtgagcctagagtcttagttatacctgataatctccaataattatagccacttgtctgagagcagttaaaaattctcattgtgcttgtaaaagatactactttccttcgaagatttggtgacttaactgaatccgtctgagattaaaatttytctgagtaatattaggttgggcagaaaacattttttacttcctgtatacattgaacttggaaaaaaactgtga

SEQ ID NO: 667942 - DNA, 1244 bp, Homo sapiens
ggttttaaggatccaatagcagaactaaaatccaaattagcaagagtatagaaaagtattcatgtatagtaaactgaataatggcctccaaaagttttccatatcctaatccttggcacttgtgaatgttacctcacatggaaaaaaaaaaagttttgcagatttgattaaattaaggatcttgaggggtatgggggttatactgggtcatctatgtgggccctaattgcaatcacaagtgtccttgtaagagacaggaagaaggagatgtgatgataggagagaaagcgacatgaccatggcgacagactggagtgatgaggccaaaaacaaggaatgcaggcagccaccagagacaaaaaaaaaataggctctcctctcgagcctccagagggagtgcggccattccgatagcttgatttcagcccagtgagcctgagacttctggcctccagaactgagggaatgactttctgttgtgttaagtcaccaagtttgtgataatttgttagaacagccacagaaaacaacacaaatgccatggaaaatcaaatcagtgatatgagtcagggtgaaacaagtcgagaaagattctggaaaatatgagaaaagaagaacaagagacagggttatacatgtggaagatggaactgaccacccacattcagatttttggcgttggtgattattgaaatcagtgatccgtcatccaaactgtgatggaaggaaaccccgtgctcacgagggactgtgcgtgaatatcaaaggcctcactcaaccacattctgaacaaactcagaaagagacggccacatctgagcataccctgggaataataaagaataacaacgataagagggggacaagcatttcatccaaacagagaaaaaagtaacaaaaattaagtcgactttagacttgttctgtataacaaagagactgtgtttacagaacctgtcagaagattaaaacatctgggaattaaaaaaaaatttggctctattcccaggccccataacaccaacctacgtgtggagcctgagaatctgaagcattaaaagttcttcgattatcaagtaagtttrtgaaccctctacaaaatttgggggttatgtagcaacccaaacaattttatgctcagctgagttgccttttgtctgtgaagccaatcagaaagacattctcagatgtgcaggggcttagggaagtatacaaacatgctcctttctttaaaattcatttta

SEQ ID NO: 667943 - DNA, 1213 bp, Homo sapiens
gtatagcaataatgattgtatttgatgatgaagccagaaatgggtagaaagaggcacctcctcttctcactgacatcagtaagatataatgatgtattgtcatgggtcattgtgtgtgtctggcaccttctggctctgtgctggggtcagtctgggtgctgtggtcatgacctttgatgcatgtgtgaaacattctgtcaggaggcagctggctggagccagcggcgctgtgaccaacggagatacacaggctgggtgggtcctgcagggattactgtgtgttggaagcgggcgcagggtgggggtgtcctgtgatcccaaaggttatgaatcaacaatcaaattccataacaataaaatttaatcagggcctttgcttcatcaagtaaatagatggtgaaaattaattcttcatcctttttctcttgttctgattcctagtcatctgctgaaatgggtggtttgcattaaaaaaaaattgagctctgaactatgtgaatggctaattacagatatttatttttaaatatgctcagaaaatgagtaaatgaatgcttatgaggcccatggcttacttctggtgtttcattatggaagtgtttaagtattgctgtgggttgatataatttcatatttgggaatgctttattataagttattagtgaatattgatttctacatttaaaaaatacctgtttactggataaccagttgagtcattcgtgggttcaatttgacagacacagtggaaattttgaatagtctgatgctgtaaccagcaccattgagacattcctgccctttgtcagggctcccwcagttggtgtctgtaggtgtcagaccctgctcattgtactggcccccacgggacacaaaacacaagcagagcccacacaagggctgggagggtactatccagcgcctgacacagggtggtccccaaaaactatttgctgactggttaatccaatttgcagaagtttcgagaggagtgttgatctgaattctgaaggacagaacatttgtctggttgaaaaatggggattttaaaaatattccaaatgctaagaaaaacaaatcagtgaataattttacttggtcttgaaatgttaaaactaacattattattaaatgagcaaaaattgtggtataacatgttaagcttctttatgttatccatagatactagttttcctaaatcttttgtgaagtt

SEQ ID NO: 667944 - DNA, 1213 bp, Homo sapiens
gtatagcaataatgattgtatttgatgatgaagccagaaatgggtagaaagaggcacctcctcttctcactgacatcagtaagatataatgatgtattgtcatgggtcattgtgtgtgtctggcaccttctggctctgtgctggggtcagtctgggtgctgtggtcatgacctttgatgcatgtgtgaaacattctgtcaggaggcagctggctggagccagcggcgctgtgaccaacggagatacacaggctgggtgggtcctgcagggattactgtgtgttggaagcgggcgcagggtgggggtgtcctgtgatcccaaaggttatgaatcaacaatcaaattccataacaataaaatttaatcagggcctttgcttcatcaagtaaatagatggtgaaaattaattcttcatcctttttctcttgttctgattcctagtcatctgctgaaatgggtggtttgcattaaaaaaaaattgagctctgaactatgtgaatggctaattacagatatttatttttaaatatgctcagaaaatgagtaaatgaatgcttatgaggcccatggcttacttctggtgtttcattatggaagtgtttaagtattgctgtgggttgatataatttcatatttgggaatgctttattataagttattagtgaatattgatttctacatttaaaaaatacctgtttactggataaccagttgagtcattcgtgggttcaatttgacagacacagtggaaattttgaatagtctgatgctgtaaccagcaccattgagacattcctgccctttgtcagggctcccacagttggtgtctgtaggtgtcagaccctgctcattgtactggcccccacgggacacaaaacacaagcagagcccacacaagggctgggagggtactatccagcgcctgacacagggtggtccccaaaaactatttgctgactggttaatccaatttgcagaagtttcgagaggagtgttgatctgaattctgaaggacagaacatttgtctggttgaaaaatggggattttaaaaatattccaaatsctaagaaaaacaaatcagtgaataattttacttggtcttgaaatgttaaaactaacattattattaaatgagcaaaaattgtggtataacatgttaagcttctttatgttatccatagatactagttttcctaaatcttttgtgaagtt

SEQ ID NO: 667945 - DNA, 1100 bp, Homo sapiens
cagtgataatacctacaatttgtgtatcctttcctatgttcttaacatgcattaacccatgaaatcttcacaataggcttgtgcactacattctaatagtggcccctgtgtaatagctttctaaggttttacaatgatgaagtcagaattggaactaggactcttggactctaaagccctgctctcattcaccatgctggacagcctcccttcttgatttactgagcaccagtaatttgcctaaaatggaatcacctctagagcacataaagtttgagacaattaacattttactggggagaaatgaaatatatacatgaaatagtgatttacagcaatcaaagacaacatactcaaagtgatgagatgctaagttatccaggtttgagagaagaaaaaaaagaatatggttagagaagtgaaggaggtctttccagagaacatgtcacttgagcaggcctggagaacagttctgccctgggagcccatgctggtgtgccctgtttgggtggtgtggtggtttyaaaattctttgatattcctcccgtcaagaggcatagttgagatttccccttcaatatgagtaggactcagtaactcacttttaacgaatacaatatgggagaagtaacaatgtttgacttttcagactaggtcattgtattactccattctcacactgctataaagaacttcctgagactgggtaatttataaaggaaacaggtttaattaactcatatttctgcatggctaaggaggcctcaggaaacataatcatggcagaagaggaagcaaacatgtccttattcacatgatggcaggaaggagaagtgcctggcagaaaagaaaaagccccttataaaaccatgagatctcgtgagaactcactcactgtcatgagaactgcatggaagtaactgcctccatgattcaattgcctcccaccaggtccctcccatgacacctggggattatgggaactataattcaagatgagatttaggtggggacacagccaaaccatacaagtcttagaaggacctgtggctgctttcctctttcttagatcaattgccctctggaatgccagatgtcat

SEQ ID NO: 667946 - DNA, 490 bp, Homo sapiens
tgtgtaattatacttccacatgtgcaaaagtatatatgcacactaaaatattacttttaccagcaaaagatcggaaatatgacatatacattatatatttatatatgattgcatataaatgtttttgtatattacatgctcatagaacaacaaatggcagtttgataagtgacaagtcctatatatgagatcwattttaataaaaagagcaatatgtagaatacgtgtccagtctcctgccagatgtgtagaaaggtgtccgcttataccctggtacctgcagagcctgtctttgggaaagtgcctctgaggctcgtcactgggcatctgcagggaagagatgaaagggaaacattttcattggatattagatctctttctgcattttggattttctactttttattaaagaaatacaaaaattaattgtaaaaatgtgtgtgggaggagagaggcagagggagagagagaaggaaaagagagagaagca

SEQ ID NO: 667947 - DNA, 1006 bp, Homo sapiens
gattctgtgtgaagacccctatgctatggcttttgaactactttgataaccttccattgaaaaatcacattttgcatcaaagctagttagaggaaagggcacatgctccaactcttccatttaacggatggaagaactgaggttcagaagtccctttcctgagacctagggagatgcctcttccctcagctccctcacctctcaaccagatcattcctttcaaggcaaatcctcacccacagcagaaatctaagactcaaagaaaagaaaagaaaatttagaccccacttaaatcaggcataatcaaattgtttcactctattttgccattatgttccaaatcagtctcaaactctgctgctgtgttagctttaaggtgacaattcctcctcccaacaaaatttgtttttggattttacttattttgtagagatggggtcttgctatgttgtccaggcttatctcaaacactggcttcaggcaatcctcccatctcggcctttcaaagtgctaggattacaggcatgaaccactgtgcctggccctaattcttaatttataagaggaacactgtggcctcgcccttttgttttgaggcccactctggttatggggtgctatgtgatggtgtgtgcaagtgactacagttgtgagctcttgtctccttatttggctaagaaaactctggaatctgcctttgccctgcttcaccgtgacataggcagtgcacggtccagatgatccgtccatrtggagaggcacagagaaggctgcattatctaggaaacaggaccttgattggaacactcaaaaaaaaaaagtggtttgtttaatcctctcctggagggaaggtgggaaataacgtattggaatatctgaggaaaattaaagtgcttttcaatgaaaggttgacttttttgagaaagttttctcccttcccttcgtcggagacatttctcctctttggaaatggagagcaattattttttattcaacctgtctttaa

SEQ ID NO: 667948 - DNA, 591 bp, Homo sapiens
tcccatccattcagaatatcagaatccagtatgcaacatggcatggaggaacacagaaagggcggaccagaggtgttttttgtattgttttgttttgttttgttgagacggagtctccctctgtcaccaaggctggagtgcaatggcatgatcttggctcactgcaacctctgcctcccagattcaagtgattctcctgcctcagcctcccaagtagctgggattacaggtgtgtgccaccacgcccggatgatttttgtatttttagtagagacggggtttcaccatgttggtcaggctggtctcgaactcctgacctcgtgatccgcccgcctcggcctgaacaggggtgtttttgtagctgaagctacactgtctttgcaggaatagmataagaaacaagaatagaaaacaaaaagtgctgggagccatggaaggtattggagagagagtagttttcatttcatacgctactcaaaatacggggagaaatctgtagctcaattttaaatcgggttgcaacacgatctgtaaaagagacaaaaataatatatagcagcccagtggccaatatgcaactgatttgctttc

SEQ ID NO: 667949 - DNA, 736 bp, Homo sapiens
ttcttccattccaacttcaccataaacttaatgcttcttcttgcttcaattttatcagaattcatattgctctgatagtctcttttcaatgatgtcttctccttcttagtgcctcaaactagatcctgttcagaaatgttataacaagttagcacgtttattttcatgcaaaaacattttaaatccatgcattkttttttcataatatgcattttctgtgaactttttgaagaccctttgtattataatgaattggcttatacaattatggaggatgagaaaccccaagatctgcaattagcaagctgaagacttaggagaatcaatgtatagttctagtccaaatctgaatgcctcactctttgaggcattcttactctgccttattacctgtttacctgtctgaccccccatcagtctgtgagccccttcagaaatctcagacatcaccactaaagaacttatccatgtaaccaaaaccctaaactattgaaataaaaaaagaaaaaactattgaaattaaaagaaaatgattgatataaaattatcccaaaactattgaaataaaaggaaaaaaaaaatcacgttcgtcatctctgtctcccctgtgcctaggacagcatcacacgctattaagctggtacttaatagcatttcctgaatgaatgaaagagaactttacattcctaagaatactatgacactaggcataggaaaaactagctggatgaaaact

SEQ ID NO: 667950 - DNA, 1632 bp, Homo sapiens
gttcctggcattctacatttttttcccgccaacgaggtttacttcagtctttctattattagaaagcaatatatgttcaatccagaagcattatacaaattatcaccatgtaagctttttgtaacaactgtttttatcttgatcacaaatatatatataattatatacatattctttgtgaaaatgaagcaagtttaaaaaattataaagagaataaaaatcaattacagtcctgctagagataactactgaatacatatacaagcagaatttttctgggaacacacrcacacatacctttcaacaaaaatagcaccctttattttacctagtatttactggtaatatttatttaaccccactaatggtacctaagatttaaaatgctgttatgcctagttagaaactgtaaagcgatctggaagacacagagattaagatggcttctgaaatgtatttacgaaatgcttctaaattcaaggcaaacaaggtgcatctgaaaaacatgactcaggaagaggccacagagatataacttgttgagtataaatcacaatcaagtttatgaataaagcagacttcactaaaatgtaaaggaaaagtagttggcatttaagaagcctggctatgagtgggaaattacttatgtgtacatatagggtcttcttgatataccatcatcagaaataaaatggggtccttttgggtctacgttatcatatcataaggttttaggactgagagggaccttggaggtaacttttcaaatcaacttgccaaaggttatgcataagatgatgagattcagcctactgggcttttaattaaaactcaatgatattcctaccagtctcagggagatcaaaggaactaaatgcagtgaacttcctttccaggataaggatgttttatagagcttacaaaagttacagtggtttttgtcctgctttatgaacatgtggaactctattaatcttttcaaatctgagtcacccttcagaacttacctcaggttcaaccctcttcataaagtcctttgacaattcccatcatcactgagcttccccccgcccccacctcaccactccctgaaatcttgaaagaacagttggcaataagacacttttgtgttttactctacactgtctggtgttattagttactgtgtcttgtattatattaaagaaatctaaggaaagaagatcttccacttatacatcttattgctaggtcctctatagactcacaacaggactgagtatacaattgataaaaaattattcatgggtgaattaaggcattaataatgaaagaataggaaattggaaaatggtcaataaccaaatcttagaaagcagacagggctcaaactaacctgagaatctgttccagtttctcacttggtgcattcctgaggcctgtcagcatggtgtgaagacgactcaagctatgcgtagctgtagaaactggagtcacacaagggctattctccttaatgtacctaacaccagttagtggtgtggagattctaagtgctttggactaaagaaaaaaaaaattacacagaattaataaacattttttaaagaacattattttaggccagaaagactttaattcacttcacaaatg

SEQ ID NO: 667951 - DNA, 595 bp, Homo sapiens
aacctatgaatcttggggaggcttacaattcaatccataactatatgtgtatataaaggtaggcctgcatatagtatactgtgcacagataactgagcatctttgccctaattgcctcaaggtttttttttttataaaaccttggtgtgatacatgtggctgtgcttctaatsgaatttttacatattcttaatagaaatgatgagtgtgtgtaaattataatctagaattcgtataaagaataacacacacatacacacacggcattagaataacttccctcaaaggaacagctcctccttaattccgaacattttaagacatccagaatcactttccctaagcaattatgattttacaaaatgctgtcaagaccatcacaaagttttactgcccagacggagctaaatgcctgaagctttcagcagtgatttattatttactctggaggtaagttgctaagcaagatttattcagtaagaacagagctacccgtaacagtacaatacgaattttactgtcgggggggcggatttttttttaaccattcctcaagagaatttgttctttataatcagaaaaaaatacatctaca

SEQ ID NO: 667952 - DNA, 643 bp, Homo sapiens
ggaagagcttaagagaggctatgttctcagtaagatatctataatttaccttcacaaagttcagcatagacagaaratattgagtttgtgctatttggtagaagctctgactccaagggcagcacctcttgccaagaacacaatcagggcatagtcagctccattccaattaggaagttaaggcagctgctgtgagcaccaatgatatccatatcttgatcagtaccttatgtttggcttagcatagtgaatgtcagaaagggtttttattaattcaagtagtagctagtagtctgcacagtgaatgtgggctcttaactgggtgaaactgaagatatttgagatgcgtggatggggctaaaatagttcagaaccactcacataaataggttagagaaatctaggaaggcctgctgcctgcaccctcagggaaggcatcagaaacttgatcccaactggtcctacatctagccacttgttaggaggatgtctggttgcccaatgccacgtatgagggtaacatatgtgttaccctcatatgttgtcataagagaatgttgtcatatgagactgttgtcatatctgtctcagataaacttttcatataagacagtggccaaagcacttcaaagggtagagagct

SEQ ID NO: 667953 - DNA, 674 bp, Homo sapiens
actatcttaaatcccttgtggaagaggtggtaataaataaatatatctactagtcttttttatatatatttaaaatcttaacactaaacccactgccagcaaacacatttgctcawctgttaaccttaagaatagctgagatttgctaattccaacactatactaatatttaaaacaaattcaatccaagcctagaaaccacagcatatcatgtcaggcattgttgtacattgtgtatatgacaagcatatttctaataaggctaggcaatttggtggacaagaaagaacatagggcttactacaaaattcttatggattttggatcaaagaataatttatctttagtggtttttcaaaatgtgttgacatcataccaataatgaaaactttgcttttacttgtgccctatgcagggaggagtagggaagaaaggctgggcaagatcctgatctataggagaaaagtctctacagagaaaagtttgatcacattacacaattaaagtagaaccttataaagtaaaaatattaaatggtctaaaccccccttttaagtctctaacatatattattcatatgctaatggagatattatttgcaagtctgaaacgtcatagttctcttctttggtcagattcatttaaaacacttttacttcaaatgctgacttgct

SEQ ID NO: 667954 - DNA, 674 bp, Homo sapiens
actatcttaaatcccttgtggaagaggtggtaataaataaatatatctactagtcttttttatatatatttaaaatcttaacactaaacccactgccagcaaacacatttgctcaactgttaaccttaagaatagctgagatttgctaattccaacactatactaatatttaaaacaaattcratccaagcctagaaaccacagcatatcatgtcaggcattgttgtacattgtgtatatgacaagcatatttctaataaggctaggcaatttggtggacaagaaagaacatagggcttactacaaaattcttatggattttggatcaaagaataatttatctttagtggtttttcaaaatgtgttgacatcataccaataatgaaaactttgcttttacttgtgccctatgcagggaggagtagggaagaaaggctgggcaagatcctgatctataggagaaaagtctctacagagaaaagtttgatcacattacacaattaaagtagaaccttataaagtaaaaatattaaatggtctaaaccccccttttaagtctctaacatatattattcatatgctaatggagatattatttgcaagtctgaaacgtcatagttctcttctttggtcagattcatttaaaacacttttacttcaaatgctgacttgct

SEQ ID NO: 667955 - DNA, 609 bp, Homo sapiens
ccccgcagcgcccccctcctccccgcagcgcccccgcccgcgccgccgcagacccccctagccaggcttccagcccccttccacccccgccccgcaccactcactacccgggatggccagagctaagcaggggagtctgttactagggagaaaatctgaaacagagctcccttgggggaatgtattctccctggaaggaagaaagcaaaagtcttagacttggaatatttcttttcgtctggaaaggacagctagccttcggaagataattctattagtgattttaatagcaattgtttgactgaattccaaaccaaaattctccctgtcctgattctcactccttttcaaccaggacaacatttttgttgtggccctgcccttgggggctgtggacccaacgctctccaactctcactacattctcctctcactcctttccttcctcaggtctcccgccccagraggaacaggtgtgtagtgagtggggaactggatagggaaccagaatacttcggttgccgtctcagagctgctcttaactagctgtgagaccttaatcaacccacttaacctctctgggcctcgttgtcttcctctgtaaaatga

SEQ ID NO: 667956 - DNA, 1149 bp, Homo sapiens
tgaaatatgctactctggtgcaggaaggagtggggaggactgggacaaaccagaaggcacccaccccattaaaygggaaacaactttggaaaatgctgggctgactaatctcatcagaatatgccccatgggctattggtgaaccccagggcagatgactgtgcttctcaagcaaagcgagacccatcacttactgtggtagaagttttaccatcgtatagagccactacctgggggaatgtgaggtggaagacagaagaaagaggcttcaggtctttcccaaggtgctaatgaattcatcccaactagccaaaccgtctcatttcagagcttaaaatgctataggaagaaatgtccccagtgagtaatttcacagattaccgcaacttggaacaggggtggtaggagtctaccatccacacaggattctttctctcagaaactctttcaaggaacattcccatgacatgccagagtttggaaatatatactggcagcataccaaggcccctgtaacagatactatgtctctccatatgtccctttccaaaggccctcaagccccagcactcttggcatctcactccaaaattgagggtggtctttgtctagagacatggtctctacagtgtcactggcaactctgaacaaaatttagagccatgcataatatgaaatgccagaaccataaccacgagtggcaaatagaaggaatatacaatggcaagacagcgaacagcctgccatctagcaatgccaaccccaatatggcaaaaacctacactttgaagctctaattttaaacaggcctctcctggaccttgaaattaatttttctccctaccaacaccacatgctgtggcttctcatggctcacggccctctctgtctgcacgaatacttgccaattcattccccgagtgaacttctggggctctggccccagacgttaatctccatccctgtcatcagcagattctcatgcacttcatttgggactttgcctcccaggaatgttgttgatcttgcacagcctgctctgaccccatctccaaatcccccaaaacgcccatccctgccactaccaggatttcattccctgggtcctcatcaagggtagggaaaagggtgccactcctgcaaactgaa

SEQ ID NO: 667957 - DNA, 1149 bp, Homo sapiens
tgaaatatgctactctggtgcaggaaggagtggggaggactgggacaaaccagaaggcacccaccccattaaatgggaaacaactttggaaaatgctgggctgactaatctcatcagaatatgccccatgggctattggtgaaccccagggcagatgactgtgcttctcaagcaaagcgagacccatcacttactgtggtagaagttttaccatcgtatagagccactacctgggggaatgtgaggtggaagacagaagaaagaggcttcaggtctttcccaaggtgctaatgaattcatcccaactagccaaaccgtctcatttcagagcttaaaatgctataggaagaaatgtccccagtgagtaatttcacagattaccgcaacttggaacaggggtggtaggagtctaccatccacacaggattctttctctcagaaactctttcaaggaacattcccatgacatgccagagtttggaaatatatactggcagcataccaaggcccctgtaayagatactatgtctctccatatgtccctttccaaaggccctcaagccccagcactcttggcatctcactccaaaattgagggtggtctttgtctagagacatggtctctacagtgtcactggcaactctgaacaaaatttagagccatgcataatatgaaatgccagaaccataaccacgagtggcaaatagaaggaatatacaatggcaagacagcgaacagcctgccatctagcaatgccaaccccaatatggcaaaaacctacactttgaagctctaattttaaacaggcctctcctggaccttgaaattaatttttctccctaccaacaccacatgctgtggcttctcatggctcacggccctctctgtctgcacgaatacttgccaattcattccccgagtgaacttctggggctctggccccagacgttaatctccatccctgtcatcagcagattctcatgcacttcatttgggactttgcctcccaggaatgttgttgatcttgcacagcctgctctgaccccatctccaaatcccccaaaacgcccatccctgccactaccaggatttcattccctgggtcctcatcaagggtagggaaaagggtgccactcctgcaaactgaa

SEQ ID NO: 667958 - DNA, 1149 bp, Homo sapiens
tgaaatatgctactctggtgcaggaaggagtggggaggactgggacaaaccagaaggcacccaccccattaaatgggaaacaactttggaaaatgctgggctgactaatctcatcagaatatgccccatgggctattggtgaaccccagggcagatgactgtgcttctcaagcaaagcgagacccatcacttactgtggtagaagttttaccatcgtatagagccactacctgggggaatgtgaggtggaagacagaagaaagaggcttcaggtctttcccaaggtgctaatgaattcatcccaactagccaaaccgtctcatttcagagcttaaaatgctataggaagaaatgtccccagtgagtaatttcacagattaccgcaacttggaacaggggtggtaggagtctaccatccacacaggattctttctctcagaaactctttcaaggaacattcccatgacatgccagagtttggaaatatatactggcagcataccaaggcccctgtaacagatactatgtctctccatatgtccctttccaaaggccctcaagccccagcactcttggcatctcactccaaaattgagggtggtctttgtctagagacatggtctctacagtgtcactggcaactctgaacaaaatttagagccatgcataatatgaaatgccagaaccataaccacgagtggcaaatagaaggaatatacaatggcaagacagcgaacascctgccatctagcaatgccaaccccaatatggcaaaaacctacactttgaagctctaattttaaacaggcctctcctggaccttgaaattaatttttctccctaccaacaccacatgctgtggcttctcatggctcacggccctctctgtctgcacgaatacttgccaattcattccccgagtgaacttctggggctctggccccagacgttaatctccatccctgtcatcagcagattctcatgcacttcatttgggactttgcctcccaggaatgttgttgatcttgcacagcctgctctgaccccatctccaaatcccccaaaacgcccatccctgccactaccaggatttcattccctgggtcctcatcaagggtagggaaaagggtgccactcctgcaaactgaa

SEQ ID NO: 667959 - DNA, 1149 bp, Homo sapiens
tgaaatatgctactctggtgcaggaaggagtggggaggactgggacaaaccagaaggcacccaccccattaaatgggaaacaactttggaaaatgctgggctgactaatctcatcagaatatgccccatgggctattggtgaaccccagggcagatgactgtgcttctcaagcaaagcgagacccatcacttactgtggtagaagttttaccatcgtatagagccactacctgggggaatgtgaggtggaagacagaagaaagaggcttcaggtctttcccaaggtgctaatgaattcatcccaactagccaaaccgtctcatttcagagcttaaaatgctataggaagaaatgtccccagtgagtaatttcacagattaccgcaacttggaacaggggtggtaggagtctaccatccacacaggattctttctctcagaaactctttcaaggaacattcccatgacatgccagagtttggaaatatatactggcagcataccaaggcccctgtaacagatactatgtctctccatatgtccctttccaaaggccctcaagccccagcactcttggcatctcactccaaaattgagggtggtctttgtctagagacatggtctctacagtgtcactggcaactctgaacaaaatttagagccatgcataatatgaaatgccagaaccataaccacgagtggcaaatagaaggaatatacaatggcaagacagcgaacagcctgccatctagcaatgccaaccccaatatggcaaaaacctacactttgaagctctaattttaaacaggcctctcctggaccttgaaattaatttttctccctaccaacaccacatgctgtggcttctcatggctcacggccctctctgtctgcacgaatacttgccaattcattccccgagtgaacttctggggctctggccccagacgttaatctccatccctgtcatcagcagattctcatgcacttcatttgggactttgcctcccaggaatgttgttgatcttgcacagcctgctctgaccccatctccaaatcccccaaaacgcccatccctgmcactaccaggatttcattccctgggtcctcatcaagggtagggaaaagggtgccactcctgcaaactgaa

SEQ ID NO: 667960 - DNA, 652 bp, Homo sapiens
ggatgtgagcataggcatgtgagccccctgtgctccctaggactccaggctctaagccaactgaactctcagcttctctgggactgggatcattttggccagcacagccttgtactgagccttccaggcaggaaaaggttgaccctctccccttccccatggagtggttgcattccccagtaactgrtctgtgaaggctgtgaagtagctctgccctccctgaagtacaaagaaccaagaagctctgggcctgatggacaggagctcacaccgctatgccccagggcctgccttcccttcttagagccctgccccagagggttgctccagaggtactccgatgggggtggtgtaggacatggaagccctgactccatcaccatcacagcaggggcctgagccaaccctttggctttgtgaatcacaggcatcctcttgtgctccttccttctgtctccaaaaagttatgtgcagaatggcttagcgattaaaagcacagactctggaacaagactacctgggttcaaatctcagctgtgccacttattatctgtgtaatcttgagctagttaactgctctgtgcctccgtttccccacatataaaatggggactgtagtaaattaactaccttgaaacgtacttgtgaggat

SEQ ID NO: 667961 - DNA, 667 bp, Homo sapiens
gcaataagaatttaaaaacacatttacaaatatttactcagtcctactcattctcattctacagttctctgtctctgtctctcatttgtctctaagaatttgaaattttctcaagatccatgggtctttttatcacattcacgttcattctactctactgagtacagcaaggcagaactagttggcactacacttcttctcgccattggtgtcagatggctgtagcagaaatctgagcctctatctccatgctacaacaccaaagcagtataaatcaggcctccacgtttacccctttcttttcatagggaggcccggtagcaagctcacaccttcactcaaaagcaaacagatggtgcaaagttgtacaagctgcttccctgtttttgctgggaaaatgttagaagggccaagagagtagcaaaacttatgttctactcctctgcaatgaggcagtgtgaatcaatgccccacttttaactggagtgttgtcaatggcgcccagaggaggtggcatatatacataccaccagccctcacgttgaagctcaacagtgaaactttgtactraaaaatagattaaataggatccatagccccataatatgatctaaaaagtctctgaaatacaataaaaacatcatttgttgtattaagaacaggaaag

SEQ ID NO: 667962 - DNA, 586 bp, Homo sapiens
agactccctttacttactttgtcctcatggagttgaaataattgatctaattgctcaatttgggaagaattctggagcaaattctgtttctcttttacattgtcttgagctgccttcagggctaagagaggaactaaccttaaatttgtgtgtggctggtcttacaactcaagagacaatttccccacaggatttcaagctgactttggatttatgcataagaagcaaaaacttaggcccaggctggcggatggcgaggtcaggagattgagaccatcctggctaacacggtgaaaccccgtctctactaaaaatayaaaaaattagccaggcgttctggcgggcgcctgtagtcccagctactcgggagcctgaagcaggagaatggcgtgaacccgggaggaggagcttgcagtaaaccgagatcacgtcactgcactccagcctggacgacagagcgagactctgtcacaaaaaaaaaaaaagcaaaaaaactttatttttacttctactttactggagaaatttactatttacataagatccctcctgtgatcccagcactttgggaggctgaggcaggagg

SEQ ID NO: 667963 - DNA, 644 bp, Homo sapiens
tccttgccctagcttagatgccactttctccagaaattttcctttatgccaactctaggttacgtaccctctccccatgaacttttaacgtgcattatacattctccactattggctcatcactstgtattgcaattgcctatttatgcatttttatctctccctagactgtaaagttccctggtcagggaccaattttttttttttttcttttgagacagagtcttgctctgtcaccaggctggagtgcagtggcgtgatctcagctcaccgcaacctccgcctcgtgggatcaaatgattctcctgcctcagcctcccaagtagctgggattacaggcacgcaccaccatgcctggctaattttttgtattttagtagagacggggtttcaccatgttggccaaaattgtctcgatctcctgaccttgtgatccacccacctcagcctcccaaagtgctgggattacaggtgtgagccactgcacccggcccaacagggaccagtttatcactttatacccagtacctgaacctagtaggcacccagtgaatagtagttcttattgttattattgctacagcataattatattaagtgaactattatgggcaagtccaaagatctagccattcttctatcag

SEQ ID NO: 667964 - DNA, 644 bp, Homo sapiens
tccttgccctagcttagatgccactttctccagaaattttcctttatgccaactctaggttacgtaccctctccccatgaacttttaacgtgcattatacattctccactattggctcatcactctgtattgcaattgcctatttatgcatttttatctctccctagactgtaaagttccctggtcagggaccaattttttttttttttcttttgagacagagtcttgctctgtcaccaggctggagtgcagtggcgtgatctcagctcaccgcaacctccgcctcgtggkatcaaatgattctcctgcctcagcctcccaagtagctgggattacaggcacgcaccaccatgcctggctaattttttgtattttagtagagacggggtttcaccatgttggccaaaattgtctcgatctcctgaccttgtgatccacccacctcagcctcccaaagtgctgggattacaggtgtgagccactgcacccggcccaacagggaccagtttatcactttatacccagtacctgaacctagtaggcacccagtgaatagtagttcttattgttattattgctacagcataattatattaagtgaactattatgggcaagtccaaagatctagccattcttctatcag

SEQ ID NO: 667965 - DNA, 1187 bp, Homo sapiens
gacttgacttgactttgaaaatgcaaagtgatatgtcagcgtgaaaaaaggaaatcttcaacatttaaacagcagggagaaactggaagtcaatgtttaaagtgacatcaagttaaataatggaatgaaatttaaaattggaaaattttaaatatagcagtaaaattactagtatatcttttaatcgtctttaattactgaaagcttaattaggtatccttccgatgtgcccctatatccctatcttgtcacattgtttttatacattacatttgatttgtttatccttccctccagactttgagcttcttgaacatagagactgggttacattcatcattgtaaatctggggtccacctcaatgacgagcacatgagaggcattggataaatacttcctgaaggtaaaaatgaactacttccaatagcatctctttgtacagaatgcaatgatgcaaagttacctggtaatatttagattttcagaactctrcaagtaaagcggaagggttatgaagagttggcaataacaataataccacctttcattatttgtataggtttttcataattattgtttgaagagaaaaatataatgactttaacttttttagatcccatttgtcaattttgacaaatgggatctaattaaactaaagagcttctgcacagcaaaagaaactaccatcagagtgaacaggcaacctacaacatgggagaaaattttcgcaacctactcatctgacaaagggctaatatctagaatctacaatgaactcaaacaaatttacaagaaaaaaacaaacaaccccatcaaaaagtgggcgaaggacatgaacagacacttctcaaaagaagacatttatgcagccaaaaaacacatgaagaaatgctcatcatcactggccatcagagaaatgcaaatcaaaaccactatgagatatcatctcacaccagttagaatggcaatcattaaaaagtgaggaaacaacaggtgctggagaggatgtggagaaataggaacacttttacactgttggtgggactgtaaactagttcaacccttgtggaagtcagtgtggcgattcctcagggatctagaactagaaataccatttgacccagccatcccattactgggtatatacccaaaggactataaatcatgctgctataaagacacatgc

SEQ ID NO: 667966 - DNA, 638 bp, Homo sapiens
atttaaaggggaaaaaataatagaatgtatagattcatgtatggatttgaataaatctcaaaatgtaagtgaaaaactgcagaaatctacactagagtaaaattagtattagaaaaattgaaaatatgctatttgttgtttgmatgtatacttattaagtgtaataatataaaatcatgcaaggcctaaagaagtatcaggtttcaagatgatacttttttctggaaaagaagaaatatggaattaaggagtggtacttaggggtcttcaattaaaatatgtaatattttcattctttaaaaaatcagaaggacatatagaatcataaaatattccttaaattgttgttaagaagatgaaataagacaatgaatgtgggaattctcaaattgtgcctgacacaaattgacaccttattaaatgctctttcatgattcttggtccggtactatttctttcaggtcacgcttcctctctctgaggcctctctgcctctgcctctctgcttaaggtaaagtgaaaagttggtttaatggaagcagcaggggccttggaggcagccaatctggacttgaacatcaggtctgccaccgactatctccatacccttgagcaagccacttaatcccacaagtcat

SEQ ID NO: 667967 - DNA, 638 bp, Homo sapiens
atttaaaggggaaaaaataatagaatgtatagattcatgtatggatttgaataaatctcaaaatgtaagtgaaaaactgcagaaatctacactagagtaaaattagtattagaaaaattgaaaatatgctatttgttgtttgcatgtatacttattaagtgtaataatataaaatcatgcaaggcctaaagaagtatcaggtttcaagatgatacttttttctggaaaagaagaaatatggaattaaggagtggtacttaggggtcttcaattaaaatatgtaatattttcattctttaaaaaatcagaaggacatatagaatcataaaatattccttaaattgttgttaagaagatgaaataagacaatgaawgtgggaattctcaaattgtgcctgacacaaattgacaccttattaaatgctctttcatgattcttggtccggtactatttctttcaggtcacgcttcctctctctgaggcctctctgcctctgcctctctgcttaaggtaaagtgaaaagttggtttaatggaagcagcaggggccttggaggcagccaatctggacttgaacatcaggtctgccaccgactatctccatacccttgagcaagccacttaatcccacaagtcat

SEQ ID NO: 667968 - DNA, 1509 bp, Homo sapiens
gggtgagaactggcccagagcagaaagcctgggttccgggagccactcatcctatctctgtgggcgtcccaggcccaatccctcgcttctctggcctccattgtctctcttataacatgaagatgaaccaccctttatctctaacccacaaggttgctgtaaaaatcaaagttggcaayatctccataaaggagaaaagtcatggggctactgtggcctccatagggcatctgaggaactccgggatactcctgtgagcactgagcctctcaaatcccacccaagaactgtcagtgaccccagatttcaccatcgctgctctgcccttttggctaaaagcaaaatagcatttattaacttgtattatataatccaagagttactaaactttttctgtaaaggaccagataaatattttaggctctgggggtcattcattctcggtcacaaccattcgattctgccaccgaagcacaaaatcagtcgcagatgagactgtgagtgagtgtgtctgtgttccaatccaacttcctttacaagacagctgccaggctatatctggccctgggccttacctttactgacctctaatctaatctaatgcaacccaatctagtctaatctttacaacaactctatcagattgttgtccccattacacaggtgaacacattgaagttcaaagatgttaagtagcttctcatgtgggtctgtctgaatcaaaagcccatgctttgaaacattaccatctatgccgccacgtagaagggtaacaacttgagcgctgtcagtcatctatgctatagcctgaatgaagatagaatacactctgctggggcggtggagtgagggtgcatggagactcacggggaaagctaagaaggcaggacaggaggctggggtctgtcaagaaggctccagagccttaactcttaatgactttccctccatctcactctgaagctttgatactcataccattaatttctaagaaccttcatttatccccagttatttgagaactccccagataggaggctgggactgaggatgtgaagaggccaccacaatatccccagcatgtattaggggtgtggcagcaggaggggccccatactagtcaatggatggacggtgggtaggtgataaaggccgggcctctgcccttaagcccactgcctagtagaggggacaaataagaaattggattgtaacaatacaggaatatcaaagactacagcaggactgatcagagaaggcaccccactggagatccagacctgttggggaaggcatccagaggaggggtcactgaagctggggctgaacagagagcaggagataacctgcttcagcacagggggcagagggcctgcccctgcacaatccattgtgattgtttattttacacatgggagcgagtgagtgcagaccccgtccacacgtgggtgatgcacatggatgcatccatgggaacctctgcagagacccgagccgcctctacgctgc

SEQ ID NO: 667969 - DNA, 579 bp, Homo sapiens
ccgggcatagtctccaaagcaggaaagtgacaggagggttttatggggtgatagagagggaagagggtatgtcgttgcatggaaaggggttgcagttgtgcagatgcagtgagtcgttatttcagcacacaggtcacatgttatggtaatgaagctatagcatctcccagggtgaagatactagcatggtaatgaggaaagtacactgggatccatctgtaaattgctgaggtctgtcatgaactggtttaaaccagctagctggctgcattccacacagggtttggggaaaaaagcaggtgattactcaagttgattgtactcctatagtccctggagacccctcctatctgcttccagccccacccaaccctctgcatctcttctttggctgacatgtgtagacatttgatattctggtccctggtttaatccctcaatgtaatggttgacttaatttatgagcagatgttaagggacttaggagtccactatgyattttttcctaactcaggtttgagaaatttctctaagtcattctgcctgatagagtagatatatcactgatcatattagtgg

SEQ ID NO: 667970 - DNA, 1226 bp, Homo sapiens
ttataagtgggaattctttgagctctgagttttagaaatatctctccagagttttgagtttgcttctgctagcctgggaccaatttaaagtaaaatttcagcatatggctttttaggccacacagataatgtaaattctggccccaaacctgtgtgaatggggacttttggttaggaattattcaggagaaacttttttactcaagtcacctgagccaacatcaaaacactgtttacctctgtgaagtttacttcttcccagttcacccattgagtttcttctgttttccatttgtgactgttgaaaccccaaactgtaggccaccagggatcagcatataccctccgaacaaataatgcttcagtgctctcttaccccagtgggctcacttggcatcgctgttgcatgtctccatggaattcctttacttccttgctagctttgtcttacatcgtgtgtgtgtgtgtgtgtgtgtgtgtgtgtgtgtgtgtgtgtgtatccagcatttttagttatgttaaattagtagaggtttctgtcagcatctggtaagacacattgcaaaaacaaaacaaaacaaaaccataaactaatttaaatgtattttactataagaatcaataaactcatatacaacttatctcataaaacttgcagtatctctgtgcaaattaacttttaaataygcagttagttacatgccccccaaaatcaaaacatatgtacagtaagagaaaaagataatttggtaatattgaatattagttcataaaaactgaaaatagggaccagtaatgtaaaactgaagaaatgtgtaaatgctccttttgatatctctgtgcaggaaagtgttcaggatttaaaaaagagaatcatggtactcgactgccaattacgaaaatcagaaatggctcgaaaaacttttgaggcatccactgaaaagcttcttcattttgtagaggtaagtttttctgttctattacattcatctttaaaaaatatataggcaactggcatatagataaatgttactgtatttggtacctagtgaaacattctctagtctcaaagcagcaatgctggcttatggtcagatttagaactgcatacatgatgaaaagactggctaacattttatagattgtttagagaaataattgagacaaggtgatgggattccaagtatatactattttaatgaatactttaccaaaaatcctgataa

SEQ ID NO: 667971 - DNA, 1226 bp, Homo sapiens
ttataagtgggaattctttgagctctgagttttagaaatatctctccagagttttgagtttgcttctgctagcctgggaccaatttaaagtaaaatttcagcatatggctttttaggccacacagataatgtaaattctggccccaaacctgtgtgaatggggacttttggttaggaattattcaggagaaacttttttactcaagtcacctgagccaacatcaaaacactgtttacctctgtgaagtttacttcttcccagttcacccattgagtttcttctgttttccatttgtgactgttgaaaccccaaactgtaggccaccagggatcagcatataccctccgaacaaataatgcttcagtgctctcttaccccagtgggctcacttggcatcgctgttgcatgtctccatggaattcctttacttccttgctagctttgtcttacatcgtgtgtgtgtgtgtgtgtgtgtgtgtgtgtgtgtgtgtgtgtgtatccagcatttttagttatgttaaattagtagaggtttctgtcagcatctggtaagacacattgcaaaaacaaaacaaaacaaaaccataaactaatttaaatgtattttactataagaatcaataaactcatatacaacttatctcataaaacttgcagtatctctgtgcaaattaacttttaaatatgcagttagttacatgccccccaaaatcaaaacatatgtacagtaagagaaaaagataatttggtaatattgaatattagttcataaaaactgaaaatagggaccagtaatgtaaaactgaagaaatgtgtaaatgctccttttgatatctctgtgcaggaaagtgttcaggatttaaaaaagagaatcatggtactcgactgccaattacgaaaatcagaaatggctcgaaaaacttttgaggcatccactgaaaagcttcttcattttgtagaggtaagtttttctgttctattacattcatctttaaaaaatatataggcaactggcatatagataaatgttactgtatttggtacctagtgaaacattctctagtctcaaagyagcaatgctggcttatggtcagatttagaactgcatacatgatgaaaagactggctaacattttatagattgtttagagaaataattgagacaaggtgatgggattccaagtatatactattttaatgaatactttaccaaaaatcctgataa

SEQ ID NO: 667972 - DNA, 1249 bp, Homo sapiens
aattctcatcatacctgccttatttggatgccttcagtgctttttgagttcatcataattccccagcagatcttctacaaatctgaccccacacttcctctccagtgcttttcctactcacctccacaaaagctgtttgtccaattttgtttgattctcttctgctgttttgaggtgcctgtgttttcaacctgaatggattttctctgctctccccttggcgggagatgtcttctacatctaccaggatgacttttatcttggcctgttcagatcctacacaacctccaaggcacatcttaaatgcccataatttcatgtagctttccttaatacccctaaccaatggcaatctctcccttttctaaatacattttaattttctcagattaaaaaacacactttaaaaatggctcttatgggtacacagatcattgtgtctggtgggtatcttttccaccccaataaaaaatgaaagctcctaaaggtcagaatggctttcttttattattttattttttaaacatttattatgaaaaatttcaaacatatacaaaataaacagaaggcactgtttgtttttgcatctctttgggacctatcacagtgttttgcatgtagcagaggtaaatttaagtaattagagccttaggcaaatggagctgtctgtctgcatatctgatgccgttgtctcctggatcgttaagcttttcctcagtcacacacacacacaacccatacacctgtaggatcacaatctacaaggattaaacccgctcactggctttaaaattcagggaaagtctttattctgaggtcagttcagatcatcagtaaagctaactgcatttgaggggatggggagaaaacatttatatatttaagaatattttctaagagaattcaagtctggttgtatatctgtttgattttctttagcacatttttttataaakgtgtaatacctgaagaataatgtacaaatatgagggctttctattaataccaggttttcttcactttgcattcacatttttcaacatcttcccttcccaaaacctcagactcctaaaagtctattttatatatttttttaacttgcgcctacttagcccattttttgctactactgagtgaatgagtgtgtgtgtgtatgcatgtgtgtgtgtgtgtgtgtgcgtgtatttgggagagcagtcagatccttaaagtgaaccagaattctggagtgatagattacatgtccatg

SEQ ID NO: 667973 - DNA, 1249 bp, Homo sapiens
aattctcatcatacctgccttatttggatgccttcagtgctttttgagttcatcataattccccagcagatcttctacaaatctgaccccacacttcctctccagtgcttttcctactcacctccacaaaagctgtttgtccaattttgtttgattctcttctgctgttttgaggtgcctgtgttttcaacctgaatggattttctctgctctccccttggcgggagatgtcttctacatctaccaggatgacttttatcttggcctgttcagatcctacacaacctccaaggcacatcttaaatgcccataatttcatgtagctttccttaatacccctaaccaatggcaatctctcccttttctaaatacattttaattttctcagattaaaaaacacactttaaaaatggctcttatgggtacacagatcattgtgtctggtgggtatcttttccaccccaataaaaaatgaaagctcctaaaggtcagaatggctttcttttattattttattttttaaacatttattatgaaaaatttcaaacatatacaaaataaacagaaggcactgtttgtttttgcatctctttgggacctatcacagtgttttgcatgtagcagaggtaaatttaagtaattagagccttaggcaaatggagctgtctgtctgcatatctgatgccgttgtctcctggatcgttaagcttttcctcagtcacacacacacacaacccatacacctgtaggatcacaatctacaaggattaaacccgctcactggctttaaaattcagggaaagtctttattctgaggtcagttcagatcatcagtaaagctaactgcatttgaggggatggggagaaaacatttatatatttaagaatattttctaagagaattcaagtctggttgtatatctgtttgattttctttagcacatttttttataaatgtgtaatacctgaagaataatgtacaaatatgagggctttctattaataccaggttttcttcactttgcattcacatttttcaacatcttcccttcccaaaacctcagactcctaaaagtctattttatatatttttttaacttgcgcctacttagcccattttttgctactactgagtgaatgagtgtgtgtgtgtatgcatgtgtgtgtgtgtgtgtgtgcgygtatttgggagagcagtcagatccttaaagtgaaccagaattctggagtgatagattacatgtccatg

SEQ ID NO: 667974 - DNA, 632 bp, Homo sapiens
gttttccaaatgcccgccaggtgcagtgccaatgccgagctcctccctcttgtccctgttgtcctccgctcatgcactcctgtgctgtcctggcaattcagaacccagcttccttcctccctgaagcctcttcctaaaactgtggcccactccagtctcaaagttctgctgaattctgcaacacttttcatttgaactctgcaacctgatactgagtcccacatggtggatcatctgtcactgacaggggttacagtgttgagggtgggggaaaaaacatgacaggtacaaccgcagctggcaaggtcaaattctcatccaaaaataataaaaatggcattaaacatatttaaaaaaattcaaatcaaaattttagaaggtatctrtttctgaaacaaatcagcttctttgccattaaaaaaactctctggaagttaacattggctgtgacctcaaggtgctccaaggaatgtttgccctctgattttgtgtcatagatccttatgaaagttttcaagcttgctcttactgatttgaaaatttaatgtcacacatacctgaaatcatgctggttttctttatcctcaaaaaaatgatcaaagtccttaaggatacatttttctacattgtct

SEQ ID NO: 667975 - DNA, 595 bp, Homo sapiens
tagcctatcctgggacacccggtccttgcagctgctctttttctgccttttcctacagtagaccctaagaacctcagagtttattagctgcagactgacctttgggctacgcaggtcaagaaggggtcagatcagagggctcgcccagttctttaaaagctataacaagctgtccatcaggcagaggggactggataaacaaaggcgaatcttcagaaattctgtcccacttctgttaacacttaccctgcattcacacagcttctcccgatgtcctttggatcattcaactctggggaagtgaatagacagccctaataagcctatttggagagggttgtttatgggattacgaagcttggagaaggaaacccacagcactcagatgtgcctctagagtcgctgggttgtgtgacactgtgacaaactcggttaccccaagtcatgcaaaattgacactttcctcaaaaagctaaattacaaggaacatatgcttcagtttaagagacttcagtgagtcccaaacaatggcttggcgcctgacctgagagacagacaaatattttayaaccaggttacaagttttactttaaaa

SEQ ID NO: 667976 - DNA, 995 bp, Homo sapiens
gaaggccagtcaggaagctgttgcagtaagtcatgcaggagttaacagtgacttgaactacagagacaggggaggagacgataagcagacaacagattcagaatgttctaggaaaagacaataggacatgctaatgaactggatgagtcaagtcaggaaaaaataaactcaagaacaactcttggggttttcacagcaacaactgactgaaggtgaataagtcacaaaaccttaggacattgcaaaataataactacaaaatgcaattagaggtgaggatgaaaacatcagtgatacatttggagttttaaatccaaatataaacacaacaatatagaggataaaaagcagaagtgtggctgtaaggcctaatgaggaaggctaagtggccattctctcttcccgtttgccatctctgaggacattcctgagcagttttggttgatcctgactatgttgcctaaaggaggtttcagagtcaagcaaaataataaaaagtggagtttgaagggggcttcccaggataaattcccataaaagactgggacaatgtctaggaaatacataaatgccagtctcatctacccaaataaaagccttattactcctatgctattaatactgggacccacagwcataattaggggaaaaatcaccaccttaatgagtaggtttgttaagtgcttttgttccactgaggggaacactgagtcacctagtgactcaggccaaatggcaaacacaacactagaaggtatactttgaggcttccaccttcatttaaatccttggcaactctctaatcaaacaattcttttgaaattgcttccaactgtatctaatcctttatgactttaaaaaaagaaacttgtaattttcatttaagagcttctaatttatcgaaaactccatctataaaagcgacacaagcttcatggattgtgcatctcaaaggatatacttaagaccctcccagctttaaaagattattccta

SEQ ID NO: 667977 - DNA, 866 bp, Homo sapiens
gaggagctgagcagcctgcggaggggaatctaagatgtgcacacttctaccatggcacactttcttcctctaaggattatacttttctcctagctctcccatagaataaaataaatggagtgcaaagcatccgacagggtcaccagataaaaatatattttttgtatatcccaaatattgcatgggatatactaaaaataaacatcattccttgtttatctgaaatacaaatttaagtggacatcctatatttttattagctaaactggcaaycctggcctgcaataagaatggcaataaatgcttctttaagtgttcagagcttgacatcttctgaagcattgaaggatttcatggtgattaacttaacatttcccaaacttgccaatgatcacccaatcataagaatcagctgggagccttataaaactatagatgcccagccggcatgctggcttacacctgtaatcccagtactttgggaggccgaggcgggtgaatcgcctgaggtcaggagttcgagaccagcctggccaacatgatgaaaccccatctctactaaaaaatacaaaaaattagctgggcgtcgtggcgggtgcctgtaatcccagctactcgggaggctgaggcaggagaatcacttgaacctgggaggcagaggttgcagcaagccgagattgtgccactgcattccaggctggccaacaagagcgaaactccatctcaaaataaataaataaaactacagatgcccaggcccatcctacaattacttattcagtaagaccagggtttaggctggaagtctgtatttggacaagtttcccaggtgcttcttggcatcagaaaagtctggaaaacactgc

SEQ ID NO: 667978 - DNA, 866 bp, Homo sapiens
gaggagctgagcagcctgcggaggggaatctaagatgtgcacacttctaccatggcacactttcttcctctaaggattatacttttctcctagctctcccatagaataaaataaatggagtgcaaagcatccgacagggtcaccagataaaaatatattttttgtatatcccaaatattgcatgggatatactaaaaataaacatcattccttgtttatctgaaatacaaatttaagtggacatcctatatttttattagctaaactggcaatcctggcctgcaataagaatggcaataaatgcttctttaagtgttcagagcttgacatcttctgaagcattgaaggatttcatggtgattaacttaacatttcccaaacttgccaatgatcacccaatcataagaatyagctgggagccttataaaactatagatgcccagccggcatgctggcttacacctgtaatcccagtactttgggaggccgaggcgggtgaatcgcctgaggtcaggagttcgagaccagcctggccaacatgatgaaaccccatctctactaaaaaatacaaaaaattagctgggcgtcgtggcgggtgcctgtaatcccagctactcgggaggctgaggcaggagaatcacttgaacctgggaggcagaggttgcagcaagccgagattgtgccactgcattccaggctggccaacaagagcgaaactccatctcaaaataaataaataaaactacagatgcccaggcccatcctacaattacttattcagtaagaccagggtttaggctggaagtctgtatttggacaagtttcccaggtgcttcttggcatcagaaaagtctggaaaacactgc

SEQ ID NO: 667979 - DNA, 866 bp, Homo sapiens
gaggagctgagcagcctgcggaggggaatctaagatgtgcacacttctaccatggcacactttcttcctctaaggattatacttttctcctagctctcccatagaataaaataaatggagtgcaaagcatccgacagggtcaccagataaaaatatattttttgtatatcccaaatattgcatgggatatactaaaaataaacatcattccttgtttatctgaaatacaaatttaagtggacatcctatatttttattagctaaactggcaatcctggcctgcaataagaatggcaataaatgcttctttaagtgttcagagcttgacatcttctgaagcattgaaggatttcatggtgattaacttaacatttcccaaacttgccaatgatcacccaatcataagaatcagctgggagccttataaaactatagatgcccagccggcatgctggcttacacctgtaatcccagtactttgggaggccgaggcgggtgaatcgcctgaggtcaggagttcgagaccagcctggccaacatgatgaaaccccatctctactaaaaaatacaaaaaattagctgggcgtcgtggcgggtgcctgtaatcccagctactcgggaggctgaggcaggagaatcacttgaacctgggaggcagaggttgcagcaagccgagattgtgccactgcattccagsctggccaacaagagcgaaactccatctcaaaataaataaataaaactacagatgcccaggcccatcctacaattacttattcagtaagaccagggtttaggctggaagtctgtatttggacaagtttcccaggtgcttcttggcatcagaaaagtctggaaaacactgc

SEQ ID NO: 667980 - DNA, 640 bp, Homo sapiens
ttttttttttgtttttctaaactttgtccttctccaaagttttacaattaaatcatcagggctaatttttcttaggcatttctgagctctacaatatggagaattttatcccatagagtttttcttttagtctcctttctcagattcatgctggaactaaaaacaattttaaggataatgttttaaaataaaactctaggccgggcgcggtggctcacgcctgtaatcccagcactttgggragccgaggcaggcggatcacaaggtcaggagatcgagaccatcctggctaacacggtgaaaccccatctccactaaaaatacgaaaaattagccgggcatggtggcaggcgcctgtagtcccagctactcgggaggctgaggcaggagaatggcgtgaacctgggaggcggagcttgcagtgagccgagatcgcgccactgcactccagcctgggtgacagaacgagactctgtctcaaaataaaataaaataaataaataaaataaaaccctaaaaaaaaaaaacacagaacagattactttctagtttggctcttaatatgataaggggattatctgtaggtatggaaatatggggctatttctcaattttctgtgctcaaattacactggtttcc

SEQ ID NO: 667981 - DNA, 1258 bp, Homo sapiens
cacacacacacacacacacacacacatatatatatacacacacaattctgtgccttacttcagcatgagagtataacattttcttttatattttaattagagttttattgtatagataatagaaaagtaaataaatcacttttaataagggtctctatgaccacaatttcagtacaaaaagtacatcttttgggttgcttttggctgcaaataacagaaaacccaactcaaattggctgaaacaataaagatatgtattatctcacataacagaaaacccaaagtggagtagattattctacaatgaccggcttgacagtgacaataggacctgggttcctacatcttcctagtgtgagcttcatcctcagactggtagtaaaagggttcaacagttctaggtatcaaggccagtttcccatgggaaaagaaaaaataatatttttacttagacctgtcttagaaaagagaaaatgttctgcagaaattccccaacagacttccccttacctctcatgagatggagttgggtgacatgctcaccacttctgacccagtcatgggtcagggaaaagaactttacctgattgkcttacctcaaattccttaggaggtgaatcaagtacctttccctccaaaaaaaaggaaaacagatagggaggtctttttagcatattgacataacaaataatgtggtgcaacgtttaaagaagatatttaacatttctcagtggctaattgattttacatagtgcataaaatctaatgagcttctagtttaactcctagtccctctgtgttttagtccattctccttctctgtctttatttactcaccatttccaagataattttacattctaatcagtcactattttcccttgtttcataagtacacattttcttccccaatgatgtcctaatcaggttttacttcaattcccattccatatccaactcctgatattttcttatatttgtagagcatctcttaggtaagcagaatttcccctctacctttatgggtttacctcctacagtaaacatgtcttgcatttgtctgtccaacatttactcccctagtgtcttgctgattgcaccccacatttccatggagaaatacacttcccctactttcaatccatatgactcaaatctccagtcaacagagaatcatgatcagacagtaacaatgaatacttcaaggatggacaattgggtcgattgaagtctgttagcctgaattccaggactttta

SEQ ID NO: 667982 - DNA, 652 bp, Homo sapiens
taattaaatattgagatacattttcaagtggtcatcttgttccacttttctttcagctttcggtgtcccctggacactcccttaaaaaaatagattaaacccttcagccttcatgcattcaattaattctcatcatacctgccttatttggatgccttcagtgctttytgagttcatcataattccccagcagatcttctacaaatctgaccccacacttcctctccagtgcttttcctactcacctccacaaaagctgtttgtccaattttgtttgattctcttctgctgttttgaggtgcctgtgttttcaacctgaatggattttctctgctctccccttggcgggagatgtcttctacatctaccaggatgacttttatcttggcctgttcagatcctacacaacctccaaggcacatcttaaatgcccataatttcatgtagctttccttaatacccctaaccaatggcaatctctcccttttctaaatacattttaattttctcagattaaaaaacacactttaaaaatggctcttatgggtacacagatcattgtgtctggtgggtatcttttccaccccaataaaaaatgaaagctcctaaaggtcagaatggctttcttttattattttattttttaaacatt

SEQ ID NO: 667983 - DNA, 731 bp, Homo sapiens
ccacctggagttttagtggagtgtagagcaaataaatgatcaggcactggggaatcagagaggttaggaaactcactgagattctgctggttaagtggccaggccaggcctgcttaacttcaaatctctggtccatcttcttgggcagtaaagcgtgaaccttaaaaatgtgagctgaagatrtggatgccatctgaatcccgtggaagtcaaggaagaagagagctggaggggccacagcctgattctaacatgggtgatggcatttctgttatgctactcccagagtgccaggccggggtgactcacttggaggaggcatgccccggcagaagtctgcagggtgctcccaggctccctgcctcctccccccactgttaagtcaccacggtgttgtgggggctggggaaaagcagcaaggctgtgggatgacagttttccacccgccttcctggacctgttttaaatctcagaatctcagcttctccatctgaacatgggcatcttgacacatcgttagaccatgagtggccagtgcttgggatttcatggaccactcatattttctaatgtgtatgtgtgtggtgcgggggatggagctcaagttaggaaactatacattttttaaaaacctgactgtctacttttaaaatctcttgttaaacaaaagacagtttcatatcaggtaaagaaagaaggaataatacaatgtataagaatacaaaattaaa

SEQ ID NO: 667984 - DNA, 731 bp, Homo sapiens
ccacctggagttttagtggagtgtagagcaaataaatgatcaggcactggggaatcagagaggttaggaaactcactgagattctgctggttaagtggccaggccaggcctgcttaacttcaaatctctggtccatcttcttgggcagtaaagcgtgaaccttaaaaatgtgagctgaagatatggatgccatctgaatcccgtggaagtcaaggaagaagagagctggaggggccacagcctgattctaacatgggtgatggcatttctgttatgctactcccagagtgccaggccggggtgactcacttggaggaggcatgccccggcagaagtctgcagggtgctcccaggctccctgcctcctccccscactgttaagtcaccacggtgttgtgggggctggggaaaagcagcaaggctgtgggatgacagttttccacccgccttcctggacctgttttaaatctcagaatctcagcttctccatctgaacatgggcatcttgacacatcgttagaccatgagtggccagtgcttgggatttcatggaccactcatattttctaatgtgtatgtgtgtggtgcgggggatggagctcaagttaggaaactatacattttttaaaaacctgactgtctacttttaaaatctcttgttaaacaaaagacagtttcatatcaggtaaagaaagaaggaataatacaatgtataagaatacaaaattaaa

SEQ ID NO: 667985 - DNA, 731 bp, Homo sapiens
ccacctggagttttagtggagtgtagagcaaataaatgatcaggcactggggaatcagagaggttaggaaactcactgagattctgctggttaagtggccaggccaggcctgcttaacttcaaatctctggtccatcttcttgggcagtaaagcgtgaaccttaaaaatgtgagctgaagatatggatgccatctgaatcccgtggaagtcaaggaagaagagagctggaggggccacagcctgattctaacatgggtgatggcatttctgttatgctactcccagagtgccaggccggggtgactcacttggaggaggcatgccccggcagaagtctgcagggtgctcccaggctccctgcctcctccccccactgttaagtcaccacggtgttgtgggggctggggaaaagcagcaaggctgtgggatgacagttttccacccgccttcctggacctgttttaartctcagaatctcagcttctccatctgaacatgggcatcttgacacatcgttagaccatgagtggccagtgcttgggatttcatggaccactcatattttctaatgtgtatgtgtgtggtgcgggggatggagctcaagttaggaaactatacattttttaaaaacctgactgtctacttttaaaatctcttgttaaacaaaagacagtttcatatcaggtaaagaaagaaggaataatacaatgtataagaatacaaaattaaa

SEQ ID NO: 667986 - DNA, 1462 bp, Homo sapiens
aaatgctgtcctagaagcacccttaagtgactgctttgatgtgagaataaggtggtcttcacagagaatcatgttggcccccatctgaaggaggtagaggaaggcactgagcttacacttaggcaagaactgcaaaaggttccatgtggaacctttctttttttaatttctgaaaatgtgtcagtttgaggcaacaaataactccctttatctcggggtaaaagaattttagaacctatttcatccttctataagatgtcttgaatactgaatgactcatccccaccaatattctaacaattaatatgtgtgaattcaaatgcatgaactcaaatgagctatgtcctaatgtctgtttcctttcagcctgaactttccttagtatttcttataattcagatttgctagcaaataattttctcagtctttgtttgtctgagaatgtttttatttcaccttcatttttgaagattatttttgctgtatgtagaattcttggttgacaggcttttttttttttttcttgyagcactgtgaaaaggtcttcccaactgcctctggccattgttgttttggttgaggagtcagccatttattgtattgctgctcctctatatgtgatgagaaggcaagggtatctcacagtgccccaaatctgctgagtctgttttgaccacagtagcagttgccagtactcacaggctgtcccacccaggtagaacctctgtgctgaccgatcagcggggagggtggagcagctctgggcaagaatgtctagagctaataaacccctcactgttcttacctgaagttcagcagttgttcaaccataaatgcttctcagattattgtatacctttggtcaatttccagagcactgaaatggctgtttttataaattttctctagcttcataattgctttatgaggaaaggatttgccaaccttcttactggggcatgaccagcttcactggagttctgggcacagtctccccaatcatcctctagcttcctagtaccctggagacctcagtgctcagccaaagagatgttagagggaagtggagatgaaggggaagctctggttgtgtcctcactccctgggtagcttaaaggcatcttaagatcttttggtattagtaaaattccaaatacattttaggttgaacattttgtatcctgggagaatgatacctgtgtccagatttcagactcattcatacatattaatagttagaatattgtctgggatgagtcatttggtattaaagacatctcatagaaggggaaaataggttctaaagttcctttgcctcaaaataaagggagttatttgttgtaccagactgacacattttcagaaatgaaaaaagaaagattccacatgggactctttgcagttcttgctctaagtataagctcagtggcttcctctgcctccttcaggtgggggccaacat

SEQ ID NO: 667987 - DNA, 924 bp, Homo sapiens
aactgctagaatgacgtttctcttggatttcagctatttcctctctatctcggtgtgttctttatcagaagagaattaaatacatgtgaggaagatgggcaagaaagtctgggtgagggtagggtaaacttttcttgaaagtccaggagggtgcacaaccaggctcagtgttcctgaaaacacaaaggcagaatggagcccagttacatttacattggtagggggcagttctaagatactagctacactgaaattagaaacaacttttttctccaatattaataaatatttctgctgtcagcaytagggtgtttggtttccaaagcccttgcatttgatataactttttaaaccaccattacgcacattggaagatactgttggctctcagttatcttaatttttccagtagtggagacggaatatcttctccatgttttcttgagaagaatctgttcacaggatgtcttttgactgtggaataaagagaaattaatgggaaagcagtaagctcaacagagtagagtgccctatggggtagccagtctgccaggacttgaatggtaatagcaacaggaatactaatacgacaagaataataatagcaactccttctaagcctgttgtgatctgaaataatataatgttttaaaaagtccctggtctgaggcctggcatttaacaagtgttcaataattagctactattattctcactgttcttagtgtctaccatgatggaatccaagattgtagccatctcattcatcaggatttactcatttacccaagtgaattaactggcaagacttgtacatatatggatactcattctttcttgctgaagcctgaagcgatgctactgtcctaactattcagatatccagcatgaatggttaagcgcgtacttgttgcaaagaggcat

SEQ ID NO: 667988 - DNA, 436 bp, Homo sapiens
aaattcccccaaactaaaaacaacacatcaataacagtaacaaacacaaagtttgaagactattttccagtaggagaatagggacagaggaaggtatgcttaacakgtcagggtgttcagttcttatctcttaagtctgtatgcaataaagagatatttaagaatttgggagacagtaatagtcaaaagaagaagtgctccatgtagtagtactgactgataagtacattaggaaataagtcctctaaaaagaaatcatgatcctgctatccaggattcactgatgtcaattaggagctttcattcttgatgccttccaagctgataaccaaatgtccctgctctcagagaatcaccactgtgactccaatgaatggcagtgcgccaacaaacgttgcatcccagaatcctggcagtgtgacacatttaacgactg

SEQ ID NO: 667989 - DNA, 716 bp, Homo sapiens
gaggaggggccccagcagacaacattggtgaactttacctccaagaacagactatggggtggttaactgcaacaagaagaaaccagagatctacaagtgagctgtctctggggctaggtccaagatggggatgacctcacaggcaggcaggttagttaactttgcccgagaattcttccatctcattcttgctgtgatttttttttcattttgatgcaaaaatgatgagtatatccttcttcaaaattatgaaatgtatatctaagtggattgacaccatttgtaatttgatttttcactcaccaatatgttgtaaacttgaaaggagaaaattacctcataagcagatatttctggaaaggtgattaaaaatgaatagaattactaataccttcaaacggacakggtttcaagcagcagatattaaatattttttcttttcttttcttttctttttttgagacaaggtcttgctccgtcttccaggctggagtgcagtggcatgatcacagctcaatgcagcctcaacctcctggctcaagtgatcctctgcctcagtctcccaagtagctgggactacagatgtacactaccatgccaagctaactctttagtttttgtagagacaagatttcactatattgcccaagctggttttgaactcctgggctcaagcgatccttctgccttgacctgctgggattacaggcagactt

SEQ ID NO: 667990 - DNA, 601 bp, Homo sapiens
atcacascaagcaggcaaagcctaaatacagggcaggacttgcctatgtgatgtaccattccagccctccttttcaaagaaaacttgagcagggaccctgggataccaccagcgatggtgggactcccttttgcaatccaaataagcacgatctaaatgagtccaggttggagcagataaggaatggggttgaaaaggagatgtgttcttgaaatcggccaatttcatagcctggaggagacatttgtggttagctgagtcacactgccttgggattagccagctctgctttctgtttcaacaataaaaagtcttgcaaagctgctggcatgtgagacagaggtatccagaaaattttggcatcttttccagcggcataatgagtcttagggaagagacttgttagagcgtggtccatgcactctaccaccggagagaggtccatgttcacataggatttattgcctttcagtttgtctagacctaaaaagagacaaaagtacatttactctttggtagaaggggaaagcagagtggaagtctagggtgcaaaggggaggatggatacaaggggatttattctgaattgtccattataatt

SEQ ID NO: 667991 - DNA, 601 bp, Homo sapiens
atcacaccaagcaggcaaagcctaaatacagggcaggacttgcctatgtgatgtaccattccagccctccttttcaaagaaaacttgagcagggaccctgggataccaccagcgatggtgggactcccttttgcaatccaaataagcacgatctaaatgagtccaggttggagcagataaggaatggggttgaaaaggagatgtgttcttgaaatcggccaatttcatagcctggaggagacatttgtggttagctgagtcacactgccttgggattagccagctctgctttctgtttcaacartaaaaagtcttgcaaagctgctggcatgtgagacagaggtatccagaaaattttggcatcttttccagcggcataatgagtcttagggaagagacttgttagagcgtggtccatgcactctaccaccggagagaggtccatgttcacataggatttattgcctttcagtttgtctagacctaaaaagagacaaaagtacatttactctttggtagaaggggaaagcagagtggaagtctagggtgcaaaggggaggatggatacaaggggatttattctgaattgtccattataatt

SEQ ID NO: 667992 - DNA, 1416 bp, Homo sapiens
gctcttcctgtttgatggatgggaacatccctatgctgggggaccctgggaaggaactgcaacacatgtgcacgggcattcacaaacacacataagaactgggataaatattaaaagccacaacattcaaacaagtgcagaggccatgccaagaatcctctggcactgcctctgtggagcacctggtcatgtttaacccaagctgcaaatatgatttccaagtggggactcccagcagggatggtgggaggcagactggacgtcctcagcatgagccaggctagtctgagtcaccccattctctcctaagggacaggttccacccctgccaggcaacatctgacaaagagggagagtgcaatccctccaggtcttcaccatgtcctcactttggatgtgctcttttacctaagttctgccaccacctccctgggagccagcagatggggaaacagaagggagatggctggtagagcccactggcttccctcggagcacctcagcctaatagaagttgtcatgtgtcagctcaggacatgagcagagccctcccgggcagcagctgctccagcagcttacagccaaaatggtgctgatgtgagggaggcccagctccgaggccggacagaggaaggagcacaagacccgtggcacaaaaacaaccaaacaacaggtgaaggggaaacggactgtgcatacaaagttgacctcctgcctttagctggcttggacctcagtgttaaggatgccacctttcagatgtggtgagcaacaaaagcaggaagggccagataatttggaaccaactgctaagctttgttcaacttttcctgaaaatcccagatcttcaagttacagatccagagggatcatggtatctgacgctctcattctgcagatgagcacccacacttatgtaggttccaaggacccatcccgtgtggttcagctagcagagcctgagtcatccagcccagcattttgctttgtacttactccttaccaataagaatataaacatcataatgggatcaactatggatttattcatttactctctattcaaagtatcataaytctttggttttgaatttttacagatctcaaaatatcacatttttgcaagtaactgtactaaattttgtaaagtgggctattccaataacaatctttaatagctaaagaaagtttagaagtccgtttaaaaacttaaattttaaggaaactatagcattttatcaaatgctgaattttctttataactagccaagacatactaattgtttctgaccctccagttccccttaatgaagcatttgaatttagagaacatgggtctatctgtgttttacatattcctcatccaagatgtcttgtgttccagtgagctcttctgttgagaataatcagaaaagg

SEQ ID NO: 667993 - DNA, 640 bp, Homo sapiens
aagcaaaatgaccatctagcctgtcattaaaacagcaggggagtgaaagcttgaaaagttctagcaaacggggaaataaatggaaattgaatggataatagtggatataccgtaccaagaagatgtgtatcatgtcttttaaaaaggcagagcactaagtaagggtgccatatttttagtgaatatatttattcattatctagtcccatataaattttcatgttccctcagaatcccccttttttttgaatttttaagtttgttaatagtaaactggtaaattttcttactcygtatgtgttttttttgttgttgttgttttttaaggaaacttgccttcctcttaagggaaacaaacacacatacacacacacacaattaggacaaatcaggagtatgactgatcagtaacaaacctggataattagggaatgacaaagccttcatgtgggggttcacatatgcccacagtgcaaagggagatgtctgggtgacatggtgaccaggcagctggtctaagggctggtaattgttttaactagctctctggtttgaaagacagcacactggagatacagacctgaaactgattctcctttctacacctccttagctttggaactttggatgagctatttac

SEQ ID NO: 667994 - DNA, 644 bp, Homo sapiens
tgaaccagcctagggaggatttgaggcaactgccattgtttctgcctcaaggacccttcagcctggctccctgcacaaaacaacaggaccacagcttggtacatgtgttttaaatgtgttttgattgaaatgtgtagcctctaagggattctttgggcagaatttcagtcaggaaatatgtgggagaaatggacattacttcaactctgaagaatccagtarttggacttgtggagaaaagggacctctacaggttgagataggaatttataaaacttgaacaggaagtaatgaaggaacctggtacgctggtggagaaaggagtaaatagcaaatatgactttaaaagtaatgggaaagtccacactccgtgcagtaaccaggagggctgctgaagattccagaccaggatagaggctaagagactaacttctctcttctctctccatatgcacacatacatatatatatgttctcacgacaatctgagaatatatatatatatatatcagtgttacgcacatggtaaatattattgattaggacaaataatcataattcattgaaatagggctaaaggaatcagtagcctattatttttttgagctatgctccttttggcacatgcccttaacccaacacac

SEQ ID NO: 667995 - DNA, 1096 bp, Homo sapiens
tataaatataactagttacaagatagaaaaggaaaatagctcaacaggtcacctaaaatcagatagttctgtttatttcacaactttagacataacagatttcaattaataaagacttttcctaatttttataaaagcttaaccacttggtacccaacctttctagmcttctggtttagtgccagctccagaagaaaacaatttttaaatatttgaagcaactaaacaggtatttaccacctattaacaatgaacaaaaccaaggaaggaaataaagacacaaagattgcatcaatgaaaccatgatcaggatgccatgtggaagaaagagaggtctgattaacaagcgaagccttatagatggcaatttgtttgctgaaaaaacaagactcccagtaaaaacaagctgtgaccagcaagtttactgtaagcagcaagttgtaagtgtgactagggaaggagagagtccctcacaagcaggaaatgagagaagagctaggaaccccaggcaagttggaggtaataaagggattaggcagtgaaattgcatctatagccccaggggcactgcagtggtgagaggcagcaggcggtattttccaacatggcgcaacaatggttcccaccacacatcctcttctgctgagtgacattgccactttccaatcaggaggtagagtccttttctcccctctcttacacatgggcaggcctgtggctgctctgaccaatagagcagggtagaccatcatgccaggtccaggaaggccctcgcctggtccagtagctactacttcctgcctcttggaagacagctactgtgttggaactgaggctatccaaaaaccaccatgctgggagaagcctacaccacatggagatgccctgaagcatgagacaccgaggtgagcggcagaggaggggaaatagatcaaacagtaccagggcaccagctgtaggaaggaggaagtcatcaaagtcatatatccacagtttcaggcactcctgctggtgtctcatgcaccagagacaaattcctcaacagagccctttccgaatgtccaacccataaaattgtgagcaaaataaaatggca

SEQ ID NO: 667996 - DNA, 1096 bp, Homo sapiens
tataaatataactagttacaagatagaaaaggaaaatagctcaacaggtcacctaaaatcagatagttctgtttatttcacaactttagacataacagatttcaattaataaagacttttcctaatttttataaaagcttaaccacttggtacccaacctttctagacttctggtttagtgccagctccagaagaaaacaatttttaaatatttgaagcaactaaacaggtatttaccacctattaacaatgaacaaaaccaaggaaggaaataaagacacaaagattgcatcaatgaaaccatgatcaggatgccatgtggaagaaagagaggtctgattaacaagcgaagccttatagatggcaatttgtttgctgaaaaaacaagactcccrgtaaaaacaagctgtgaccagcaagtttactgtaagcagcaagttgtaagtgtgactagggaaggagagagtccctcacaagcaggaaatgagagaagagctaggaaccccaggcaagttggaggtaataaagggattaggcagtgaaattgcatctatagccccaggggcactgcagtggtgagaggcagcaggcggtattttccaacatggcgcaacaatggttcccaccacacatcctcttctgctgagtgacattgccactttccaatcaggaggtagagtccttttctcccctctcttacacatgggcaggcctgtggctgctctgaccaatagagcagggtagaccatcatgccaggtccaggaaggccctcgcctggtccagtagctactacttcctgcctcttggaagacagctactgtgttggaactgaggctatccaaaaaccaccatgctgggagaagcctacaccacatggagatgccctgaagcatgagacaccgaggtgagcggcagaggaggggaaatagatcaaacagtaccagggcaccagctgtaggaaggaggaagtcatcaaagtcatatatccacagtttcaggcactcctgctggtgtctcatgcaccagagacaaattcctcaacagagccctttccgaatgtccaacccataaaattgtgagcaaaataaaatggca

SEQ ID NO: 667997 - DNA, 1096 bp, Homo sapiens
tataaatataactagttacaagatagaaaaggaaaatagctcaacaggtcacctaaaatcagatagttctgtttatttcacaactttagacataacagatttcaattaataaagacttttcctaatttttataaaagcttaaccacttggtacccaacctttctagacttctggtttagtgccagctccagaagaaaacaatttttaaatatttgaagcaactaaacaggtatttaccacctattaacaatgaacaaaaccaaggaaggaaataaagacacaaagattgcatcaatgaaaccatgatcaggatgccatgtggaagaaagagaggtctgattaacaagcgaagccttatagatggcaatttgtttgctgaaaaaacaagactcccagtaaaaacaagctgtgaccagcaagtttactgtaagcagcaagttgtaagtgtgactagggaaggagagagtccctcacaagcaggaaatgagagaagagctaggaaccccaggcaagttggaggtaataaagggattaggcagtgaaattgcatctatagccccaggggcactgcagtggtgagaggcagcaggyggtattttccaacatggcgcaacaatggttcccaccacacatcctcttctgctgagtgacattgccactttccaatcaggaggtagagtccttttctcccctctcttacacatgggcaggcctgtggctgctctgaccaatagagcagggtagaccatcatgccaggtccaggaaggccctcgcctggtccagtagctactacttcctgcctcttggaagacagctactgtgttggaactgaggctatccaaaaaccaccatgctgggagaagcctacaccacatggagatgccctgaagcatgagacaccgaggtgagcggcagaggaggggaaatagatcaaacagtaccagggcaccagctgtaggaaggaggaagtcatcaaagtcatatatccacagtttcaggcactcctgctggtgtctcatgcaccagagacaaattcctcaacagagccctttccgaatgtccaacccataaaattgtgagcaaaataaaatggca

SEQ ID NO: 667998 - DNA, 1096 bp, Homo sapiens
tataaatataactagttacaagatagaaaaggaaaatagctcaacaggtcacctaaaatcagatagttctgtttatttcacaactttagacataacagatttcaattaataaagacttttcctaatttttataaaagcttaaccacttggtacccaacctttctagacttctggtttagtgccagctccagaagaaaacaatttttaaatatttgaagcaactaaacaggtatttaccacctattaacaatgaacaaaaccaaggaaggaaataaagacacaaagattgcatcaatgaaaccatgatcaggatgccatgtggaagaaagagaggtctgattaacaagcgaagccttatagatggcaatttgtttgctgaaaaaacaagactcccagtaaaaacaagctgtgaccagcaagtttactgtaagcagcaagttgtaagtgtgactagggaaggagagagtccctcacaagcaggaaatgagagaagagctaggaaccccaggcaagttggaggtaataaagggattaggcagtgaaattgcatctatagccccaggggcactgcagtggtgagaggcagcaggcggtattttccaacatggcgcaacaatggttcccaccacacatcctcttctgctgagtgacattgccactttccaatcaggaggtagagtccttttctcccctctyttacacatgggcaggcctgtggctgctctgaccaatagagcagggtagaccatcatgccaggtccaggaaggccctcgcctggtccagtagctactacttcctgcctcttggaagacagctactgtgttggaactgaggctatccaaaaaccaccatgctgggagaagcctacaccacatggagatgccctgaagcatgagacaccgaggtgagcggcagaggaggggaaatagatcaaacagtaccagggcaccagctgtaggaaggaggaagtcatcaaagtcatatatccacagtttcaggcactcctgctggtgtctcatgcaccagagacaaattcctcaacagagccctttccgaatgtccaacccataaaattgtgagcaaaataaaatggca

SEQ ID NO: 667999 - DNA, 659 bp, Homo sapiens
caatttattagttgtttatctgaaattcaaatttaactggactccctagattttatcaggcttccctaaccctcaggcctctgcctctaggttctccacagaggtactctcacctaggcccacataaacattctgtccactaatgtgaacctcgatccattgtgaattctccctatttgcatgtagtcatctaaaatattacccagggctggggggctggggagtagtgcatttttttcatgcctcttaccacctgcctgacccctsatctcactcaggaatgtcatccatgagtcgaaatctagtcatctaattttggaggcccttccccctcaccaggccacgcagagacactgtccctgggacctgtggtgcaaggaaattgccctcattgatggccatggcccatgcaatgctgaaaggaaggaggtgcccacctggaaattctggggttttaaaaggctccctacctggagagatccaaccagactgcacttgcccttgagtactaggagtactcaaactcaccaaatgtcaaagacctttggcatctcggaaggttcttagctcacccgttctaaattctccctccacagcagtcctgggagaggaagtttgggttaagaaaaaggctaaaagtattggctcgtgtaaaaagt

SEQ ID NO: 668000 - DNA, 984 bp, Homo sapiens
tcaaaggacataggactgacttcaacactcactcactacctttctgggaagcagtactcctagactttgaggctagatcttatggggctgtcctcgcctgtcagtagaagggatagttagggctctacatggggcagcagtgaccctattgttgattgccacaatgccagaaatttgaaaaaaatgtcatagttctacttgaggttagtgttccccagttcctccctcttcccacctgatttccccaacatcataagcacatgctgttcacacatatctaatactcttatcccaccatcatctctagctatcttccaagcacaaatatatacatatataaggaatcactttctcatccctggatcatccaaccatctttctcccgctactcaaacattacttaactttctacttcttccaccagctttttcagacaatttattttcctcttgactacacaaagcactaattcctgccacatatatctcatggaaatgtttgcacctcatccttccatggctgttcaatgctaacrgttcagttgtgcttttcgggcaatggggggcatgccagacagttccacctgtccctccaagtccaaccttctccatcctactgagcctcaggaggccaacccctaggggccctatcaaggggagtcccttgccctacagttttcatttggatttggccagtgggaggcactatctggaagtcagagagaatgaagaaaggggaagctgggaattgattccctcattctctccttgcagcattgttccaggttgtctgggctccttacagctcctggcatatcgtcctctctatggacctatacattagtttcctgtggctgctataataaattcctgcaaacttggtgggttaaaaacaacagtaatatgttctctcatagttccaggaggacagaagtctggaatcaaggtattggcagggtcacgctccctctggaggctctgggat

SEQ ID NO: 668001 - DNA, 984 bp, Homo sapiens
tcaaaggacataggactgacttcaacactcactcactacctttctgggaagcagtactcctagactttgaggctagatcttatggggctgtcctcgcctgtcagtagaagggatagttagggctctacatggggcagcagtgaccctattgttgattgccacaatgccagaaatttgaaaaaaatgtcatagttctacttgaggttagtgttccccagttcctccctcttcccacctgatttccccaacatcataagcacatgctgttcacacatatctaatactcttatcccaccatcatctctagctatcttccaagcacaaatatatacatatataaggaatcactttctcatccctggatcatccaaccatctttctcccgctactcaaacattacttaactttctacttcttccaccagctttttcagacaatttattttcctcttgactacacaaagcactaattcctgccacatatatctcatggaaatgtttgcacctcatccttccatggctgttcaatgctaacagttcagttgtgcttttcgggcaatggggggcatgccagacagttccacctgtccctccaagtccaaccttctccatcctactgagcctcaggaggccaacccctaggggccctatcaaggggagtcccttgccctacagttttcatttggatttggccagtgggaggcactatctggaagtcagagagaatgaagaaaggggaagctgggaattgattccctcattctctccttgcagcattgttccaggttgtctgggctccttacagctcctggcatatcgtcctctctatggacctatayattagtttcctgtggctgctataataaattcctgcaaacttggtgggttaaaaacaacagtaatatgttctctcatagttccaggaggacagaagtctggaatcaaggtattggcagggtcacgctccctctggaggctctgggat

SEQ ID NO: 668002 - DNA, 605 bp, Homo sapiens
ttgttaaaaggcaaacagctgagcccccctcccagagattttaattaagtagttctgggtaagactcaagaatttgcatttctaacaagttcccaggggatgctgattggcgtttctggtccagagaccagactttgaaaaccactggcttaaaataggtgaaaaatttactctctcatattaaaaaaaaaaaaatgccctggagatggtggcttcagggttggttaactcaacagctcaaccaggtcctcaaggacctggctccactctgctgtgccatcctcagcatgtcaaccttgaccttgaccaggtccttacagctgcaggctgggtccgacagttccaggcatcccttacaggctggatagtggccagcaaaagagattaagcttcttaaggattgagaactcttctagytgttatctccttacatcatattggccaggatcacatcacatgcttgtacctaaaccaatcactgtcaatgagaagaggaacagcaatgattggcttatacccatcagccataggaaggaagagtagacaccaactatgctgatgggctctggagataatagaaaaaaggattacatcacctgcttagg

SEQ ID NO: 668003 - DNA, 640 bp, Homo sapiens
tagaaactttctataacattatttctaatagtcatttatctatatatataaactgccagctgtctaatgtaataccacatgacagagggattaatcttgaagaatctatgaaccatttcctcttataaaagatgaatgtgacaagctgcaccataaactagataaaccaagactattaaaaacaaaccgaaggaaaataggagtaaagtactgctacaggaaaagccttagagtttaagctaatgcaatatatatccacagaaaacttcaagcaaaatatagatatttatatgagagttgattgtaaacaaagagttgctttgtgtagataactcttagagttaaaccaaatattcctttaaatgtgatgaagtttgtatgggtctgyagcacaaactctaaggataagactttaatatgaaagagaaaaagacattttcaggtagttaaccaacccttttcaaagggtcctacataataattctatctctaccatattaaagacacatattacactgaaaatctaattcacaccaaaagatcaaatcaacgtacctgaatttaacgattcatatccatttcattgtctttagtaacactcacacaacagaagtgtccacaaactttaaactctttgaac

SEQ ID NO: 668004 - DNA, 1457 bp, Homo sapiens
tgtggatgtggatttaggaaaggattcctacatgcgatttacaagccaggaaacgcgctcaggctgagaaataacccaaagagtaggcgtctgcactaacctacttcaaaacccatgatctttctttcgcatcatgctgcgaggtccggaacatcaaacatcatctgtttgggaattcttttgaaggggatacttcaaggtggaaaaggaagttgctgagccgagttttcaagtgccccttccaaaggtccttttatagctctactgacaatttttgctaagaatatttatcataaatatagagcatttcttctgcaaaaagtgttattctttcatcacaactacatggggtgtgtttctgaactaggtacatcagccccagttatctgcattcatattgcagataattggaaaattctaataagtgcattttttcagagcagaaattgaaatcgtagccaagttactgaggttcatgggggagtggcaaaaggagaaagatagcaagcagcaactaccttaattgtacagtctgcagttcttgaggctatgaaatccaatttgggcagggaggaggcccagaaagttgggaactaagaaagtacggtaagggagtgggggcagggagaatgggagcaaatggagaaaagaaaacttcaaacaaaaagggcaattaattaaatctctgaaaattgaagccagcaggaaaattgagactagactatatgaaaatatatataataatacatgtaatataatatatacatattatatgatataatactagttatacatataaaaatagatatttattgaacactttactaagcactgtatttgtgtatatagacgtaatgtgtatgtatgcaatatatatataatttcatctttctaaaaacacatgaagtatgtgctattatttgtccccattttacatatgaggaaatagaggttaagtaacttgtccaaggttacaagtttaataaatggtagattcagaagttaaacctgggaccatgagactgcaaagactgtcccagacctttatgctatacagtcaagagccataacacagcgtatagggccaaatggaaacctccattcctctgtcctcactgatgctgcggcctcatcaaatcttactggccctgaaacagtcctgtcatttttgtccgtgcctctgtgcctatgtayacactgtttcctcagttctgtataatagtttaacgaacaatagatgccaaatgttagaagccttgctaatatatgaattatataaacatatacagatttccaaaagtagccatcacaacaaagaatatttctagagacaaagagaaatatttcataatgataaaatggtaaataaccacaagccattatcaattttaagtgtataggtgaacgtaagagaattttgaaatatatgaagaataagtatcaaagctaaaggagga

SEQ ID NO: 668005 - DNA, 653 bp, Homo sapiens
cactgttagaaaacatctttcaaatagctttctactgaagaaaatttagaagagaaaaatagaaggagaaaagtctttaagaagaaatatacagattatccatttattttatgcctacatgtcaattataaaattgctcaagaacatattatataggctagtcaagtgtataccaatactacagaaatatatagagaatcaaagaaatgttatcatataaacattttataccaatgytcctatataacataaaaaagaccacttctagataaaaagtctttgtagtcaaagtttttgagtgctgcaattctggtataaatataaccagtcaatgaaataaaccaatttagaatagattcattcttgagaaaactattatttctaaaaatgtaattaatatttacatttatcagatctccatactcaagcagactattaatgcttacaaaatctatacataaaacatttcatttaggaaaagcaaatggatttaacatatactgaataacatatactgaaatgtcacagaaaacctacatttaaagatcattttttaatctaaggaatcaatacaatagattgacatttgtaattgctttggaaaaggctgcagcttgagaaagataacacaagttaacctatttgtgagccta

SEQ ID NO: 668006 - DNA, 634 bp, Homo sapiens
tgtagcctgtagcttaagttaactaaacctaatgctgctgttaaaaacagtttattttaatattaaaatacagttgattagcaacagcggtgctgtattttaagagacactttattggaagtgcaatcatagttatttgttttcacaattttacagtgcattctaattactgatgggtgcaattacttttaatcgtgttttataaaatagaaaaaaagtggagttttcatgagttatagtaaatcccacgattattaagaaattcartaaaacatcctgcgcaacatgttaccgtgcctttgcctaacctaaatggatagttgccagttaaataagtgagtaattcaaatttcaatgtctcttctgaagtaactatgctatgaattgcaaagacctccataaaaccacccatggccttgcttttacactaactataacaactaaatgttcaatcagtttgtttgcctaactagcaaatgctgacatgtgtttgttctactgcgcaatactcatttgctgtgtgattactgtttagtgttgaaaaaaatcaacttcctagttatcagtgtcttactgtgaagaaaatactggtcttagttgtaattaggatacaatggtacagtgtgtaattaaa

SEQ ID NO: 668007 - DNA, 1453 bp, Homo sapiens
catttatcaaaaacttacagtaaacatcccagtttagagtgacatgttaaaatcaagaacaggaaaaggatgcccattatcactacttctactcaactaaaggcaggtaagataaaaggaattaaaggtagaaataatgaaattaagaggcagtcaaaaccataaatattcagacattatgattagctgcaaagaaaactcaagagcatctatagacatatagatagaattcatagagatttagcaattatgctggataagaacaacatttaaaaagcaatttcaggctgggcgtggtggctcatgcctgtaatcmcagcactttgggaggccaaggtgggtggatcacctgaggtcaggagttccagaccagcctgaccaacatggagaaaccccgtctttattaaaagtacacaattagctgggcgtggtggtgggtgcctataatcccagctactcgggaggcagaggcaggagaatcgcttgaacccaggaggcagaggttgcagtgagctgagatcatgccactgcactccagcctgggcaacaagagcgaaactctgtctcaaaaaaaaaaaagcaatttcacttctgtatatcactaacaaactgttataaatgtaaactaaaataatacaacatacaaactatccaggaataaatataatgaaagatgcgcaaacctattgtgtagaaaattataaacttttattgaagggttttagagagctctgctccttgataagaattgaagccttattatcataaagatatcagttatctccaaattaatctataaattcattcaattccaaagtcccatgtaatttttccatgaaattggataaattgattctaaaacacatattaaagagcaaagggaccatggatctctaaatgtgcaaatatgatggaaagattaagaaaaggtctgaaagaacagatgtgaaattgagaatacttgttatccctggtgaggagcataagtttaaagaagacgtgggcaacagaagtgaagaacttttatttcttgtctatgtaattatgaattacatttttaaaataataataacacatttacagatcacctgagtaatatacaaagtacaaggggatgaaagatgctgtatgatttataaagatatcagctagaagcccaagtacaaagagaaaaaatgatgtatacaatagtacccccagcttatccatgtcatcaactatggtctgaaattattaaatggaaagttccagaaataatccataggttttaaatggcatgtcattctgagcaacatgatgaaactctgtgctgacctgcaccatctcacctggcaaatgagtcttccctttgtccactgtactgtgctgtaggctctaccaccatgttagtcatttatatgatctattcttgacatccaaccatcatcatgactccatgatccaagatcagtca

SEQ ID NO: 668008 - DNA, 1022 bp, Homo sapiens
ttcagggactctgcactgcctaccaggctaagcacataaatgcttcagcttggcattcaaaacctcctggatagagcccataggaactcctactccatcagtccatacccctgtgccttcatccattacctcctcactctgcccagagcacacacagatcccgtgctctggctctttctgatcagaacacacttctcattgttctattcattaaggtactcattctttaaaagactacaagaatgccacctcttcccagaagccgtccataattcatcttcattagaactcttttctctgggctttactaaaacacgcaagccagccctgcattctaattagtagctattacctagctctcttccacaagattatatagaagagtagttaagaagatgcatttggagatagaaagacctgggtccaaactttggcttggcacttagctgtgtgacacagaacactttccttaaccatgagccttaaaatgagataacaacagtacctacttccagggatactcatgaaggttaaatgacataatccacataaaatactaaatagcatgcctagcagttagggctcagcaaacaaaggcaggtattacctggaggttttggaacatcctccaattcttcaacatttctcccctgtcaggtttatgtctcttcaccttgaatctgagctatgtgactgcttgattagtagaatatacaatagcctccccttatctatggggaatatgtgccaagactctaagtgcatgcctgaaaccacagatgggacctatrtatatggtttggttcaaggctgcagtgtgctatggtcgtgccattgcactccagcctggttgacagagaccccttcttaaaacaaaacaaacaaaccacctctatattcattggtacaaaacagccatactgctttgtaatttcaagtaaccaaagaatgacagataaataggagagactaacagtcactttgaaaagcaagaaattcatgaggccatcatctgcatacaa

SEQ ID NO: 668009 - DNA, 530 bp, Homo sapiens
ggaataaatagttacatctgtttggtgaaaggtggaaaagggtggggagaaaaaagaggggctcaagaggaagagaaaagaacaagtgagagacggtctccccaagaacagggcgggggkcctgagctgcaggaggcccatggagaggcttcctggtcctcaggggctgcttctgcttgtgctccggtgtcacggtgctggtggaacgtgacacacccagtccagcacctgcattatggactttttgcagaaagaccagacagcagctccgttgcctagaaacagaaagagatttgaggaaagagagggagatataggtaaaggccggggagagcgtggacttgcttggggacctttcacttgtggcctctcagaaggagcacgagtggggagctggggagattacatactgtttcttcattttagaggagctagtctataaatatctaggatgaatcggatgcctgggtttatttgttttgttttgttttgagataagatttcactctgtcacccaggctggagtgcag

SEQ ID NO: 668010 - DNA, 530 bp, Homo sapiens
ggaataaatagttacatctgtttggtgaaaggtggaaaagggtggggagaaaaaagaggggctcaagaggaagagaaaagaacaagtgagagacggtctccccaagaacagggcggggggcctgagctgcaggaggcccatggagaggcttcctggtcctcaggggctgcttctgcttgtgctccrgtgtcacggtgctggtggaacgtgacacacccagtccagcacctgcattatggactttttgcagaaagaccagacagcagctccgttgcctagaaacagaaagagatttgaggaaagagagggagatataggtaaaggccggggagagcgtggacttgcttggggacctttcacttgtggcctctcagaaggagcacgagtggggagctggggagattacatactgtttcttcattttagaggagctagtctataaatatctaggatgaatcggatgcctgggtttatttgttttgttttgttttgagataagatttcactctgtcacccaggctggagtgcag

SEQ ID NO: 668011 - DNA, 530 bp, Homo sapiens
ggaataaatagttacatctgtttggtgaaaggtggaaaagggtggggagaaaaaagaggggctcaagaggaagagaaaagaacaagtgagagacggtctccccaagaacagggcggggggcctgagctgcaggaggcccatggagaggcttcctggtcctcaggggctgcttctgcttgtgctccggtgtcacggtgctggtggaacgtgacacacccagtccagcacctgcattatggactttttgcagaaagaccagacagcagctccgttgcctagaaacagaaagagatttgaggaaagagagggagatataggtaaaggccggggagagcgtggacttrcttggggacctttcacttgtggcctctcagaaggagcacgagtggggagctggggagattacatactgtttcttcattttagaggagctagtctataaatatctaggatgaatcggatgcctgggtttatttgttttgttttgttttgagataagatttcactctgtcacccaggctggagtgcag

SEQ ID NO: 668012 - DNA, 1561 bp, Homo sapiens
tgacacctgtaatcccagcactttgggaggctgaggcaggaggatcgcttgagcccaaaagttcgagaccagcctgggaaatacagcgaggtctcgtctctacaaaaaatacaaaaattagccaagcgtggtggtgcctgcctgtagtcccagccacctggaaggctgaggtgggaggatcacctgagcctgggaggtcgaggctgcagtgagccatgttcacacccctgtgacagaatgagaccctgactaagaataataataataataaaattttaaaaaacaggttaaagtaatgattcaacctgatttttttttttttagttaaaaactcagctctaaagttcaggaagtagaagttagatgttctgtgttttctgaagatagaatcctccctgcccttaagaaaagaggaaagaactggccgggcgcagtggctcatgcctggaatcccatcactttgggaggccgaggtgggtgggtcacctgaagtcgggagtttgagaccagcctgaccaacatggagaaaccccatctccactaaaaacaccaaaaattagccgggcatgatggcacatgcctataatcccagctattcgggaggctgaggtaggaggatcgcttgaacccaggaggcggaggttgtggtgagctgagattgcaccattgcactccagcctgggcaacaagagcgaaactccatttcgagaaaaaaaaaaagagagagaaaaagaaaagaggaaagaactttmtattgctaacaatatgttagttagctctgttgttaatggtcagtgaggatcctcttgatctgccataaaggctactacgagagacaagacattagcaagactggggtgtagagggagaaaaaactagggtggaaaggagaggctggagaggagacagaggaaattcaacaccagacgccttgagccgagtgtagatctcaaatgagaccaatgcccaggaaatgccaggtgagaggtcaagagagcgcagacaggaactcctggcatgccccgggtctctgctacaccaaaggctctcctggtgaaaaccactccttctcaattgagggaagaggctctaccccatggtcaaggtctgcattcccaccattgtacggatgctccaagagcacataacctccctcaacaacaacacgccccccaccccagacaaccataagacccaagacaacctctgaacaccaagtagggcagtgaggaagatgcccacccctatataggggggtaaaggggttcctacgcaggcatcctgagctaggacagtgagagaaggagatgctactattctattagctatcactgttgtcattatctctttcttattttatttattttattttttgagacaaggtctcactctgtctgtcacccaggctgaaatgcagtggcactatcatgggtcactgcagctttgacctcccaggctcaagtgatcctcccacctcagcctcccatgtagctgggaccacagatgtccgccaccgcacctggctaattttgtttcttttttgtagagacagggtctcact

SEQ ID NO: 668013 - DNA, 596 bp, Homo sapiens
cacccggccaaggtgacatttaagttcactgtggcagtgaatttattatgcagataggagttgcatgaattttctccaaaatattcagatataaaattcatttttgtstaaaacaaatcaatctgacttagcccccatgtcagccataatttttctcacatctcgcctccatatgtaaaactctagagaggaactgattagcgtgaaaggaaaataaatcttgggaccccaaaatcactaagccaaagggaaagtcaagctgagaactgcatagggcaaacctgcctcccactgttttcctcaaaaagataaaagctacataccggccaagcatggtggctggcacctgtaatcccagcactttttgaggcccagaacgttgggaggccgaggcgggtggatcacgaagtcaggagatcaagaccatcctggctaacacgttgaaaccccatctctactagaaatacaaaaaattagctgggcatggtggcacgagtctgtagtcccagctactcgggaggctgacgcaggagaatcgcttgaacccgggaggcagaggttgcagtgagctgagatctcaccactgcattccagcc

SEQ ID NO: 668014 - DNA, 885 bp, Homo sapiens
tgatacctctttatttttagggtcccaaaacattttgggtaagcacaactagtttacatccctcctactaactaaaacactagaaagaactatcgagggaccctaaagggcctcgggactttttaaaaatttgcagttattattattactattatggttattatttgtagagatggggttctagctatattgccctgccaaagcactaggaccaaaggcatgagtcgctgagcccaggctgggtctcagaacttttaagcttattaaaaattacctgtaacccatcctactgctgtccttcccccaaagccacacacacataccagtgaccttctaaagcaggagttacctgtaataagagttacttgggataaactatgatctgtaccaaatgaatgagaatttccaggctgagtgcccctaaggatggaggtaccatgaatagaaatgggaaacaaagaaaaagcagttccctcaccaccatcactccgtggatggggcaccgatgggatgacgggtgaggcaatctgtcccagacccgggccctycctgcacattctggctgggaatgccaagaacacaagtccctagtggctgttacttgggccatctctcagggttgttttgcaacatgcaacctcaaggaataagacaatgtctcctcatgagatgaagagcagaatggcttctatttactgtaaaaggggtaaaacccccaagctcagtgtctctaggctgtgatgaaatccagtgcacgtgcagcatccatctgggcctacctgtgtcaccctgtgggcactggggaacaccgggaatcaacacaaagcatcatcacaccatgctactcaccgttgagtaataaaatcttttgtctctgaccaagga

SEQ ID NO: 668015 - DNA, 885 bp, Homo sapiens
tgatacctctttatttttagggtcccaaaacattttgggtaagcacaactagtttacatccctcctactaactaaaacactagaaagaactatcgagggaccctaaagggcctcgggactttttaaaaatttgcagttattattattactattatggttattatttgtagagatggggttctagctatattgccctgccaaagcactaggaccaaaggcatgagtcgctgagcccaggctgggtctcagaacttttaagcttattaaaaattacctgtaacccatcctactgctgtccttcccccaaagccacacacacataccagtgaccttctaaagcaggagttacctgtaataagagttacttgggataaactatgatctgtaccaaatgaatgagaatttccaggctgagtgcccctaaggatggaggtaccatgaatagaaatgggaaacaaagaaaaagcagttccctcaccaccatcactccgtggatggggcaccgatgggatgacgggtgaggcaatctgtcccagacccgggcccttcctgcacattctggctgggaatgccaagaacacaagtccctagtggctgttacttgggccatctctcagggttgttttgcaacatgcaacctcaaggaataagacaatgtctcctcatgagatgaagagcagaatggcttctatttactgtaaaaggggtaaaacccccaagctcagtgtctctaggctgtgatgaaatccagtgcacgtgcagcatccatctgggcctacctgtgtcaccctgtgggcactggggaacaccgggaatcaacacaaagcatcatcacaccatgctactcaccgytgagtaataaaatcttttgtctctgaccaagga

SEQ ID NO: 668016 - DNA, 746 bp, Homo sapiens
tgctgcgcggaactgctgyacacgtggcatggctttaagaacctgcaccagagggttgttcccctgcgaacatggcccagtttgactcaaagcctcctgttgaagtcccagagggtgactctgggatgccacagggccacctgctccttattacaatgtgcctagctccatggtgaagccatgaggggtccagggtttctgtgtatcactaacgatgtcaatggccctagtcgggatgttctttattcatgtgactcacgatgtccaaacagcaggcaaaacttccagagctttgcaaactggtgtcccttgaatggaatggggcccgtggatgtatctgactttgctatcttatctcctaggacaactgggtgttaattttttaggtggtttgtcccagtctcctctacttcctattgtctttgtgtgtgtgtgtgtgtgtgtgtgtgtgtgtgtggagatggggtcttgctctgtcacgcaggctggagtgcagtggcgcgatcttggctcactgcaacctccacctcccgggttcaagcaattctcctgcctcagcctcccaagtagctgggactacaggtgcacgctgccacgcccggctagttttttgtattttagtagagacggggtttctctgtgttgcctaggctggtcttgaactactgagctcaggcaatctgtccacctcggcctcccaaagtgccaggattacaggcatgagccactgtgcccggcccctattg

SEQ ID NO: 668017 - DNA, 1027 bp, Homo sapiens
gagcagtcatttccgggaggtggggcaatgtgagctctctaccgggcctcaatggcccaggtctcccagggctggctgggcctctcccctgacctgcttgtaggtttttgtggattggccagggggatttatctgcacacatgcctgggttgggcccaggctgggtcaggagccacagcacagctgctggggacttggtttgacctcagcaatgatgacacccaagaagagagctgcctgcccctccatgacccccacccccatcccataatgctgccaccatcctctagcaccagctcatgctggcccttggtggggacacaccatgtggagataacttgtccttctcattcccccatcctcaaaaagtgtcatcaaggcacatgagtaacagccagaactccaccctctgcaggcgagttctctgccttaggcagtgctaccttggtggccagatggcggcacctgtagcttctctgcctgatgagaaaaagatccaagggtgtcactcagaagtgtatgcaccatggggactagggcttggctgccacatcgccagcaacaggaacatttgtcttttatctagcatcttcatttcccttggctttttctgcagggccacattgtccaatctcttcactgagtgaagttctgaggcttgaactattgggataaagagcccactcaaaccacacacacgatgcacggcctgggaaaatcatttcttttaatgacagagaaagcacaccaaatgataacagaagcctcattgggagttaccactgtacaaatcaatgcctggaggccctgaactagcattagacattcacagggaagtcagctgaggttaaggaaacatccacgcagcatctctgaggatacagaagtgggaggaggaaggtgacagmcgcaatgcacacgctgtgtatctgtagcttggactcttcttcaggcagttcttgttttccttccacattggatggtaggggctgggggaggtttgcaaatgatcatgtggaagagaggc

SEQ ID NO: 668018 - DNA, 637 bp, Homo sapiens
agatgttagccctgtgtataaaatatcttcacagaaacacatagattagcattttatcagataactgggttctgcagtctagccaagcttacacataaaactaactaccagagaggcatggccagaaccgggagagggcacggagaggtgagggcaggcctcccatctctgtgtcccagaggtgatggtgcaccttctgggcagcctttcaatcctggactcagtctcactaagcagccaaagcccatggttccagcacctttagttgkcctgcttcacacccttctcccatggcctctctagccctagggtggcagtggcttcctgctctgaccaatctctgagtagtctccttgtctcaatttggtgttcttggcacttccattgcctgggtcaccaattccttgtgtgtaggacctagcatgggttctgccttggcactgactgggaggactttttggttagacaggtcttcactcagctttccttaaattgcaccatgtgccttccagtcatgcaagttagttctggggatgagttttgagaagtgaagaagacagatgcaaaatgaagacttgtcccatgaccaccctcatagctacttaggtggagcaaagctggatgggcagagaggata

SEQ ID NO: 668019 - DNA, 637 bp, Homo sapiens
agatgttagccctgtgtataaaatatcttcacagaaacacatagattagcattttatcagataactgggttctgcagtctagccaagcttacacataaaactaactaccagagaggcatggccagaaccgggagagggcacggagaggtgagggcaggcctcccatctctgtgtcccagaggtgatggtgcaccttctgggcagcctttcaatcctggactcagtctcactaagcagccaaagcccatggttccagcacctttagttggcctgcttcacacccttctcccatggcctctctagccctagggtggcagtggcttcctgctctgaccaatctctgagtagtctccttgtctcaatttggtgttcttggcacttccattgcctgggtcaccaattccttgtgtgtaggacctagcatgkgttctgccttggcactgactgggaggactttttggttagacaggtcttcactcagctttccttaaattgcaccatgtgccttccagtcatgcaagttagttctggggatgagttttgagaagtgaagaagacagatgcaaaatgaagacttgtcccatgaccaccctcatagctacttaggtggagcaaagctggatgggcagagaggata

SEQ ID NO: 668020 - DNA, 637 bp, Homo sapiens
agatgttagccctgtgtataaaatatcttcacagaaacacatagattagcattttatcagataactgggttctgcagtctagccaagcttacacataaaactaactaccagagaggcatggccagaaccgggagagggcacggagaggtgagggcaggcctcccatctctgtgtcccagaggtgatggtgcaccttctgggcagcctttcaatcctggactcagtctcactaagcagccaaagcccatggttccagcacctttagttggcctgcttcacacccttctcccatggcctctctagccctagggtggcagtggcttcctgctctgaccaatctctgagtagtctccttgtctcaatttggtgttcttggcacttccattgcctgggtcaccaattccttgtgtgtaggacctagcatgggttctgccttggcactgactgggaggactttttggttagacaggtcttcactcagctttccttaaattgcaccatgtgccttccagtcatgcaagttagttctggggatgagttttgagaagtgaagaagacagatgcaaaatgaagacttgtcccwtgaccaccctcatagctacttaggtggagcaaagctggatgggcagagaggata

SEQ ID NO: 668021 - DNA, 1203 bp, Homo sapiens
tcttaccaattcaccaaggtccagctaagaatctcctgcactaagtcttctttcaagaagttatggcagtgatgtggctctatagttagcagcttcctgatttggtttctggcagtaacatcagcagctctcctaagcagagtgatcttaggggctgggagctgttcttagaaacttaactaggaacctgatccttggaccttcccaaccattagtaattcatttaatacctgggaataatttcttagtttttaaaaccgtctgcagtggtttctaaggtctataattggaccctaaatggtaaaattactagctaaaaataatgaagaaaaaaagaaataaaaataaccattatcaaggtcattcttccctcattcagaaaaaaaagaactgcaggagaggaaagatagctgtgtagttaaataccatttctgctcagtgacttgcagaaaagtgttgactttgtatcctgtaatctaccctcctcatccagtttctatctagggtatctctgatagagaaccttttgcacaatcccaagagcaggcacctctttcatttataggcaatcacatattaagccaaaatgtgtctccctgtcacttgtacccacgggtactacctatctccatctttgagagctagataaaattgcacttctttttatagaagccctttcaaaaatatttttgacccctatcagaccagctaaagtttttctttccaaccgggtatggtggctcacatctgtaacctgagcactttgggtgtgcatgatatatctttttctatctttttactttcaatttgtttatgtctttgaatctgcagtttgcctcttgcagacagcatgtagttggatcctgtgatttttagtttttttaaattcattctgccaatctctgccttttgattggagtgtttaatctacttatatttaatataattactgataaggtagaatttacttaggccattttgctatttgttttctatacagcctatcttttttatttttctgttcttcaattgttgccttgttttgtgttacacagatattttctagtgtaccatttatatttcccatgtcatgtcttatactatatatatttttagttattttcttagtggctgctctggagattacattyaacactttaatttttaacaatctaatttggattaatcccaatttaatttcaa

SEQ ID NO: 668022 - DNA, 1235 bp, Homo sapiens
ctcttgctggccgtggcggttttatttgggattggggacagagctgagctgcagacactggcactcaatggtctctccttctggtcaccatgcacaccacatcagtctcacgtgactttaacatcagtcaggcgttttcctaaaggccaagttctctccagaatctgtcagtttcacctaccgactgcagagaccctgcaaaacactcatgagacatatacattgggtgcatgaagcccttccygtttctccctctactggggcagagagagagctgattccaagcctcgggggagctcaggaggcagagaaccttctccccgtttccacacctagatttcaaatcacacccttccctgcatactgcagaggccagcaaggcccccttccagaccccctggcctgggcctcggctcttgtaattgtaggacctgagtggcccaggatcctggcaccagctccgcctgtttggtctttggctctcctggcactgccagagaatggaaaagctggtctgtttacaggacatggggccagaagcgcattaaaaaataaggagcaaataaaatgtcataaacaaatttcctttccagtaaggaacgttcctttccctgtcctccaacaggaaccattttttctccagtgtttggataaacttccatcctgtgtaattaccattcccagggaggggctgcctatttccgctggctatttattttgattttgatcattcctccctcttctgagtataacacacttaatagtaaaggaaatatgtttcctattggcgcatggggcacagctctttccttccctcccgtgtcttcttcccactacccctcaccttccaacttcccatgagcctgtggacacagagccccaggtgcgctggctgggggttgctcccctccagcgtgcaggagagttcggagcattggttgactgagaaccaaggggcaaagtggtgaagcagaagggagaaattgtttccaataaaaggtggcacagatccagaggggttgtatgtgggtgaccatctctctgtggagggtcgaggggggcagtcttcagcctgaccccctgtgtgagtttttgtgtgagcagaaagccactgatctaacgtttcctgaccccagcaggtagcttattgtaaaacagttcatccagagggggaaaaataccttgtttcagcatttaagttttcttcttgctctgaaacagactggagaggaagg

SEQ ID NO: 668023 - DNA, 1235 bp, Homo sapiens
ctcttgctggccgtggcggttttatttgggattggggacagagctgagctgcagacactggcactcaatggtctctccttctggtcaccatgcacaccacatcagtctcacgtgactttaacatcagtcaggcgttttcctaaaggccaagttctctccagaatctgtcagtttcacctaccgactgcagagaccctgcaaaacactcatgagacatatacattgggtgcatgaagcccttcctgtttctccctctactggggcagagagagagctgattccaagcctcgggggagmtcaggaggcagagaaccttctccccgtttccacacctagatttcaaatcacacccttccctgcatactgcagaggccagcaaggcccccttccagaccccctggcctgggcctcggctcttgtaattgtaggacctgagtggcccaggatcctggcaccagctccgcctgtttggtctttggctctcctggcactgccagagaatggaaaagctggtctgtttacaggacatggggccagaagcgcattaaaaaataaggagcaaataaaatgtcataaacaaatttcctttccagtaaggaacgttcctttccctgtcctccaacaggaaccattttttctccagtgtttggataaacttccatcctgtgtaattaccattcccagggaggggctgcctatttccgctggctatttattttgattttgatcattcctccctcttctgagtataacacacttaatagtaaaggaaatatgtttcctattggcgcatggggcacagctctttccttccctcccgtgtcttcttcccactacccctcaccttccaacttcccatgagcctgtggacacagagccccaggtgcgctggctgggggttgctcccctccagcgtgcaggagagttcggagcattggttgactgagaaccaaggggcaaagtggtgaagcagaagggagaaattgtttccaataaaaggtggcacagatccagaggggttgtatgtgggtgaccatctctctgtggagggtcgaggggggcagtcttcagcctgaccccctgtgtgagtttttgtgtgagcagaaagccactgatctaacgtttcctgaccccagcaggtagcttattgtaaaacagttcatccagagggggaaaaataccttgtttcagcatttaagttttcttcttgctctgaaacagactggagaggaagg

SEQ ID NO: 668024 - DNA, 642 bp, Homo sapiens
cccttgagtcctcccacctctgcttgcctacctcctcccttccagattgccacccctccacccttcttccaaagatggtccagggctgtcacagggccagcyggcctaggcttggtacctgggttgagttggtgtcatggtggtaagagaaaccaccagtcactctcccctttgggagccctgtcttttgaggactgaaggataggatgcttattccagagggtgtgagaacctcattaataaacctggctggcattggaatgattcttgatgtgtgtgttaatgggtgaaatgcacagaaccaggtgtgtgccatggctgattccaaaaagctgctgctggctctgcacctggtgggtatgagctttgggtagacttttccagaatcaaggaggaatgtcaagggacccacccccagactgatgctcaggcccccttgagagcaacaggagactctaacttaaaaattataacccaacactctaatcctgtgagagagagctggtggtcctagttctcagacctcggtcttgggaatgctgcggtccagttgggttaattgagccatccagtctcaccaggcaagttattggagaactctgactgctgcagaactttaagtcctcacctggaataggatcc

SEQ ID NO: 668025 - DNA, 617 bp, Homo sapiens
gagaaaatgagcaagaggagaacatatccttttcttttaaaggtacaacccaggtgtttcaaacatcactttccctcacatcccactaactagaacttagtcacacctccaatgttgattgccagggaagctggggaaaaatatatgggctttagctgggaagccacatgcccaaattgaaacttgaggtttctattactaaagaaaaaaaatgagtggtctcatagagagatgtagaaaattacaagacagacgggagaatgtgaaaaaacaattgtactgggaatgagaggtgaagccagctgggcttctgggtcaggtggggacttggagaacttttctgtctagctagaggattgtaaacacaacaatctgygctctgtgtctagctaaaggattgtaaacacaccaatcagcactctgtaaaatggaccaatcaatgctctgtaaaatggaccaatcagcaggatgtgggggaacagggccaaataagggaataaaagctggccaccctagccagcagcagcaacctgctcaggtccccttccatgctgtggaagctttgttctttcactcttcagaataaatcttgctggtgctcactctttgggtcggca

SEQ ID NO: 668026 - DNA, 617 bp, Homo sapiens
gagaaaatgagcaagaggagaacatatccttttcttttaaaggtacaacccaggtgtttcaaacatcactttccctcacatcccactaactagaacttagtcacacctccaatgttgattgccagggaagctggggaaaaatatatgggctttagctgggaagccacatgcccaaattgaaacttgaggtttctattactaaagaaaaaaaatgagtggtctcatagagagatgtagaaaattacaagacagacgggagaatgtgaaaaaacaattgtactgggaatgagaggtgaagccagctgggcttctgggtcaggtggggacttggagaacttttctgtctagctagaggattgtaaacacaacaatctgcgctctgtgtctagctaaaggattgtaaacacaccaatcagcactctgtaaaatggaccaatcaatgctctgtaaaatggaccaatcagcaggatgtgggggaacagggccaaataagggaataaaagctggccaccctagccagcagcagcaacctgctcaggtccccttccatgctgtggaagctttgttctttcactcttcagaataaatcttgctgstgctcactctttgggtcggca

SEQ ID NO: 668027 - DNA, 610 bp, Homo sapiens
attaaccctgatttattggtggctaaggacagttagttgcccaygtatatttgtgaaatgacttatacaggaggcaatgctaccatgatctgtaaattcttagatatgaacaaatatagaatcattttgaatacaataaaaatctttgtatttctagcatcttataaattaccaatggcttttacatatcttatctcttttaatccccacaacagccctgtgagccagtcattcttggcctcatgttatagatgacaattttgaagcttaaagaggttaagtgacatacccaagatcacacaactagcaaagctgaggctcagactcaggctttttgactcaaatgtggcttgtcttttaccaaaccacttacctctctactgggttgtttggcttttctccaaagccaggtagaagtttttcacattgaggtttttcagaaattcttacttagatatttcatctttctgtaaaaggcagatttattggcccacaaatttggggagccatattcatttttatatttggcatagcttatgcccaggtcctctccataagggtgtacttttatcgagttagaattgttgagttagatttagatgtgtatata

SEQ ID NO: 668028 - DNA, 610 bp, Homo sapiens
attaaccctgatttattggtggctaaggacagttagttgcccatgtatatttgtgaaatgacttatacaggaggcaatgctaccatgatctgtaaattcttagatatgaacaaatatagaatcattttgaatacaataaaaatctttgtatttctagcatcttataaattaccaatggcttttacatatcttatctcttttaatccccacaacagccctgtgagccagtcattcttggcctcatgttatagatgacaattttgaagcttaaagaggttaagtgacatacccaagatcacacaactagcaaagctgaggctcagactcaggctttttgactcaaatgtggcttgtcttttaccaaaccacttacctctctactgggttgtttggcttttctccaaagccaggtagaagtttttcacattgaggtttytcagaaattcttacttagatatttcatctttctgtaaaaggcagatttattggcccacaaatttggggagccatattcatttttatatttggcatagcttatgcccaggtcctctccataagggtgtacttttatcgagttagaattgttgagttagatttagatgtgtatata

SEQ ID NO: 668029 - DNA, 610 bp, Homo sapiens
attaaccctgatttattggtggctaaggacagttagttgcccatgtatatttgtgaaatgacttatacaggaggcaatgctaccatgatctgtaaattcttagatatgaacaaatatagaatcattttgaatacaataaaaatctttgtatttctagcatcttataaattaccaatggcttttacatatcttatctcttttaatccccacaacagccctgtgagccagtcattcttggcctcatgttatagatgacaattttgaagcttaaagaggttaagtgacatacccaagatcacacaactagcaaagctgaggctcagactcaggctttttgactcaaatgtggcttgtcttttaccaaaccacttacctctctactgggttgtttggcttttctccaaagccaggtagaagtttttcacattgaggtttttcagaaattcttacttagatatttcatctttctgtaaaaggcagatttattggcccacaaatttggggagccatatkcatttttatatttggcatagcttatgcccaggtcctctccataagggtgtacttttatcgagttagaattgttgagttagatttagatgtgtatata

SEQ ID NO: 668030 - DNA, 1312 bp, Homo sapiens
tggtatgagttaaaagaagtagttttagggaagatagaagtaaagctttaaacaacagagaataatttttaaaagttaagtaaacataacattcgttaccaaatgaagttaaaactagtcgatgataacttttaaagttgacatgagaaatgaaaatatgctgtctttgcaatccttcagtcagaggtatgcatctgaatggaccccatgtctaacctaagggtgcttccttgaaatggaaatttaaatcttttttagggtgattttaagtttaggtaataaattaactagaagaatatctggtagttgcatgagtcaaatctaccatgttccttccatattccagcccgtacccatttcatctgttctgtcgctctctcaaaacaataacaacaacaaaaaagcagatggyggaggggagtgagcattcccgagctgcacttcatctagatattctctccatacttttggtagctactctaacaaacaatcgttacaaaaccttgataggactctaaagacaggctctgtagaagctggccaaaggatgtagtttttaggataagaaagcctggatttgacttctagctctgctgcttttccttttctttttttttttttaaattttgagatcgagtcttgctctgtcgccaaggctggagtgcagtggcacaatctcagctccttgcaacctctacctcccaggttcaagtgattctcctgcttcagcctgctgagtagctgggactacaggctcatgccaccatgcccagctaatttttttttatttttagtagagacggggtttcaccacgttggccaggctggtctcaaactcctggcctcaagtgatctgcctgcctcggcctcccaaaatgctgggattacagatgtgagccactgtgcatggcctctactgcttactctgtgtgtggcatttgatacgctgtttaagctcctgagcctcagtgacacaggtagggattataagtgtctgcaacatactagatgctcactaagtgttagaggactctaactcagaggaccattagatgaattaaataaggcaatacctgccgagctcctagcttaatggcctacatacttttaatgctgtggagtacatgcacacacaatattatttcaaaaaataggttcaactccactggtctagtgttacttccacttcttcccaataacgagggaatagattgttgaaaaccaaagcagaggagagaatgcaaaacatggaagggattgactcagcaaggccttgtccagtgggaactgtggaactggctgatgctcagtg

SEQ ID NO: 668031 - DNA, 1304 bp, Homo sapiens
tgagttttctactctgtttcactgatgtgtaggttttcatagcttctttatgagaatcctattctagtagaattcctagttctattcctagtttgctgagagtttttatcattaatgggttttggattttgttaatcatattttcatcaattgatgtgatcatatgattttcttttttagcttgttaatataatggattatgttgattaatttttgaatatttaataagccttgcaagctggaataaatcccacttgactgtagtgtattattctttttatacattgctgtatttaatttgataatattttgttaagaatttttgcatctaaatttatgagagatactggtctgtaatttcctttttaaatttctttgtgtggttttggtgtcaggataaaataggcctcacgaaatgagttgggaagtgtttcctcttatctgttttctggaaaagaatattgtgtttttaattcataagtttttttccaagattaatgttgttctggagaatcaaacgtagggtatttagggaaagaggggccaggcttgtacattcctttttcacgtttagtgtgttcccctctggagtccactatgcattagtcagagtggaaagttcagtctaggagattccaaatgtggaggaaatgtgactttaatgtgtcttcccactcactggtattttaagaagcactaaagaaagattagagattagcgcttgcataagcagctaaaggacagctaaatttttaattactttctaattacttagtacctgcactctactttccaatatataattaataacacttttccatctgtcagaagggatcaagaaccaraagttatagagctatggaatacagatttaagaaaataattttattatatttagtcataaaatttgcatacagtagagcttactccttgtgatggacatatgggttttgacaaatgcatcgagttgtatatctaccactatgatcaggattccaaataattccatcaccgctcctaaaatttcttggattttctctttggagtcaacttctccactcaatcacggtcccaagcacccagtgatctattctccaatcctacagttttgccttgccagaatgtcaaaaatgaagtcaaacagtacactgccttttgactgtggattttttcatttagcaaaatgtttctgtgatttatttatgttattgaatgtatcaatagcgaggttcccattagctttatttcttgtttctgtgaaagcttagagtgttcaatacgccaaagttattttggaggaattc

SEQ ID NO: 668032 - DNA, 598 bp, Homo sapiens
ccgtggcaaaaacggtgaagattttgtttcaagtgaggtagcggatgtgattgggattccttgatctcatcactgtcatgcccctgagcatattcaggagctgtctgctttgccaggaatttgcacttctacctgcctctcctcaaatggtccaataatggtaaggatcacctgagaccctgggttaggcatgcagatgctgaccctggacctgctgaaccaaactcttaggggaatgctggtgaatctgtattttaatggttgccccaggagaatcgtctttttattttttattttttgagacagagtctcgctctgtcrcccaggctggagtgcaatggtgtgatctctgctcactgcagcctctgcctcccaggtccaagcaattctcctgcctcagcctcctgagtagctgggattacaggtgcgtgcgacaaggcctggctaatttttctatttttagtagagatggggtttcaccgtgttggtcaggctggtctcgaactcctgaccttgtgatccgcccgccttggcctcccaaagtgctgcgattacaggtgtgggccaccgcgcctggccgagaattgtttttcagaag

SEQ ID NO: 668033 - DNA, 680 bp, Homo sapiens
tatattttacttaaaactaaattgggtttctaataaatttttaacaactttatttagggatagtttatataccatacaatttacattataaatatacagtttgattatttttagtaaaatttatagttgttcaaccattactagagttcagttttgtaacacttctgcccsccccccccaaagttttctacttacagtttggagtcaatccctgctcccagctctgatcccagacaaccatggatcttcttttggtctctacatctttgtcttttctggaaacttcatatacgtggaataagacaatatgcattatatacgtagtcatctgtgtctggcttcttcacttagcgtaatgttttcaaggttcatctatgttgcatatatcagtggtttgttccttttgattgcagaataatattccattgtatgcatttaccacattttgttcatccactcattggttgatatacatttggatttgttttcagtccctggctgttttgaataatgctgcttcaaacatttgtgtacagattgctggttctcatggtaaaattttcatcttaagaaacttctaaactgttttccaaagtagcggtaccattttacaccagccaacatcaatctatgattgttttggtttcctcacgtactcaacaacgcttgttattggtggt

SEQ ID NO: 668034 - DNA, 1681 bp, Homo sapiens
acaagaagaaatatatttatgcatgcaagatagtgaataaattgaatagaccctggttttctaaataatcgtattatttgtttcctctagttattactataattgctattactatcttctttcatattccaaacaagaaatatttttttcttcactgctccagtacctaacagtctctggtgttaaggaactcgtgaagatctacactggattactgatggaagaaaatgtgttttacaaatttctaacaaaaaggtattctaaagttccggtagtactcataaaatagaaaatactcaggtataagagatttgcaaaattgtcaccagtgtcaatagcataatacagtcgttcctcagttttgactgtaggggaattggttccaggattcaagtccacagtcctctggcagagctggagtatagaagtcagccttctgtatatacggattttgcatcccatgaattatttttaatctgcatttggttgaaaaaaaatctgcatttaaattgacccatgcagttcaaacccctgtagtataagcatcaactgtagttttttttttttttaattaytgacagcaacataatggctaacttatgatattattatgtgaaaattgagactatctcagttcctgatgtaaatgaaacttggtaaatgaatggatatttgaattctccttgggcctttgaacaaaaatgtctcagcagacaaaacagaaacagaattcgttggattaaaaatatttcaactccagtactagcaaaccgacttagggaaaagccatttgatctcacaccttctcatttcctcctctgataattctttatccagaaagagtatcctctttcatgtgatatgccacataatgagagaggaacatagataggcgataaaggacaagaatccccacatatactcaatcaactttgacagtcaacagagagagagagagatgtccttttcacatggttttcccaagttctcaattaaggggcgtttggaccagatagtccctaggatctgtctcttccaatgttcatttcttaggatattgtgttatgtttgaaataacagcaagtaagcaaatcaagtcttgtgatgaacaaataaagtcttcctcgtgttgcatgttgggctgaaaacaccactggtgatttgtaataaattcagaacatggcacactgtaatgatccaatcaagtttgaaagtaattagaagccaggcgtggtgatacacgcctgcagtccgaactattcgggaagcagaggagagaggatctcctgagcccaggagttcaaatctatcctgggcaacatagtgagatcccatctctatttttaaaaatagttacatttattctatttactgcatcacaagaatgcatatggcatgaaattctgctgtaattgtcatgatccacataaaaatgcacaatcatctggatacttattaactttaatttgaaaggcaggctggctgggggattaaaattagattgtggaaccaacctgattggctttgcatcctagctctgccacttcctaggtgtgtaagaagtttgacaaaatacttaaatttctatgcttcagtttttctatctgtatggagattataaaactagtacttcaattggttatgagaattaagtaaattaatatatacaaagtagctatta

SEQ ID NO: 668035 - DNA, 1681 bp, Homo sapiens
acaagaagaaatatatttatgcatgcaagatagtgaataaattgaatagaccctggttttctaaataatcgtattatttgtttcctctagttattactataattgctattactatcttctttcatattccaaacaagaaatatttttttcttcactgctccagtacctaacagtctctggtgttaaggaactcgtgaagatctacactggattactgatggaagaaaatgtgttttacaaatttctaacaaaaaggtattctaaagttccggtagtactcataaaatagaaaatactcaggtataagagatttgcaaaattgtcaccagtgtcaatagcataatacagtcgttcctcagttttgactgtaggggaattggttccaggattcaagtccacagtcctctggcagagctggagtatagaagtcagccttctgtatatacggattttgcatcccatgaattatttttaatctgcatttggttgaaaaaaaatctgcatttaaattgacccatgcagttcaaacccctgtagtataagcatcaactgtagttttttttttttttaattattgacagcaacataatggctaacttatgatattattatgtgaaaattgagactatctcagttcctgatgtaaatgaaacttggtaaatgaatggatatttgaattctccttgggcctttgaacaaaaatgtctcagcagacaaaacagaaacagaattcgttggattaaaaatatttcaactccagtactagcaaaccgacttagggaaaagccatttgatctcacaccttctcatttcctcctctgataattctttatccagaaagagtatcctctttcatgtgatatgccacataatgagagaggaacatagataggcgataaaggacaagaatccccacatatactcaatcaactttgacagtcaacagagagagagagagatgtccttttcacatggttttcccaagttctcaattaaggggcgtttggaccagatagtccctaggatctgtctcttccaatgttcatttcttaggatattgtgttatgtttgaaataacagcaagtaagcaaatcaagtcttgtgatgaacaaataaagtcttcctcgtgttgcatgttgggctgaaaacaccactggtgatttgtaataaattcagaacatggcacactgtaatgatccaatcaagtttgaaagtaattagaagccaggcgtggtgatacacgcctgcagtccgaactattcgggaagcagaggagagaggatctcctgagcccaggagttcaaatctatcctgggcaacatagtgagatcccatctctatttttaaaaatagttacatttattctatttactgcatcacaagaatgcatatggcatgaaattctgctgtaattgtcatgatccacataaaaatgcacaatcatctggatacttattaactttaatttgaaaggcaggctggctgggggattaaaattagattgtggarccaacctgattggctttgcatcctagctctgccacttcctaggtgtgtaagaagtttgacaaaatacttaaatttctatgcttcagtttttctatctgtatggagattataaaactagtacttcaattggttatgagaattaagtaaattaatatatacaaagtagctatta

SEQ ID NO: 668036 - DNA, 1839 bp, Homo sapiens
ttaaatattttaaccattttttaaaatttcatatatgtaactctcatcttaagcagttcacatgccttattagaaaactatcccaagtaatttgataatctcagctaatagagcatattaaactcctaaatatagaaacctcaatttctcataactaattcaatggtttttaaacatatattttcaaattaaaaggcacatattcttttgttgttgttgttgtttttgtttttgagacggaatcttgctttgtcgcccaggctggagtgcagtggcgcaatctcggctcactgcaacctccgcctcccgggttcacgccattctcctgcctcagcctcccgagtagctgggactacaggcgcccgctaccactccctgctaatgtttttgtattttttagtagagacgggtttcaccctgttagccaggatggtctcgatctcctgacctcgtgatctgcccgcctcggcctcccaaagtgctgggattacaggcttgagccaccgcgcccagccaaaaagcacacattctaaaattttttttttaattcccagtttatttggcattgaaagacaagcctgtcatgtratatgtgaaattaccttaattattgcacttcacaatcccactactatcaactcattcctaaacataacacaaaaatattcttaaaaataaaaattagatgatttataaattaacattaataaatgtagaattaataaaatcattgtaggatttcaagacccattaagaaaattatatcatgttcaacaaattgcagttacaattccaggcaaatttgtttgttgagcagagatttttggctggctgtggatttggagatacaagaaacatggctgttttcaccaaatatgcctatgcagcatttttctagagtttctctattagggggatactaagtccattctcttcctatgaagtaagcttcctacccatgctcttcacatacaagtcacatattagctaattttagcaaccactcacattgcttccaaactgataatattcagattgtttttactacttgagtctctcctatcgtgggctggtttttctaccttccctgcctggctgtgccgcttcttttgcaggatctgaatataggattgagctcttttttttttttttttttttttgagaaggagtctcggtctatcgctcaggctggagcagtgtcccagtctcggctcactgcaagctccgcctcccaggttcacgccattctcctgcctcagcctccggagtagctgggactacaggcgcccgccaccacgcccggctaattttttgtatttttagtagtgacggagtttcaccgtgttagccaggatggtctcgatctcctgaccttgtgatccgcccatcttggcctcccaaagtgctgggattacaggcgtgagccaccacacccggcccggattgaggtttttatgttccccgtgtttctatttgtcgctgtactcttggtgtgagtcactgtggtgacagcagcatccaggacgtcgatgcccacccgttagccacctgaagctgccctccctaagaacagaaacatcctccttgttgaaaatgaaatggacactgtttagtctcgcattgactctgctgttgatcgtctctacttgaaagtaggatctattgcagtgcactctcctggttttccttcattcttttctgaatatgcaccttgcacatgtgtggtgtttattgtacctgtgtggggttttattactttattatcatttttttctttaaagttcagtctccatagagactgtcaaagattgccaatgttgattctatttcaagtcatca

SEQ ID NO: 668037 - DNA, 1839 bp, Homo sapiens
ttaaatattttaaccattttttaaaatttcatatatgtaactctcatcttaagcagttcacatgccttattagaaaactatcccaagtaatttgataatctcagctaatagagcatattaaactcctaaatatagaaacctcaatttctcataactaattcaatggtttttaaacatatattttcaaattaaaaggcacatattcttttgttgttgttgttgtttttgtttttgagacggaatcttgctttgtcgcccaggctggagtgcagtggcgcaatctcggctcactgcaacctccgcctcccgggttcacgccattctcctgcctcagcctcccgagtagctgggactacaggcgcccgctaccactccctgctaatgtttttgtattttttagtagagacgggtttcaccctgttagccaggatggtctcgatctcctgacctcgtgatctgcccgcctcggcctcccaaagtgctgggattacaggcttgagccaccgcgcccagccaaaaagcacacattctaaaattttttttttaattcccagtttatttggcattgaaagacaagcctgtcatgtaatatgtgaaattaccttaattattgcacttcacaatcccactactatcaactcattcctaaacataacacaaaaatattcttaaaaataaaaattagatgatttataaattaacattaataaatgtagaattaataaaatcattgtaggatttcaagacccattaagaaaattatatcatgttcaacaaattgcagttacaattccaggcaaatttgtttgttgagcagagatttttggctggctgtggatttggagatacaagaaacatggctgttttcaccaaatatgcctatgcagcatttttctagagtttctctattagggggatactaagtccattctcttcctatgaagtaagcttcctacccatgctcttcacatacaagtcacatattagctaattttagcaaccactcacattgcttccaaactgataatattcagattgtttttactacttgagtctctcctatcgtgggctggtttttctaccttccctgcctggctgtgccgcttcttttgcaggatctgaatataggattgagctcttttttttttttttttttttttgagaaggagtctcggtctatcgctcaggctggagcagtgtcccagtctcggctcactgcaagctccgcctcccaggttcacgccattctcctgcctcagcctccggagtagctgggactacaggcgcccgccaccacgcccggctaattttttgtatttttagtagtgacggagtttcaccgtgttagccaggatggtctcgatctcctgaccttgtgatccgcccatcttggcctcccaaagtgctgggattacaggcgtgagccaccacacccggcccrgattgaggtttttatgttccccgtgtttctatttgtcgctgtactcttggtgtgagtcactgtggtgacagcagcatccaggacgtcgatgcccacccgttagccacctgaagctgccctccctaagaacagaaacatcctccttgttgaaaatgaaatggacactgtttagtctcgcattgactctgctgttgatcgtctctacttgaaagtaggatctattgcagtgcactctcctggttttccttcattcttttctgaatatgcaccttgcacatgtgtggtgtttattgtacctgtgtggggttttattactttattatcatttttttctttaaagttcagtctccatagagactgtcaaagattgccaatgttgattctatttcaagtcatca

SEQ ID NO: 668038 - DNA, 2130 bp, Homo sapiens
tgaaaagcttttctaagttggatattctttcctgttcagaaattagcttttgagaaggaaggatgtgggttcatgctgaaaagaatggttacggagcgcagcagggtgcttctacctcggatcctattgggatggattctgaaggcactggggaggtgccgggctgcctctgctgcgatgctcctttaggtcccgctgtctctgtttgaaccaggaactaatttagccgatttatttatttaggcaatgttctgtcttcattgcccacaagatcctcaagtcaagccatacccaggatccccttatggacacaagagagtctcagctcaggccgatttctcaggtttttttctgtgtacatttagcaggtctatcttctgggactctctctgtaggactttaccactctcattaacaataacaaatcctgattaagttcctacaacttgtgaggtctacagcagacacacaggggaacgaagcacagaggccctaatggagaattcgggccaccatattctggcagccaccactgttggggtttctgagacggtccctcctaaatctcacccatcttctccattgggtcctaaacaaatggagacatgagatatggcaattaaaggtcaaattatcagctttattactgttagagaacaaattgcatatcatggctgtgggtgtgttagccaagtggactttctcattctgaactgcagagtctggctaaccatctcacctggcctcagggattgctaaaccagaggaagcctgccaggtatggcacagcgtattagatccatatgactcctgtaggagattagcatgaatgtagtggctacaaacacacacatttatctgaaaggacattagtgacagaagtaggcaaatggcaagagaaacggcagagaaatggcaagctcaacaattaaaagtcgaagtcctgttctcggagttacagtctgtttatggcaccaggacactatatactgcaacgatcagttctgtgtcacaatgatagctgtctgccttgtgttcagagtctacttgcccagtaagaccaccagaaaatattactaggttggtgcaaaagcaactgcggtttttgccacaaacctaatatattcctattatattgatcaaccaaagatgaatggattaaacttaaacttactgtatcaaggaggccttgagagaatcttagcaatgtttcaaaagggggcaggcaaaatagaatacttatatcatgtgggtgcctgggttcaatttctctaagatggggcttttggagtcagaactggttgaattttgtatcatttttgacataataatttaggactggtggacacagccaggtaagagtwttcattagtaaactattgactgataaaataactgtttactcaggtgagcaaactaatgtcctgggtaaattgatttacaaaatattctgacatattcaatagtcatttattggttatatggtcttattttctgggacaagaaatttctaaaaaaagtggttacatcatattgatgcaggtggtttcatttcctacctagaataaatcctgattcatattcttactggctaagaggccttaagcaagtcctatcatctttctaagattcagtttcttcaggtataaaatggggattagaaaagtatcttatgaggcaattctgaggatcaaatgagataatctatataaaaccctcagaagagtttctgcaaaaatataattcaatacataataacaatactgataacactcaagagtcagggaatgatttgagaatatcttgaatgcaaaagcaacaggcaccaatcaacagatgctcactctgtgaataggtgtcagtctgcataagaaaaaaatgctacagcatatgtttagaatctgtagagagagaataatctttcagccatcttgaactagactaacgcttttcaatcatattactgtgggataccaatgagccacaagccctttaagaagtatgatatccaattttgattatccaatttacattacattgtatctttatgttgtcaacaagaattgcaaactcatgtgccccaaatgatctgtctataagtcagacttagccagttgctgatatgttgca

SEQ ID NO: 668039 - DNA, 2484 bp, Homo sapiens
cggatcctgtggactgccccagttgtggcagagcctgggaggaaaggattctggccatagaaccaggtcaaatgccaatattttaacctctcattaaagactgggagtagactagtatgaggttacagaacctcttgtaactgcccaatggattcaccttgcctgctgcctagacagagccaatttatcaagacaaagaaattgcaatggagacagagtaattcacacagagccggctgtgtgggaggccagggttgcatgcacttgcagaatccttttttatagactttccacttaatgctatgtgaaaggttgaaggcaagaggtgaaatggagaaaggctcttttggttctgtaggaggtgagtgatgggtgatgctgtgggaaaggcatgaagctatatgcctgatcctctaccccaccccttgtaatatagaaagcaaatgcctggtaccttgaaaaaaagagcagcaaaccctgccactcccaggatacaggtaaaggcctcttgttacttcaggacaaatgaaggaagaaaatatctgtatactcatagagtgggggctgatgacagtcttgggatcaggactctattctagtaccattacaagtctccctccattggggaaggagttctcaactcttctacaagacccattgttaaaaggcagatgtagatgctagagagacgggaaggaaagctgagaaagtcccagcacgaatatccaggcccaccagccccaccaaggactaaggctgagccagaacaacagagaagactcaaccacgccgccaccacatcagttcagcaaacaacaagtaacaaacagcaatgagtgatggagagacgactcaaaacagaagatggatcacaaacagtgaagacacactttggatgccataagcacatggcatcgtggttagatgagtttgaggcctgtgactcacagatggtaaccatagcaacaacaaaacccagctcagcgcaacgtctgcccacattgacccatatcccatactaatgccccmaaagaagatgcaagctcctagccctacttgcataccatttatctcagtctctcaatagccacatgtaatgtgcagatttcaaggacagattgtaagtcatgaaatttttaaaaattgagaagaaacaacttggtccagaatcaaactaccaacagaattggactcagaaatgacatgaatttacaccagcctctgaaacacagccccaccaccccatcccactccacttcttaccctagaactttttcccatcaggcataaaatacatttgacttatttgtccagtatctctccttcttctctaaaacagcagctccatcagatagagacgttatctctcttgctcactgtaccttgagtgttagctggtacataggagttgtgcaagacagctttgtggaatatgtgaatgtatcggctttattcttctccaactcctagaacaagtgagaagccttactacctaagtatatgagtggaagtgtttttggtcaaaaatctttatgttaagtaccttgacaggtgaaaagtgggctttaattttcataaaaccagagatcccaaatttctttgtctgactattctctctaggtttatctttctttatattcctccttcctggttctatgtgacacatgtcttaagaagagaacacagggaccattagctcgatattgctgctgtgtaactagaactattctaccaagatctctcatgagaaaatccagaatggattctcagcttccctgacccatgctaattctgcaaaaatagttccattctcttgtatttcatgttttctcttctatcttctttttctctcttaatcaatcacaatatggaactaaaataaaatattaagttattaatcattctgattttgaatagttttatgttctttgtttttcattataaaggtagatgagtcaaacccattatatttctctaaaaatataattctaaattaactttatcttatttaagaagcttataatgctcctatttatgaataacaggctatgtggggaatatttcccaccacttcacgaattattttttccaggtactttcttgcaaaaatcctacttactattgtccttaaaccaaatgacttaagaagaattttatacgagctctgatcagattgactcaaggctccagagaaactcaaagctccatgacatgatttctttcttattggtaggcccaggcgggtggatcacctgaggtcgggagttcgagaccagcctgaccaacatggagaaaccctgtctctactaaaaatacaaaattagccgggtgtggtggcacatgcctgtaatcccagctacttgagaaggctgaggcaggagaatcacgagaatcgcttgaacccaggaggcagaggttgcggtgagccgagatcgcaccatttcactccagcctgggcaataagaatggaactccgtctaaaaa

SEQ ID NO: 668040 - DNA, 2484 bp, Homo sapiens
cggatcctgtggactgccccagttgtggcagagcctgggaggaaaggattctggccatagaaccaggtcaaatgccaatattttaacctctcattaaagactgggagtagactagtatgaggttacagaacctcttgtaactgcccaatggattcaccttgcctgctgcctagacagagccaatttatcaagacaaagaaattgcaatggagacagagtaattcacacagagccggctgtgtgggaggccagggttgcatgcacttgcagaatccttttttatagactttccacttaatgctatgtgaaaggttgaaggcaagaggtgaaatggagaaaggctcttttggttctgtaggaggtgagtgatgggtgatgctgtgggaaaggcatgaagctatatgcctgatcctctaccccaccccttgtaatatagaaagcaaatgcctggtaccttgaaaaaaagagcagcaaaccctgccactcccaggatacaggtaaaggcctcttgttacttcaggacaaatgaaggaagaaaatatctgtatactcatagagtgggggctgatgacagtcttgggatcaggactctattctagtaccattacaagtctccctccattggggaaggagttctcaactcttctacaagacccattgttaaaaggcagatgtagatgctagagagacgggaaggaaagctgagaaagtcccagcacgaatatccaggcccaccagccccaccaaggactaaggctgagccagaacaacagagaagactcaaccacgccgccaccacatcagttcagcaaacaacaagtaacaaacagcaatgagtgatggagagacgactcaaaacagaagatggatcacaaacagtgaagacacactttggatgccataagcacatggcatcgtggttagatgagtttgaggcctgtgactcacagatggtaaccatagcaacaacaaaacccagctcagcgcaacgtctgcccacattgacccatatcccatactaatgccccaaaagaagatgcaagctcctagccctacttgcataccatttatctcagtctctcaatagccacatgtaatgtgcagatttcaaggacagattgtaagtcatgaaatttttaaaaattgagaagaaacaacttggtccagaatcaaactaccaacagaattggactcagaaatgacatgaatttacaccagcctctgaaacacagccccaccaccccatcccactccacytcttaccctagaactttttcccatcaggcataaaatacatttgacttatttgtccagtatctctccttcttctctaaaacagcagctccatcagatagagacgttatctctcttgctcactgtaccttgagtgttagctggtacataggagttgtgcaagacagctttgtggaatatgtgaatgtatcggctttattcttctccaactcctagaacaagtgagaagccttactacctaagtatatgagtggaagtgtttttggtcaaaaatctttatgttaagtaccttgacaggtgaaaagtgggctttaattttcataaaaccagagatcccaaatttctttgtctgactattctctctaggtttatctttctttatattcctccttcctggttctatgtgacacatgtcttaagaagagaacacagggaccattagctcgatattgctgctgtgtaactagaactattctaccaagatctctcatgagaaaatccagaatggattctcagcttccctgacccatgctaattctgcaaaaatagttccattctcttgtatttcatgttttctcttctatcttctttttctctcttaatcaatcacaatatggaactaaaataaaatattaagttattaatcattctgattttgaatagttttatgttctttgtttttcattataaaggtagatgagtcaaacccattatatttctctaaaaatataattctaaattaactttatcttatttaagaagcttataatgctcctatttatgaataacaggctatgtggggaatatttcccaccacttcacgaattattttttccaggtactttcttgcaaaaatcctacttactattgtccttaaaccaaatgacttaagaagaattttatacgagctctgatcagattgactcaaggctccagagaaactcaaagctccatgacatgatttctttcttattggtaggcccaggcgggtggatcacctgaggtcgggagttcgagaccagcctgaccaacatggagaaaccctgtctctactaaaaatacaaaattagccgggtgtggtggcacatgcctgtaatcccagctacttgagaaggctgaggcaggagaatcacgagaatcgcttgaacccaggaggcagaggttgcggtgagccgagatcgcaccatttcactccagcctgggcaataagaatggaactccgtctaaaaa

SEQ ID NO: 668041 - DNA, 679 bp, Homo sapiens
atgtgctcaaaatgtgttacagaaatcccatgaggattcttggatattccaagagggtcaaatttcattgctctgtttttcatacctgggactgggctttagtagactctctctggtttcctgaagcttcataccccacatctgccctactgtgagagtccaaccccagggctctagctggcttctctcaactgttctacagttttctaggccacagcttgagatgtgacagaaaggagaaaggaaacatttattgcactctacttgatctttcatgtatactatttcaaatgattctgtgacaatctgctttcagccctcttttatggaggaggacacagagttcagggtagttaatgccttgcctaaagtaaaccaactggaggggaggcagtgagtggagaggagatgaagctcaatcctagagcctccagcctctgcttccaccttctggctagctcgccactaagtccatttaaggtgtcggctcwcactttctgagtgttccattttctcattccttgtgccaattctcatgccaggattaaagttgccaaatatttaggtctcaggagaaggttgtttcacaatagcctctcttatcccctgggcctcctttctcaagaaggcagaaggttcgcagtaagtttggcaaacaagtctagtgtatgttgccaaa

SEQ ID NO: 668042 - DNA, 1134 bp, Homo sapiens
ctatccgtggagtttcttaaggatagcataactgtctctcattcctgaatgagaattcctagcattacagagtaaactgcattagaattctgagtatcttatgatactgatgaaatgctctttcacatccaaaacaaacaaacaaacaaacacaaaccaacgaaccaaccaaccaaacaacaacaacaactacaacaacaaactggagagttgcagtgggagcagaaagtcccagaatcctctaggtgtacttaaaacaggaaggcaacaagaggctgtctgacagaaaaacaggcctggaggaatttacaaagccccttccagggtctagtcctttgaccaaaccctaggtattgtttgcagcctgcaagggtaaaggggagaaggaatatatggaaaggagcaaagcagaagttgaaagtgtcaggaagatgagtggagaagagatgaagaaaggggagttaaatgaagaaaagggggatgtgtgttgaaaggaagagagagagtgatgggtaaaaaagaggaaaaaaagttgaaatacataagatgaagttccccatcaacaaatgactcagttgatcagtaaaaaaaccctcagagtggccaatcttccacttgacccataccccacccagttccaaacctcacagcaatgccrtggtcctctatgagcactttctcgccttttcacaaaggctaatctcacctatcaaaggccacagccgtcatggagtagatactggcgaagacagcggcgatgggaaagaagttgtggaacttgcagtagaacaggccgtagtaccattcgttgtggacagcataggtgaagttcaccactgtattgaatgcagccatggaggcctccgcgaaggccaggttcaccagaaaatagttcgtcactgtcctcattcttttgtgggctaagatgatccacatcactaccacgttgcccaccacagaggtcaccacaatgaccgtgtaggcagctgcccaaaggacaatttgccaggctggttgcacgaactgattgggttccgaggtgttagtggagatgtttggggagaggtctgagtccaccgggaggacgttatccatttcgaagctaggcggtaaagccctactatctgtacacaa

SEQ ID NO: 668043 - DNA, 1223 bp, Homo sapiens
attatgattgaacagactttattacaatagcttatgggcctatattctaaaaataaatcttaccatgggatgagtgtgtgtgaaaagagagaagcattcatgctaattaggctgattttaaagcctcttgggatgcaataggattttaagagaaaagaaaagcatttcacaggatggataaggaaatgcaaaagaagttgaaaagatacctctaaaaaataacttttaaactcagttgacatgcacaatataaatgagactgacttcaaaagatattaggcctgcagggtaatatatcatttttatcaagtatatactcacatgcaattaaaattatagtatacaaaaacagaagccatatatggatacaacacttagaaaatagtaatttatgatttcttttaaagttttaatctattttatttaaataacaaaacagaaatgttcagcagctaagcaattataatattatccatgtacgaatcacaaatataatgtttacccctgctactggtcaactctgtattatcatgaagtgttctttcttagatacatgargtcttggtaaccttaatggctatttatctgtaacctgggatagggagtctttttctaagaaatccttcattctatggaaatgtacatttacagaatgactatatttcaaaatatggtagtaaaataaaatatactaaatgctgtcttcccatatacaaatattagtaaattagtaaatctttatgtaggaactgttaatgctgtgaatatataagttgatagaacatatataatttgataaaaccttccctttcaccattcttttgttatgccttgttctttttgcatgttaacactttgaagatttgtttgtagcacactgactaatgcatttaagttcttaaaaaatgagaataaggaaatatgttttaatttgctggattctacaggaaaatatataagctatataacttcttcaaaattccttgacagagataattttttataaaagactgaataaaatatttagcaggcaaaaaatattacaaatatacttaccaggaatcatatcgaaatgctgtatgctttcatgtccactggccaatggcttattttttaatctaaatttatgtctcttacttatactcagtactttattgcattctttttatacatccaatcattttaaacaaaccaatgggcttgaaatgagataatgctaaatt

SEQ ID NO: 668044 - DNA, 1595 bp, Homo sapiens
catgtcttggttgcctataggatcaaatgcagatttcttgacagttgagtcttctgtgatctggcctctgtctgcttcattagccttagctcttaccagtcttctccatggaccttcctttctagccatgtttgtctgttagatactgatcatagtataaaaactatcctactcgcatatttatttacagaatagtttttggccgcttactatgctagatgtgatattaagcagtatgatgataatggtggattggtatagagctttttttgttcatatcattactttgaagtaacagcaccctggaattcctaccttgctttcagcttatgtgcaaccactcccctgatgccctcttcatctgactcatcagcagtcatatagctttaattgctactactaatttttttgcatttagaatatgatgtatataccattttcatgtcagcctatcttttcatcaatatatattttaaaagtcaaataatgctaaaaaggcatatgagaaaaacttagttgtaacttctgccatctctagcattattcatttacagatactgcgttatgacagttgaagatcttagctctcttcattcatctttcaatcatcttatctttccagtgtactttgctgagtcaattaacagtactttcctgaaaaaagcttttcctgattttaataatttcattttaaatttacttagtttcttgtttctgtttttaaatccctgattaacactttccataccttccctcattttgcagttttgtaagatgcctctgtataattttctataccataaagtctgtcacattatctgtcagtgctgatttttgtcgggttgttgttgctttatttttgtttttgtttttgttttcctagaataatccttcctggagtcattttccctcctgttccagcctggactgttgaattctctagctcttttgcctggctctgctctggcagtctttcatcttcagcttagcattcctttcttggattctaggtcttcttctttcatgatgtactccttcctttttgtgtgtgtgaaacacattttaataactttctgagaaaccgtgcatgggagtaacatttttgagattttgcatgtgtatccttgtacatgattgataattttggtgggtaattctaggatagagtttttgaagtattgcactagtgtcttctgtggtgcccatggtgtgataccattatctatgatctattgaatgtaactcctccccctagaatcattcctggtgttttgatattccataattatatacctcaaaaaatatttttttattgtttttacttttattcattgtacttggcatttgtgctttataatccaaagactcatgtcttttcagttttgggaagtactcttgtgtcatttctttgataatttctttgctgtactttttcctgctctctatggaactcaytggttgtatcttggaccacttaaattaatctattaattttcttatattttctctaagaacaaaaaaatcttttttgttctacttataagagttcctcaactctctacattcatattttcatgatggagccttccctcaaa

SEQ ID NO: 668045 - DNA, 657 bp, Homo sapiens
gcatttctaccagctacttggaatctagtcatcataaaagtaataactgacactttgaaattcgcttttcttatagtaatttaaattttcataagatctgtttcagatttaaaagattttaagaccaggggttttgaaagttagagggttttttgtttttgactttactgacttacttgaccttcctgaaatcataccaggaagataaatgtgtatttgtaagattatctagactgctctttagtatggaagagttgagatgtttatttcaattagttgcttttaaaaatattgtttaggatttgaaaatttttgtatttgataattaatagtttaaatcagtcaaattcaaatttatggaagtataattagaataagactgtagcaaagtaaagagaaacaaaaaaattactgaatttgggtaactttcctctgaataaatacattttttaaaagtagacacttgtttttataacttttccattattataatagaactagaaaaaatgccaaataagtttttagtaaatatgaattaaatactaaatatgaagatyattggtgcccgacggaatagttttggtgaagtaaaaacagggattgcctggtcgcagttttttgataacaggaagtagagctataggttgcttattacga

SEQ ID NO: 668046 - DNA, 3517 bp, Homo sapiens
tttctccaactcaaaacaaattggaggtagggatgctgtacacacagtcagtaagaaataaccactaacagcctgatgagagagaaggagaaaaccaaaatgcctcaaattaagtaagcagaacagtccagatttacttagagaagtggttcttaaccttatggacacctggcttagtcccctttattctgttataatggaatacctgagactgggtaatttataaagatcaaagatttatttggctcacagttttggaggctggaaagtccaagagcatggcgatggcatccagttagggtctttgtactgtgtcatcccatggcagaaagtggaagagtaagggcgaaagatcaagagagcagaagggagccaaactcacttttataaccaactcagtctcaagataaacaacctacttcctcagaaatgacattaattcattttctggccttatgacccaatcaccccacctgccaatactattacattggggattcagtttccaacacataagctttgagggacccattcagaccatagtgacagctaatggagtctgtaaacatttttctcagcaagaagtataaaacatatatcagtttgtattcagtgtcaggaattcttgggctcactgaagcccagccttgggccccaggctaaaaatatgatttagtataggggcaaatagctttatgtgtctaatttaagagcgtcactttgggatgctttatagataatttatataataggcaatattgagttagcagaaaatgttaaattttgtatcacacgcttaataaacatacaatgtttcttttttgaattaaaaaatatgcatttttcacttaacatttatcccattatctggaaaacttagtcttcattccccagggatacgggttagagaagtgatattctgcatttgcattaaataagcttcactgtaattttttttttttttttttttttgagtaggagtgtcgttctgttgccaggctggagtggagtggtgcaatctcagctcactgcaacctccacctcccgggttcaagcgattctcctaccacagcctcccgagtagctgggactacaggcgcgcgctacctaccatgcccagctaatttttgtatttttagtagagatggagtttcaccgtgttggccaggatggtctccatctcttgacctcgtgatctgcctgcctcggcctcccaaagtgctaggattacagatgtgagccaccgcgcctggcccattttcacattttaatcagtgatgtccaggagactttttgtaccagcgagattacgagcatctcctcccaactccatgtgcagaaatgccaggttggtaggttgtgatctgccttggtgggagtgtttacaccacgaaaatgttagaaatcaatgctcattctgccttcattcccccaagctgtttttttaaacatttaccagcacacaactgattttaattactcattcagcaaacatattttgagcacctgttgtcttccaggcactgttcaaggtgccaaggatatagtagtgaatagacagtgtttacttaagtgaatgtatttttctaaatcctaaattttctattaaattggggagcttttaggggtccttagtcaaataatggtgggagatgaagaatcaaacaaaagtaaatggttttctttgccacagaactttcagaatcttttaatgtgctggtgtgcacagttgatctctaggaggagagtatagtatatattctttctttctttctttttttttttttttttttttttgagatggagtcttgctctgtcgctcaggccagagtgcagtggcacaatctcggctcactgcaagctctgccgcctgggttcacgccrttctcctgcctcagcctcccgagtagctgagactacaggcacccgccaccacgcccggctaatttttgtgtgttttttttagtagagacggggtttcactgtgttagccaggatggtcttgatctcctgacctcgtgatccgcctgccttggcctcccaaagtgctgggattacaggcttgagccaccgcgcccggcctatagtatgtattatttctaatacttaaccaataactcttttttttccagaatatatttaacatgtttcagaagtactattctgctgctccaggcagtcatattgcagatgttagaaattggtgaataaggtcattactcaagagatgtatgtcggtcagaatatgggcaggatttctgaagacagactttcccatcgtgtttatagggcgattgatttttaggttgtggattgagttactttattgatgttttcctgaactatcctgttgtattttcatttccagtatttttttttttttaatttttatgtaaagcactgctctacttatatgttgttaatcttagaaaagtgctttttcttctgatctccagtttctgatttggggacacttaatgatatacgtacatgaatttctgccaccacttactccctgttgctagactttttctcagccctgggcatcccttcctccagtgcctcttgctgaaatgggagtctcttaaaccccattcatctgccatttcacgcttattagactatggtgtttctcaagtgtgagtgataggctattgattgaatcagtcacttgagtagtattaaaaccataggttcctggggctcacctcagatctgctgattcagagtctgcgtggtgtggaagccaagactctgtgatttaaagcagatctacaagtggtttgtattgagttgtttaatttccatgctgagttgtttaaatttcattttttggtaggtgtataccgtatttctcagtgtaggtgctactggcattttggccaggattatcgtgtggcaatctgaaggcacaacaggactttaaaaatcattgggtcctacctaccaaatactattatcatccccagttattgagacaacccaaaatgtaaatgtccctccacatttccaaacacctcctttccatttttatggggttagtatcctcaattaagaatcactgttatatactactttcattattttagatgttgatcgtaataatttaatatacatacctaacctaagaccccaaattattcactaactctgtccacttcgcaaactgtataaagtcttcagagcaatttaattgtacttccaccttcctatttccatggtattttgctccatatttgagttctagttttttaaaaattgcatagacattattgtttttttacagtcatcaatgtttatctctacccaagattggtagtttatttgatactccttgcatcttaaactttctttctgagccttttttgatcctgaaatacatcctttagaagaatatgttattgcacatcttttggcagtgagcccttggtgtttgttagaaagtgtctttattttgccctattttattgaataatgttttacctgagaatataattctagactgacttaacttttt

SEQ ID NO: 668047 - DNA, 611 bp, Homo sapiens
caaacaacccgcgggcacaagsacctgctgggggacctccttctgcacataaccccctccagcacaaccctataaaacttccctccagcccctccctctctgcagacggctccttttctgctgtgctgcccgctgcggccttgcaaagtattttcattccttctcaataaatctgcattcctttatgtacaactgtcttgataaattcctttaccatctgcgccactggccccagatagtcaccacctgtgacattaagtttgtcgggtaacatatatcagaacttatttatttaaaggacttcaaagtggttacatcaggaggcacaaaattgcagccattgttaaagtattatcagaatgcctttcctggggctgccttcaggaatgtctcaagaaaatccgtgtgactgggttactgtgatgatgtgacctcagagagcaaaatagacacccctttatcaactaagatggaccctgagggtaaagaaaccaaaatattacctagagatagaggattcaggggccaggtggcatgacaaatttctaaatttctacaagcaaaaccgcactttcactaaaccccctaacaacagaagctatcaggcagat

SEQ ID NO: 668048 - DNA, 605 bp, Homo sapiens
taaagtgctaggattacaagcatgagccactgtaccctgccttgttttttgctttttgagacagagtctcactctgtcacccaggctggagtacagtggggcaatctcggctcaatgtaaactctgtctcctgggttcaagcgattctcctgcctcagcctcccgagtagctgagattacaagtgtgcaccaccacacccggctaatctttgtatttttagtagagatggggtttcaccatgttggctaggctggtcttgaactgctgacctcaagtgatcggcccgcctcagccttccaaagtgctgggataacaggagtgagccacygcacccagccttcttgccattacttttaatagcaaaaagcacaattacttttgcaccaacctaagagatgcagagttgtcaatttgtctcatcctttttctgcagggcatcagaaaaccattctggtgaggtccacacccataagtcaccatgtacaaggactgcatcgagtccactggagactattttcttctctgtgacgccgaggggccatggggcatcattctggagtccctggccatacttggcatcgtggtcacaattctgctactctta

SEQ ID NO: 668049 - DNA, 1063 bp, Homo sapiens
aaaggattctgagatccttccctcagccctcatcattgtgctttgggattgggtacaattgggaaagtaaaatatgcaacataaaaatattgttacccaagacaaattgatatggtgtacagtccccacatcaccatgtctttccactttataaaggtaattgggaattgtctaaaccagggatgtccaattgtttggctttcctgggccacactggaagaagaattgtcttgcgtcacataaaatacacttaacactaatgatggctggtgagcttaaaaaaaattgcaaaaacatctcataatgtttcaagaaagtttattaacttgtgttgggccgcattcaaaagcgtcctgggctgcgggttgagcaactttggtaaatagtcccatagggaagccttttttaagttaggttttattaatgtgatcacatgtatgaaaatttgtcagaagagccataatcattctctttttaaaacaatttaaaaaccttgtattaacatagaatcatagaaattttacttgttcccttcaaaaagctttgctttgttttgtgttttaaaatataagctatttatttagtatttgacctgatacctacgaagagctcaactgtggaatgaaaaagcagtaatgcatgtcctctaaatcttagttctcttctaaagtaaatatgcttattatctgtctttcgtgcttttcatttatttaaaatttagaatgtcttatttaaaaataatcagacaacttttgagagctgttggtaatttctcacaatagcacacaatctggagtctcaagactgaaaactggacttgggttagttacttaatctttggtgcatttaatccttaaaaaaatacctgacgctatttaattcacagggctgttttaataatcaatggagataacgtatatggaagcattttttawaccttaaagcactatataaatattagttttttttaaatcactgttcacatttctgttagatcacatgcaaagcttctaaaaatctgctacccacctaatttacccacagtaaacagcatggttaagaa

SEQ ID NO: 668050 - DNA, 594 bp, Homo sapiens
tggacctgaatcctagcgctccactcgcgaggcgggtgtcctgagcaggctgggtggtccagctggaccatgggctctcggatccaagtggctcgactgtcgagcctggtgtaaactggcacttccaaagcgtagtccggaaaggttagagctttagcagcttcttggaatgtgcatttatttttatttatactgctcccttctatgcccactccttggaggaacttttttgatctcttgcagaacctaggctggataagaatcccgtccgtgtgatccaaaagtgccctgtgccttattacaaagctcaatttgcacggtattgggatttcctgagggcctttctcagcagcttccaggccycttggatcccgggttgtgcgttcgtcctttctctctctgagacgcactggcagcatcatcaccgtcatcatcggcatcataactaactcctatgcagtggttttagggtgctgggcattgagctaagctctacgttattaattcattttaatcctcatactctggctcctggcaggcactttataaaacatgttcattaataagacacaatggaaggaaaaaaatcactga

SEQ ID NO: 668051 - DNA, 594 bp, Homo sapiens
tggacctgaatcctagcgctccactcgcgaggcgggtgtcctgagcaggctgggtggtccagctggaccatgggctctcggatccaagtggctcgactgtcgagcctggtgtaaactggcacttccaaagcgtagtccggaaaggttagagctttagcagcttcttggaatgtgcatttatttttatttatactgctcccttctatgcccactccttggaggaacttttttgatctcttgcagaacctaggctggataagaatcccgtccgtgtgatccaaaagtgccctgtgccttattacaaagctcaatttgcacggtattgggatttcctgagggcctttctcagcagcttccaggccccttggatcccgggttgtgcgttcgtcctttctctctctgagacgcactggcagcatcatcaccgtcatcatyggcatcataactaactcctatgcagtggttttagggtgctgggcattgagctaagctctacgttattaattcattttaatcctcatactctggctcctggcaggcactttataaaacatgttcattaataagacacaatggaaggaaaaaaatcactga

SEQ ID NO: 668052 - DNA, 1405 bp, Homo sapiens
tattaattaccatggtttaacagtatcctcaatatctgataacataagttctccaattgcattcttcttcaagattgccttcactttgcatttcatgtacatcttgaaatcagcttcagagtccccctctgttcccctaaaatggcactgttaagattttgattttttaaaattttttttatttttaagattttgatttttataattatggtgattctatagatttaagaactgccatttttataacatggagacttcaaatccatacacatgatatatccctcagcttattcaggtcttctttagtttctctcaacaacactttctagtttcagaacagagaccttgtgcatcttttgttagatttattcttgggtaagtgatgctttttgatattactataaatggcatcttcttcaagttttattttgtatttgtgctggtaggtasgaataaaatgtatttgtaaaatgtatttgtatatttgtatacaaaatttacttgtatatttatttatatttagtgacctaagttcattaccaataacattttaacaagcaaacattttaagaaactcatagtcacacaaagatgtcacaatgcagatatgtgcataactcattgggctaccttagatgactctcctccgtgctctcttaatgacctgtgaactccactagttacaccttctattataatcatacacctttatgcattggtctatcacacaagccacaaacatgcctataaataagctgtgtattcccagaatctacaacagtagctagtagagagcaggtattcataaattttttatgaataaatgaaagaaaaaatcccgtctgttgaatcctttgactggccagtaagtcaataaaacagtccctgtattaaaaaataacaatgttactattttcacaaatcagccaagtggagacataatgacatgttttctagcctgatattctcagtagatgattattttgcttattttctttctgcaaaagagattagtcactgatgaatattagtaggaaaaagcttcacttactatccaattaagcacttaaagatacaagttttcttttaagtgttttgtttattttttgtttttcaaagccaaatacttatacatattctttggaagctgtcatttagaattcattaattatcattatagcatctatttaaacgtttaaaggtattctaaaattttatctctgctacctaatcttaaagacaatatttaatagagacatttctacattatcatcaataattaaccaagagaaaatgcttctatttatattgggtctcttattatcataaaagtagtcttaaaaggctgatttaaaattacatgagctaatacaagcctaaaaggacaatgagacaaaggtccaag

SEQ ID NO: 668053 - DNA, 1405 bp, Homo sapiens
tattaattaccatggtttaacagtatcctcaatatctgataacataagttctccaattgcattcttcttcaagattgccttcactttgcatttcatgtacatcttgaaatcagcttcagagtccccctctgttcccctaaaatggcactgttaagattttgattttttaaaattttttttatttttaagattttgatttttataattatggtgattctatagatttaagaactgccatttttataacatggagacttcaaatccatacacatgatatatccctcagcttattcaggtcttctttagtttctctcaacaacactttctagtttcagaacagagaccttgtgcatcttttgttagatttattcttgggtaagtgatgctttttgatattactataaatggcatcttcttcaagttttattttgtatttgtgctggtaggtacgaataaaatgtatttgtaaaatgtatttgtatatttgtatacaaaatttacttgtatatttatttatatttagtgacctaagttcattaccaataacattttaacaagcaaacattttaagaaactcatagtcacacaaagatgtcacaatgcagatatgtgcataactcattgggctaccttagatgactctcctccgtgctctcttaatgacctgtgaactccactagttacaccttctattataatcatacacctttatgcattggtctatcacacaagccacaaacatgcctataaataagctgtgtattcccagaatctacaacagtagctagtagagagcaggtattcawaaattttttatgaataaatgaaagaaaaaatcccgtctgttgaatcctttgactggccagtaagtcaataaaacagtccctgtattaaaaaataacaatgttactattttcacaaatcagccaagtggagacataatgacatgttttctagcctgatattctcagtagatgattattttgcttattttctttctgcaaaagagattagtcactgatgaatattagtaggaaaaagcttcacttactatccaattaagcacttaaagatacaagttttcttttaagtgttttgtttattttttgtttttcaaagccaaatacttatacatattctttggaagctgtcatttagaattcattaattatcattatagcatctatttaaacgtttaaaggtattctaaaattttatctctgctacctaatcttaaagacaatatttaatagagacatttctacattatcatcaataattaaccaagagaaaatgcttctatttatattgggtctcttattatcataaaagtagtcttaaaaggctgatttaaaattacatgagctaatacaagcctaaaaggacaatgagacaaaggtccaag

SEQ ID NO: 668054 - DNA, 1405 bp, Homo sapiens
tattaattaccatggtttaacagtatcctcaatatctgataacataagttctccaattgcattcttcttcaagattgccttcactttgcatttcatgtacatcttgaaatcagcttcagagtccccctctgttcccctaaaatggcactgttaagattttgattttttaaaattttttttatttttaagattttgatttttataattatggtgattctatagatttaagaactgccatttttataacatggagacttcaaatccatacacatgatatatccctcagcttattcaggtcttctttagtttctctcaacaacactttctagtttcagaacagagaccttgtgcatcttttgttagatttattcttgggtaagtgatgctttttgatattactataaatggcatcttcttcaagttttattttgtatttgtgctggtaggtacgaataaaatgtatttgtaaaatgtatttgtatatttgtatacaaaatttacttgtatatttatttatatttagtgacctaagttcattaccaataacattttaacaagcaaacattttaagaaactcatagtcacacaaagatgtcacaatgcagatatgtgcataactcattgggctaccttagatgactctcctccgtgctctcttaatgacctgtgaactccactagttacaccttctattataatcatacacctttatgcattggtctatcacacaagccacaaacatgcctataaataagctgtgtattcccagaatctacaacagtagctagtagagagcaggtattcataaattttttatgaataaatgaaagaaaaaatcccgtctgttgaatcctttgactggccagtaagtcaataaaacagtccctgtattaaaaaataacaatgttactattttcacaaatcagccaagtggagacataatgacatgttttctagcctgatattctcagtagatgattattttgcttattttctttctgcaaaagagattagtcactgatgaatattagtaggaaaaagcttcacttactatccaattaagcacttaaagatacaagttttcttttaagtgttttgtttattttttgtttttcaaagccaaatacttatacatattctttggaagctgtcatttagaattcattaattatcatwatagcatctatttaaacgtttaaaggtattctaaaattttatctctgctacctaatcttaaagacaatatttaatagagacatttctacattatcatcaataattaaccaagagaaaatgcttctatttatattgggtctcttattatcataaaagtagtcttaaaaggctgatttaaaattacatgagctaatacaagcctaaaaggacaatgagacaaaggtccaag

SEQ ID NO: 668055 - DNA, 1405 bp, Homo sapiens
tattaattaccatggtttaacagtatcctcaatatctgataacataagttctccaattgcattcttcttcaagattgccttcactttgcatttcatgtacatcttgaaatcagcttcagagtccccctctgttcccctaaaatggcactgttaagattttgattttttaaaattttttttatttttaagattttgatttttataattatggtgattctatagatttaagaactgccatttttataacatggagacttcaaatccatacacatgatatatccctcagcttattcaggtcttctttagtttctctcaacaacactttctagtttcagaacagagaccttgtgcatcttttgttagatttattcttgggtaagtgatgctttttgatattactataaatggcatcttcttcaagttttattttgtatttgtgctggtaggtacgaataaaatgtatttgtaaaatgtatttgtatatttgtatacaaaatttacttgtatatttatttatatttagtgacctaagttcattaccaataacattttaacaagcaaacattttaagaaactcatagtcacacaaagatgtcacaatgcagatatgtgcataactcattgggctaccttagatgactctcctccgtgctctcttaatgacctgtgaactccactagttacaccttctattataatcatacacctttatgcattggtctatcacacaagccacaaacatgcctataaataagctgtgtattcccagaatctacaacagtagctagtagagagcaggtattcataaattttttatgaataaatgaaagaaaaaatcccgtctgttgaatcctttgactggccagtaagtcaataaaacagtccctgtattaaaaaataacaatgttactattttcacaaatcagccaagtggagacataatgacatgttttctagcctgatattctcagtagatgattattttgcttattttctttctgcaaaagagattagtcactgatgaatattagtaggaaaaagcttcacttactatccaattaagcacttaaagatacaagttttcttttaagtgttttgtttattttttgtttttcaaagccaaatacttatacatattctttggaagctgtcatttagaattcattaattatcattatagcatctatttaaacgtttaaaggtattctaaaattttatctctgctacctaatcttaaagacaatatttaatagagacatttctacattatcatcaataattaaccragagaaaatgcttctatttatattgggtctcttattatcataaaagtagtcttaaaaggctgatttaaaattacatgagctaatacaagcctaaaaggacaatgagacaaaggtccaag

SEQ ID NO: 668056 - DNA, 2781 bp, Homo sapiens
caatgtctgtggtaaatgctatgtttcctattaagtcccaaattgaagacagcggttacttttccatttycttttagaatgtacaagaattcccttttatacttttaaattttcaaatatacaacttaccatatagatattaatattctcctatttttaagtctcctattcttgtctagactcaatactgccaaaagcatttcaactgcactttatgcattttaattacatagaatttcctgttttaatgcttatgaaattggaacgtctttctattagccgtggtgcaaactgcttaacagaaatggaataccagctaccccctgccccatcccgttttactcgagggagaagagacaggtaaattcatggagttctgtttctttccttcccagaaaaaaaaaacaaaacaaaacaaaacgataaaacaggaaattcaccttgagaaaaacatcaagcaggtaaggcttttccttcttttcacggccttcacaaatttgtaaataaggcacttaatttgtggtctcaatgtttcgatctaatttcctgtatttgtatctctggcaacccggataccattgcccactgaataacctcagcataaccacactgccacaggctgcctgcagcagactcagctaaatgcaaaagccatccaatgacttctgccacagaggctggtggcatatgtaattctcttaagaaaataattattccagcattcaatgcatcatttttctcactgttgttattctgtcacttgtgacttcctcatacccaaacccagtaattgtaaagcctatagtttagtggtttagtttatatgacacgtgcacacacacatacatacacacgtcacacattcatgccacaccatcatgtatagatggctgaaaggaacatactgataactgagagataagaatgcaggctggaatttctcactttctagtaaaaagatgcttatcatatcattgaacattattcactgatagtctgtgaagctgcttgcaatcagatttctttctttgtattagtttctatcttcccttagtgctcagtctagttccttgtacctctttcagctcagtacctgcttgccaactaacaacttatttggagaagaagaaaaggaaagagagctataatattataaagttaataatccacaactaggtattctgcagtaaactgaaagtcctttgcagtcttcaactctgctttatatatcaaacacctggattatgtacaaatgatgaagtttatatatgcatattgctgtgttataattagtctataaagggtatctgaaaccatgatattgttaatcttgtacaatatgttttcatatgcatcaaagcacatgtattataccaaaaagagaaagtattcaaaactatccaaagtttaaaccaagtccaactgtttcataccaatgagaattgtgtctccttaaagactaataaaaaacttcacaaaactctctcccattccttcctccctccttccatctattcctttctagttgtcttgtgccagggactgaattaacaaattagaatacaataatgagctaaataggtagggtttggcctccgtatgacttactgtcttatggggctgatttactaagaagtaaatacataattgtgctatcaaactaattatcttgtgtgcaaagccagacaataaaaagcaggcatgataaggctgaggggagttcttctgacattcttttacattattctgatggcataaacaccttagcacctcaacagttcaaaaatcacatcgcagatatcattgactgcagagctgggaatcagaatcgagcttcctcatccattaacacaggccaagttcatttgcagctctcatacttgtcacaatggagataactgttttactaagaagtcagcatctgattgggaataagaagaagactacagaagttggagagcgtggttttatcagttaggcctacagaattccatgcagttctaggatagtgactctctggggcctgcaagtgaaagaatttcttaaagaatctctggtaaaggagcatgagaagaaagtagggggccagatgaaggatcattcaatacagccagctgatcatttgttatgccagctttaatgctatctgcatgtgaagtttctgtcctacccgccatttgacagaaacagtatgtacaacagctttagaacttgacactgaactaacctcaagtggtttccaaggatttcatagagaaattagtaataaagtctctttaatcagtctgtatccaagacatctgcttgggaacacagtgtctagtcagacatacaaataaaatagctgagacaataatgctaaggattctgtggttggctaattcagatgaagacaatttccatgttgtagctacgttttaacaagataactgccattaataaatcattcacctaatgacatgcttggtgtctaatatgggttatcttataaaatccctgaacgttgctatacaatatgtattttattttatacagatacggagccaagaagctcagagagttttgtctccaaataacacagctagcaggtgatagtcataggatacaaattcattttggtggattccatgctctgatttcttattactatacaaattgccttcctgaagagacttaagacatggattttccatcaaggaaatgataatcttgttatagacataggactcttaattgaatgtaaatcagcatatatttactgaatacttctgtggacaagac

SEQ ID NO: 668057 - DNA, 2781 bp, Homo sapiens
caatgtctgtggtaaatgctatgtttcctattaagtcccaaattgaagacagcggttacttttccatttccttttagaatgtacaagaattcccttttatacttttaaattttcaaatatacaacttaccatatagatattaatattctcytatttttaagtctcctattcttgtctagactcaatactgccaaaagcatttcaactgcactttatgcattttaattacatagaatttcctgttttaatgcttatgaaattggaacgtctttctattagccgtggtgcaaactgcttaacagaaatggaataccagctaccccctgccccatcccgttttactcgagggagaagagacaggtaaattcatggagttctgtttctttccttcccagaaaaaaaaaacaaaacaaaacaaaacgataaaacaggaaattcaccttgagaaaaacatcaagcaggtaaggcttttccttcttttcacggccttcacaaatttgtaaataaggcacttaatttgtggtctcaatgtttcgatctaatttcctgtatttgtatctctggcaacccggataccattgcccactgaataacctcagcataaccacactgccacaggctgcctgcagcagactcagctaaatgcaaaagccatccaatgacttctgccacagaggctggtggcatatgtaattctcttaagaaaataattattccagcattcaatgcatcatttttctcactgttgttattctgtcacttgtgacttcctcatacccaaacccagtaattgtaaagcctatagtttagtggtttagtttatatgacacgtgcacacacacatacatacacacgtcacacattcatgccacaccatcatgtatagatggctgaaaggaacatactgataactgagagataagaatgcaggctggaatttctcactttctagtaaaaagatgcttatcatatcattgaacattattcactgatagtctgtgaagctgcttgcaatcagatttctttctttgtattagtttctatcttcccttagtgctcagtctagttccttgtacctctttcagctcagtacctgcttgccaactaacaacttatttggagaagaagaaaaggaaagagagctataatattataaagttaataatccacaactaggtattctgcagtaaactgaaagtcctttgcagtcttcaactctgctttatatatcaaacacctggattatgtacaaatgatgaagtttatatatgcatattgctgtgttataattagtctataaagggtatctgaaaccatgatattgttaatcttgtacaatatgttttcatatgcatcaaagcacatgtattataccaaaaagagaaagtattcaaaactatccaaagtttaaaccaagtccaactgtttcataccaatgagaattgtgtctccttaaagactaataaaaaacttcacaaaactctctcccattccttcctccctccttccatctattcctttctagttgtcttgtgccagggactgaattaacaaattagaatacaataatgagctaaataggtagggtttggcctccgtatgacttactgtcttatggggctgatttactaagaagtaaatacataattgtgctatcaaactaattatcttgtgtgcaaagccagacaataaaaagcaggcatgataaggctgaggggagttcttctgacattcttttacattattctgatggcataaacaccttagcacctcaacagttcaaaaatcacatcgcagatatcattgactgcagagctgggaatcagaatcgagcttcctcatccattaacacaggccaagttcatttgcagctctcatacttgtcacaatggagataactgttttactaagaagtcagcatctgattgggaataagaagaagactacagaagttggagagcgtggttttatcagttaggcctacagaattccatgcagttctaggatagtgactctctggggcctgcaagtgaaagaatttcttaaagaatctctggtaaaggagcatgagaagaaagtagggggccagatgaaggatcattcaatacagccagctgatcatttgttatgccagctttaatgctatctgcatgtgaagtttctgtcctacccgccatttgacagaaacagtatgtacaacagctttagaacttgacactgaactaacctcaagtggtttccaaggatttcatagagaaattagtaataaagtctctttaatcagtctgtatccaagacatctgcttgggaacacagtgtctagtcagacatacaaataaaatagctgagacaataatgctaaggattctgtggttggctaattcagatgaagacaatttccatgttgtagctacgttttaacaagataactgccattaataaatcattcacctaatgacatgcttggtgtctaatatgggttatcttataaaatccctgaacgttgctatacaatatgtattttattttatacagatacggagccaagaagctcagagagttttgtctccaaataacacagctagcaggtgatagtcataggatacaaattcattttggtggattccatgctctgatttcttattactatacaaattgccttcctgaagagacttaagacatggattttccatcaaggaaatgataatcttgttatagacataggactcttaattgaatgtaaatcagcatatatttactgaatacttctgtggacaagac

SEQ ID NO: 668058 - DNA, 587 bp, Homo sapiens
cagttaaagtatgttatgatatattactcaaaagtaaataatcacgctacctgacttcaaactatactacaaggctacagtaaccaaaacagcatggtactggtaccaaaacagagatatagatcaatggaacagaacagagccctcakaaataacgctgcctatctacaactatctgatctttgacaaacctgacaaaaacaagcaatggggaaaggattccctatttaacaaatggtgctgggaaaactggctagccatatgtagaaagctgaaactggatcccttctttacaccttatacaaaaattaattcaagatggattaaagacttaaacgttagacctaaaaccataaaaaccctagaagaaaacctagacattaccattcaggacataggcatgggcaaggacttcatgtctaaaacaccaaaagcaatggcaacaaaagccaaaattgacaaatgggatctaattaaactaaagagcttctgcacagcaaaagaaactaccatcagagtgaacaggcaacctacaaaatgggagaaaattttcgcaacctacttatctgacgaagggctaatatcca

SEQ ID NO: 668059 - DNA, 587 bp, Homo sapiens
cagttaaagtatgttatgatatattactcaaaagtaaataatcacgctacctgacttcaaactatactacaaggctacagtaaccaaaacagcatggtactggtaccaaaacagagatatagatcaatggaacagaacagagccctcagaaataacgctgcctatctacaactatctgatctttgacaaacctgacaaaaacaagcaatggggaaaggattccctatttaacaaatggtgctgggaaaactggctagccatatgtagaaagctgaaactggatcccttcyttacaccttatacaaaaattaattcaagatggattaaagacttaaacgttagacctaaaaccataaaaaccctagaagaaaacctagacattaccattcaggacataggcatgggcaaggacttcatgtctaaaacaccaaaagcaatggcaacaaaagccaaaattgacaaatgggatctaattaaactaaagagcttctgcacagcaaaagaaactaccatcagagtgaacaggcaacctacaaaatgggagaaaattttcgcaacctacttatctgacgaagggctaatatcca

SEQ ID NO: 668060 - DNA, 2520 bp, Homo sapiens
acttagatagaaaatcttcatagtgcctactaagtgctagaaactttataaaaacatgacgaccctataaaggagataatatttttaaaaaatattttagaggtctgaaaactgaaactagaaattaagtaataattccaagattatctgagtagttactagatacacatttttcccttgggttaatattcagcctcaccctgcctggtagtgccagccactgaacagcccctcagagacagcctaatcttttgctgatgcctacagaaataacagttctgactggatgcacccaaactctgtcatgtgggttctgcctggctcaggacttcctggagagacctacactatctgcgtcatcttatactagcatgtgtcctcaagtagaacctatctagaatgactaaagtctccttccatgccacgtggggcccagcagagctgagataagcattgtcctaaccttttcccagactcttaccaagagccattttgaccttgctggcagcctcgtatcttctgttttctgtgcaccagaagtgggtaccagcctttttgtgcaaatacactcctatacttgaggaaattatgtccaactcgtccaaaagctctcatgtttgctaataagaaagcagcactaggttggactgtgactatctgcagcccaggaagctgcctgtgaagattcccatcacatcctgcgtgtacatctaattactctctactaaggagcgtcttcacccccagagtttgtagggcaggtccaaggtacatcatttacaaggaatacggcatcacccaaaggattgtgttactttcactctccttcccattaacctcttcttaaacttgggggaaggaataggaatgatggccagttctgctacctcctagttttctttcagggaattgttgtccagctggtagtttctgtagaaaatgagtgttttaagttcttgtttctaacatgaggtcttagtgaaacaccagaaaaaaaaattaaaaattcacctaacattcttttacatgtttgtatatacatacatatgtaaacatataaatatataacagatatatgtttaaattcttctctccagctcctaaactatggacccagcatattttagctaactcgttaattaaattggtaaatgtaaacgaacatttttttgagtcttctatgtttctgttttatatttgtcgtctcatttaatccttatagtaaccccgagagatagaaattaccacccatatgcatatgaagtaaggaaaatgagattttcttttgcaaattgtcttttatttatcacacttctcaaccctctaagagtacagagagtaaaactgtggctcacggagattacagaagttgctcaacactgcatgaattataattgaaacagattaagaaataggaaaatgactgtgagaaatgtcacttatgactggaaaaccagcttatgaatgaaaatccyccttttttgccctccgttatttatcactcttctacaggtagccagtaatgaacacagcagaagttggctgcagctgtcaaccacgcagccctccttcagattaaggcaatgtctgcgtgttctgaattacctaccttagtgagcactggtggcccatcaaaattccacccaccagatgccaaacagattcataatatgcaaatgactgcttgtggcatcaagttcatcaaattgattctggaactccaagcaccgtagggggatggtgggacacatgcttcctccttaaaacagaagtcatttcttttaagagcagagaggtgctggttgcgtcacttgaggcgtctgcaataattctttcacttctatattcctgggcccttaacaagattcatctatgccaacatgtgcttggcatccattgctctggcatctagagaatagtttaacaacagaaaaataacaaactatgaggaaatgggtgtaatacttttatagctgaggctgaactcaagcgtgaataaaacggcttctaaactcagcctgctccataactgcccttcattgattttgattgattaaaatgcaattgtattaatcagtaatggaagatcgttccatatgtttaatcgctctttgttggtttgtgtgtgtgtgtgtgtgtatgtgtgtttgtgtgtactgtcacgcactgcacaatcctgcataactacattttggtcaactacagactgtatgcatcatagttgtcccataatatcataatacattattttcctgtaccttttctgtgtttagatacgtttagaaacacaaacacttacgattgtgttataattgactacagtctgctgcacaggtctgttgcctaggagcaatcggcttcagtatgtatcctaggtgtgttggagtctgttccatctaagttctgtaagtacactctgtgtggctcgcacaatgatgacatcgcctaatggtgcatttctcagaatatatcctagtggctaagtgtcacatgactgtaaacattgccaagattttttta

SEQ ID NO: 668061 - DNA, 2520 bp, Homo sapiens
acttagatagaaaatcttcatagtgcctactaagtgctagaaactttataaaaacatgacgaccctataaaggagataatatttttaaaaaatattttagaggtctgaaaactgaaactagaaattaagtaataattccaagattatctgagtagttactagatacacatttttcccttgggttaatattcagcctcaccctgcctggtagtgccagccactgaacagcccctcagagacagcctaatcttttgctgatgcctacagaaataacagttctgactggatgcacccaaactctgtcatgtgggttctgcctggctcaggacttcctggagagacctacactatctgcgtcatcttatactagcatgtgtcctcaagtagaacctatctagaatgactaaagtctccttccatgccacgtggggcccagcagagctgagataagcattgtcctaaccttttcccagactcttaccaagagccattttgaccttgctggcagcctcgtatcttctgttttctgtgcaccagaagtgggtaccagcctttttgtgcaaatacactcctatacttgaggaaattatgtccaactcgtccaaaagctctcatgtttgctaataagaaagcagcactaggttggactgtgactatctgcagcccaggaagctgcctgtgaagattcccatcacatcctgcgtgtacatctaattactctctactaaggagcgtcttcacccccagagtttgtagggcaggtccaaggtacatcatttacaaggaatacggcatcacccaaaggattgtgttactttcactctccttcccattaacctcttcttaaacttgggggaaggaataggaatgatggccagttctgctacctcctagttttctttcagggaattgttgtccagctggtagtttctgtagaaaatgagtgttttaagttcttgtttctaacatgaggtcttagtgaaacaccagaaaaaaaaattaaaaattcacctaacattcttttacatgtttgtatatacatacatatgtaaacatataaatatataacagatatatgtttaaattcttctctccagctcctaaactatggacccagcatattttagctaactcgttaattaaattggtaaatgtaaacgaacatttttttgagtcttctatgtttctgttttatatttgtcgtctcatttaatccttatagtaaccccgagagatagaaattaccacccatatgcatatgaagtaaggaaaatgagattttcttttgcaaattgtcttttatttatcacacttctcaaccctctaagagtacagagagtaaaactgtggctcacggagattacagaagttgctcaacactgcatgaattataattgaaacagattaagaaataggaaaatgactgtgagaaatgtcacttatgactggaaaaccagcttatgaatgaaaatcccccttttttgccctccgttatttatcactcttctacaggtagccagtaatgaacacagcagaagttggctgcagctgtcaaccacgcagccctccttcagattaaggcaatgtctgcgtgttctgaattacctaccttagtgagcactggtggcccatcaaaattccacccaccagatgccaaacagattcataatatgcaaatgactgcttgtggcatcaagttcatcaaattgattctggaactccaagcaccgtagggggatggtgggacacatgcttcctccttaaaacagaagtcatttcttttaagagcagagaggtgctggttgcgtcacttgaggcgtctgcaataattctttcacttctatattcctgggcccttaacaagattcatctatgccaacatgtgcttggcatccattgctctggcatctagagaatagtttaacaacagaaaaataacaaactatgaggaaatgggtgtaatacttttatagctgaggctgaactcaagcgtgaataaaacggcttctaaactcagcctgctccataactgcccttcattgattttgattgattaaaatgcaattgtattaatcagtaatggaagatcgttccatatgtttaatcgctctttgttggtttgtgtgtgtgtgtgtgtgtatgtgtgtttgtgtgtactgtcacgcactgcacaatcctgcataactacattttggtcaactacagactgtatgcatcatagttgtcccataatatcataatacrttattttcctgtaccttttctgtgtttagatacgtttagaaacacaaacacttacgattgtgttataattgactacagtctgctgcacaggtctgttgcctaggagcaatcggcttcagtatgtatcctaggtgtgttggagtctgttccatctaagttctgtaagtacactctgtgtggctcgcacaatgatgacatcgcctaatggtgcatttctcagaatatatcctagtggctaagtgtcacatgactgtaaacattgccaagattttttta

SEQ ID NO: 668062 - DNA, 644 bp, Homo sapiens
tgggacttctcaggcagcctgagcttgcagcccttacccaccagactcttctcaactctctgatgcactccctgttatatcctccctggctcctgttccctccctcccaggtaaccacatgtcagaacctagcccttgctgtatctggaataagctgatcaaagtgctctgtattgatcagtacagggctgtgaagtgcctggcacactcaggggccacttataacagacaggactcctctccctgaggcccctactatccctcagctgttcacctgcccaccacgatccctcccgcccaccacagcaacctctgcaaagcgacatcrtgtttcctccaacggcaggtgtgggatgtagaaggattcgggtttgataaagaaatgctggccagccaccgtggctcaagcctgtaatcccagaactttgggaggctgaggcgggcagattgtttgaggtccggagttcaagaccagcctggccatcatgacgaaaccccgtctctactaaaaatacaaaaattagccaggcatggtggcgggcacttttaatctcagctactgggaggctgaggcataacaatcgcttgaacctgggaggtggaggttgcagtgagccgagatcatgcccctgcactccagcctg

SEQ ID NO: 668063 - DNA, 623 bp, Homo sapiens
gatccccacctcctgccgctaatccagggtgacagaagtaacggggacagaggagaggaggggcttccccagtgcacatcatgagcctgctcccgccatgcctttcctctgagcagtgctgtggctgggaactcatttcacagccctggaaaccgaggccacagtgatgctcccaaggtaacacggtgaatacatttcccatcgaggacttaccgcaggtccggatgtctggcaggaattccaccctatgcaccaccccaaccagggaccacccctctgggctagggaagaagcaggggccactggaatgaaccagctctttcctctccccgacatctgcttctcctgcccagatttggttctctcaggagttagcccagaggatccattcggcctccctctggaaatccaaacctttcctcgaggtccccatgctgtttcctgcaggaatcctggctgaccaggcaaaggcttcagaaagggctttggattttcttggacctgagtttttttgtttgtttattgattgactgatttttagagacagggtcttgctctttcatccaggctggggtacagcrgcacaatcacatcttactgcagcctccaactcctgggctcaa

SEQ ID NO: 668064 - DNA, 648 bp, Homo sapiens
tgaattcagtttttatgattacccatgtagtaaaatcagaataaaaatacgttagaattttctcagggatcaattctgattatatatttgagttatttttatattcatactatgttttttttgctgatatgaatgctaatcaagccaaatacagaatctatacctgaccaatcatatattccttataagttaactgtgtaaattgaattcatacatcaatgaacatttgtgggtttttttccaccttttagttattatgaataatgctactatgaacattggtagacaattacctgtttgagcccttgctttcaattttggttttacacctagaagtggaattcttggaccatmcagtaattctatgtttaatttcttgaagaagcattatactggttttcacagcaattgcaccattataaattcccatcagcaatgctctagggttctgctttctctacatcctaacccacagctgttattttctgtatgtgtgtgtatatatatttacatatatagtatatatatttatatatgtttgcagtatatatatttctgtatatatatatatatgtacatatgaaaatatatatatttgatactagctatctcataagcatttacctaaagatttgtgatgttgaacaa

SEQ ID NO: 668065 - DNA, 648 bp, Homo sapiens
tgaattcagtttttatgattacccatgtagtaaaatcagaataaaaatacgttagaattttctcagggatcaattctgattatatatttgagttatttttatattcatactatgttttttttgctgatatgaatgctaatcaagccaaatacagaatctatacctgaccaatcatatattccttataagttaactgtgtaaattgaattcatacatcaatgaacatttgtgggtttttttccaccttttagttattatgaataatgctactatgaacattggtagacaattacctgtttgagcccttgctttcaattttggttttacacctagaagtggaattcttggaccatacagtaattctatgtttaatttcttgaagaagcattatactggttttcacagcaattgcaccattataaattcccatcagcaatgctctagggttctgctttctctacatcctaaccmacagctgttattttctgtatgtgtgtgtatatatatttacatatatagtatatatatttatatatgtttgcagtatatatatttctgtatatatatatatatgtacatatgaaaatatatatatttgatactagctatctcataagcatttacctaaagatttgtgatgttgaacaa

SEQ ID NO: 668066 - DNA, 639 bp, Homo sapiens
taatgcaatgctgatgggatctgtgtgggaagggactagatttttatttagtttttcaaagtacatttattcatttgtagcatttgtagaaatgatgttggccaggcgcagtggcttacacctgtaatcccagcactttgggaggccaaggcgggcagatcacgaggtcaggagattgagaccatcctggctaacacagtgaaaccctgtctctactaaaaatacaaaaaatcagccaggcgtggtggcgggcgcctgtagtcccagctactcaggaggctgaggcaggagaatggcatgaacctaggaggtggagcttgcagtgagccaagatcacgccactgcactccagcctgggcaacagagcgagactctgtctcaaaaaaaaaaaatgtatatttgttgtaaaaattaaaacatcttgaagggtaaaagaatgtaaaaatcacttcataccctactgcttagtgatagtggctgtttagagtatttttctcgrcatctcttcccttaggtacataacaatattgacacattaattgagcatctgttgtgtgccattcttagagtcacatgcatctttgcattaaaagacagacttggcttgaaggagttagccaggctgagggaaaggattta

SEQ ID NO: 668067 - DNA, 1840 bp, Homo sapiens
aggatagtgctttcctctgcagtaagggaaaagtgtttcagcagtggcacgtgagaacttctggggtgcaagcaacattccatttcttcaccagggaagtggtaatacaagtgcagaggtatgtattttataatttatagcttytatttaaagtatatatgctttatgcatgtctgtatatctcctatttttaaatgtgtttaattgaaagaacatatgtcaaaaccaaataaaacaataaatccagaatgttctttggctagaaccagaaagcatccttagacaagaaggaagagagacacattatagctagaagtagaaagcatccttagacaagaaggaagagagacacgttatagcagtcacatctagtgacaaaattcattgagtaagccatgaaaatacattgattatccagataccttatcttaaaaatattatacttccatgtcaaaaaagcaaaggaagacatgacagaagatgcttttggaattggaaattgccttcttttaaaagtttagtgagatgcatttggctctagtgaaccaaaagaagttatatggtcacttcatatttgtgtattaaaataattcagtcatcatttaagaaatacttaggtagaaagtactaatacaagaatgggctactatgatgagtctaagagagctgacaccacaacttgacagctaactgacaggctgatgaacagtaacatttatgagcaaaggtttaagaggcctaaagttggaatatgcaggaaaatgccttaactaatatgtcacattaagccaaagtacagattgttgcctaagaaacccatgaaacaaaatttttttcttcacataattaatgaactgcttatgaaaataaaaatgtattaatttttctcttgaataatttttattacaaaaacaatcagcaaaatatgtatgagtcattgcctaaattctgcacagaactgtcaatggacacactttatttttctctttttctaataaattgtcatgcttaaggatttgcatattttatatcagagggcctgaggtttccccagtgtttgtttaatatagttaagtaaataccatagagccaatgaagtgagtaatactcagtttgcttccatctcagcgtcagtgacaggatatgggtgactgtcaaatacacacagaatgacttttctccatttacaatctcacagctttaatatcaaataaaatctctccagaacccttttaagaatctaaagacaaaatcacttctgcataaatcctgcctaaaccacccaagatttaaaaatgtactttggtcaacaactttcatcgagtatctctcttaggaaagcagcaactaaaacaaaaaaaaaaatttactggttcccaatatttaaaaggtttttcatacttgccatttatgtttattctctagctctctggggaggaatttttttataaaagtatcataagaatatacagtaaatatattcagatccaactcttcccataaatcatgatatcatgtaccataaacctcatttgggattcagtgtattctaatatttttaagtggcatattcttaaggaaaaaaactgtctatttatcctaggaataatcctgtgggaccccacacacattttcttttattaataaattagtatacattaatatccaattaaaatattttaaaatttaaattattctaactctctaactagggaaaatattctaattttgaaagagaccacatattttgcttttattgttaaaatattcagtggaattatttttcactttcaactaacatagtaataatatgttaataaaagagtctatattggtacat

SEQ ID NO: 668068 - DNA, 3225 bp, Homo sapiens
ttcaaaatatttagtataataatcaattttaaaacaaaatttatctacattatttgggccctaatggtatgttaaataataagaaaaaataaaatgtaagtcattctcaaaattttactctatgaggtataaaatgttaattcccttgacaaattgagcgccaacaatttgtcagtctaggtctaaaattctaaggatacaaaggcaaataaactgaggtctttcatttcaagaatacactcaggagagagatgtgtcactactttcaacctaagttgaaaggcaggtgtctaccaggtgtgcatacatgaaggtcatataatgttttgaaaaatgtacacataccactttcagacaaacactgagagaaatacaccctttagaaaaatataagacagatatgtaatagtttccagtgctgatttcctcttaaacttgtaactaatcagagagggaaaaaaaaaatttatggctagcaaagaatctttagaaatgaaaatgaattatgggccgggcacagtggttcacgcctgtaatcccagcactttgggaggctgaggtgggcagaccacaaggtcaggagttcgagaccagcctggccaatatggtgaaaccccatctctattaaaaatacaaaaattagccaggcatggtggtgcgtgcctgtagttccaactactggggagactggagaatcacttgaacccgggagatggaggtcgcggtgagcctagatggtgccactacactccagcctgggcgacagagcgagactctgtccaaaaaacaaraagaaaaaaaggaaatgaattatggttcaccaaactaaggcattcaaaaggcaatgccatatttattataattttactgtacattttttgaatatcacctgttatacaaaacatatgatgtggtttaaaggtaaaagtaaaccataaatttaacaacatatttaaacattagactaagaagagagagattttaaatatggagttcagaaccatgagactaactcattgttttaatgaaaataaaaagcattaacaacactttttccccatgtaagcctaaggcaatccatgtaaataagaaatttcaagaaaatgtgaaaagcagagttcctggggcttatcactaagtgtaaagtagaaagaaagaggagcaaatcactaaaatcaaattctaatttctgctttgacaaagtagtacttttcctcaaaaatacgtctggatgaatattttggatgattatttaaagcgaataattcaaagcatggaacctgatgcataatattaatcaatatttttaatcttctttaaatgtgaactaaaagcatttttttttttgagacgaactctcactctgtcgcccaggctggagtgcagtcccgcgatctcggctcactgcaacctctgcctcccaggctaaagtgattctcctgcctcagcctcccgagtatctgggattacaggtgtgcaccaccacgcctggctaattttttatttccagtagagacagggtttcaccatgttggccaggctggtcttgaactcccgacctcgggtgatccacctgccttggcctcccaaaatgcaggcaagagccaccgcgcccggcataaaagcatattgtaataacagagcctgaaccttataactatcactgattttactgaagacacttaaaaattcatcacggatttaacttagaaagtttcacctaaagaaaaataacacagtcaaaaactaaaagtgaaaaaatctcaaaagtaacccctacaggattttataatatctctgtttcaatctagcaatcaaatgacaattattacttttatttaaatgtaaatcttgatttttttctacttataaaagcaatatatgctcattgtaaaaaagaaattttttctttaaaacgtggaaatgtatgcaaagacaaagaaagccccaccagcctaaccctaattacccccaacccgcgagataactttactcagtgtttcttctttgatgaagcttgatctcacccaagggcatctgaaaaggagcacgcttctaagcattgaactcagtgtaccatctcaatgctggctcctggcaggagagccagcttttaggaaagcctgaccatcagaaaactggatctgttgccttgacccaactctatgaaatcttgatgtttcttccaaagtgcagcaaaagtatctagagactttttatatcatccaaagagaatcttgtataataataggagtatattaaggtttcaattatcacatttcgtagaactcacctttgattttttttctcttctcagtagagagcctccaatcaggattaaggtcatcatagcctggctaaatatgaaaataatgacttcctgagtgaactatgtaagaaaattataagaaaatcatcaagaactgtggactttttcaaataaagagatgacgctttcccttgatctctcaattacaactaattgaaatctatttattgccatgatagtctggaaaagcaattgttcttacacttaaaatgtgcacatgtacatattatgacttgatttatgaagaatacagcatgcatatgaacaacaggatagcaagtatacaatcaatacatatgaaagcaaaatacactaagaattcatcctatacacatgcacacatgtgatgaataaacactggcctggatacagatcttatcccagccacttataaactgagcaacccctccaggctttaattttcaaagctttgagacttgactaggcaacctccatgttacctcctagtcctttttatgactaagaatttaccaggtaaaaaaaatataaccatgcagtccttcctaaaaatgaatccattcatactgtaatcttagggcaatatggtgtcatgctcttctttgagaatataacagcacattgatatctctcaaatatcaatttgagaataagccattacctgacgacctcttggcttagtgttcccttcttagtctctggaattacaatagtatgggcaaagagtaaaaaaatagttggggtgctcatttgaaatctgaaatctaaaaaaagcgttgctatacttaagtcaaaaaactgtgctttttcatctaatgcaacaaaatacacacatgtttactatcaatttttcaatggctcacacttcagagctatttctttccacagcctggaagaacttcctattctccactatt

SEQ ID NO: 668069 - DNA, 991 bp, Homo sapiens
agtgagctcgtttacagttgtaaaaaacagagtcagattattaaatttgagtaggtcttaaccttaatatatgactattaatgtgaaattacagattgtatgtagaagcaatttctcccctaaaatcttcctctctgattctttatatttctcttgttttctatttccttagtccctagggtatgtgtctcaacagctcttaacctctattaaatagtgtccagggcttccaaccaagtctcgtgagagggtcatgctcctgtcccagtgcccagagctggtgctgcttcctgctgctgctgaagccccagctgcagagcactgttgggatcggccatcaccaccaccttggttgctggtgcgatgttcggttgatgcccgtagagactcacagtgccctgaagtgagcacatgatgcttttacatactccctgcaaatcaaccttgtggccgtgacatagcagccccaacaaccaaaacaactttggtagccccatcaatctgtgacttctaaattttctttagcatcttcccatgtttttgctttttttttggtttttttggttttttttttgagacagtcttgctgtgtygcccaggctgaagtgcagtggtgcaatctcagctcactgcaacctccacctcccaggttcaagctattctcctgcctcagcctcctaactgggattacaggcataggccaccacgactggctaaattttttttttttttgtatttttagtagagacggggtttcacgatgttggcccggctgtcctcgaactcctggactcaagtgatctgccgtccttggcctcccaaagtgctggaattacaggcgtgagccactgcacctgacctccattttcctctggtctttcagagagcccaggcagaagctattatcatcaaaggtaggtttaagattaatgagtctcccctgccagctgggtcgcacgtctcctgaggacatgctttgctgtttgtgatc

SEQ ID NO: 668070 - DNA, 1563 bp, Homo sapiens
gggaaagcttctttttttaccttacacttgctctgttgaaaatatcaacaaaatctgagtttatttgcttaccagtattccgtatgacaaagacatgaaaacatcaaacattatattccttgatttctactttgcagaaacctttcagtaaattaggctctgaaattttcagattctatttygaatttgtaatatgaccctcctccataattgaaaagtttttccccagcaaaagggaccactggatttactactttgactgtgccccatcccaaacacacacttataggaagatccactggctgagggagccctcgaacttcagactgattctgggctttaggactcaaggctcagaggctcagacagactctgcactttgtggtttgtttctgatttttttttttttttaaccaggtctcactctgtcacccaggacagagtgtggtgatgtgatcacggctcactgcagcctccatctcccaggcttaggtgatcctcttgcctcagcttccccaaaagtgctgggattacaggtgcatgccaccatagccagctaatttttaaattatttgtagagatagggtctccatatgtttcccaggctggtctgtaattcctgggctcaagcaatcctttcaccttggccttgcaaagtgctgggattataggcatgagccactgcacctgatgctcttggggagttttgagttcagaatgaccttggcatgattttatgggctagcctagaaaactgatctggcagatacacatgcacattcctaatataacactacttttaaaataaattacttccaagctgcaaacaacttagttacagatggctctttggaaaacaatcctttcccttttttgaaaaacaaattttgggtacatggttctttcattagaaacttattggatggacaggacttgagttttacttttaataattcatgttatatattaccaaaaatgtgattctggtgatgtcaaagtcatgctttgttcatttgaatctattaaataaagtacttatatgggaaataaaacttactttaaaattgatcaacaggtaaatagataggaaaggtcttaaataatcatcagtaaagaactaaaacaagcaaacatttgcttttctagattggaggataaatttatcagagtcagaatttcctcaccatgcagagtttaaaggccgtttataattattcctcatctccatcctttagtcaatcaggcctcttttctaacacatctttggatgcttgtctaacttcccactctcatcactgccaacccaaccaccaactctatctagtcccagctgctcttacaacctgctaattgaatagttttaatggctcttttatacatctatccaaatccactccaatcctctactttgtcacattcattcctggatttttttccttgcagttttgaatgggctaatatttctattgaaaattattctactcatccataagacgcaaatattttacattatttttccaattgagatatagtggccatgttgaaccactgctgtttcttaaa

SEQ ID NO: 668071 - DNA, 691 bp, Homo sapiens
agagtcagctcacattcttccagccttgtggaagacctggagtgagaacacctagctaagcttctcttcaattctcgatccataaaaactgtggggtaacaaaggcttgttgtcttcagacactaagatttaggttaatttgtcactgaacaatagatcactaatttatcaagaactcttactttattattatatatactacargcccctggagacatgtggtatacatgtggcgaatgacactgtttaaagatgccatttatgtgcagaatactacttaaaagaatttttccaggaggacattaccgtgtctaattgacagtaaagccctaataaattcaaattgcctcacaataataatcagttgtctcacaaaatatattttgggtatttctagaataattttggaagatctgatattgaaccctatgccaaatagcgtggcatgaggccagagaacagtgcttgccttccccgtctccacccaaattgtcccttgctctggatattatgccagttccatatttgggtgtatgtaagaaaccacacatcttacaatgttatgttattataacacatacagtacagccaagtgactgttcagatacatacagtgaaagctttttaataaagatgaggttattatgcctacctatagctgattttcacgatataggatatttatacccct

SEQ ID NO: 668072 - DNA, 648 bp, Homo sapiens
ggtgctcttcagcttctctttagaagagcaagttcaagagatgtcaacagctctgccactattttcttaataaagcaaaattgaaaaatcactaaaaataacacattagctcatttctgttaaatataacctttgagtatgtgttgtaatgccgtgctttctggttcatagcttctagtacctggaatagtgcctggcttgtgattggtgctcaatagatatttgttgaaacaaagaaaaaaagacagaaagagaaagagagagagagggaatgaggaataaaaaatttctcaaatatgagctttaactactacagggctcccaggacaaaccttagagtatgcttacagagaggatgccttgaggaagtcagaaaaactggactcccaggagtggttcagggtggtccaaccagcagaagaataaccagccamttcaaattcaaattcagcaaggtgaatatacaggaaatcagttgagtagaatccagggtcaggcagtttaagaaccaatatgattcaagaaattaggtgagatatacatcatctgccccgtctttctcatttagtctccccagatcttcttgtccaatccacttcttctcatccacttcaacttgcacctataatccaataatccttaaaccca

SEQ ID NO: 668073 - DNA, 731 bp, Homo sapiens
tgtagccagagtgacggcagataaagaataacattgaaggcctggttgaaaaaaagaaaaagaggctgttaaacaatacctaggaaacataggcaactacttctaggcaatgagtctatatgcttaatacttgacttttattaactatagaactcccagtgagaaacactgaaattcctacagaaaaagactgatacttctaaattgcttttcaatcaggctggtattaaatagtaaaaggttatggcattgttgctgagaacatatctgaatactttcaggttttgggcttattttttaaaagggagaaaaggaaagcacaagtaggacacggagcgtaagggcatggagctgaattgccagtatggatgcaatggcaaagaagtaatgctaattaacattgcatctgacttgcagaccagagccgattaataattgtgttaaacacctcagcatgctatcagggcccagkggaacacatgcacagaactagagccccaggaactaaacagtgacttaaaataaatatttgctgaattgactaagaaatattccactgtgaggtggtgtttgctgccctagctttggcaaaaagaagggtcttaggttctttgatgaatcttctagtatatgaagctcccatgcaaaatgggaaagtcaagacaagagagaggtcaatagagaagcaagaagagtcagcttcttgtatgtatccttacagctacctatct

SEQ ID NO: 668074 - DNA, 731 bp, Homo sapiens
tgtagccagagtgacggcagataaagaataacattgaaggcctggttgaaaaaaagaaaaagaggctgttaaacaatacctaggaaacataggcaactacttctaggcaatgagtctatatgcttaatacttgacttttattaactatagaactcccagtgagaaacactgaaattcctacagaaaaagactgatacttctaaattgcttttcaatcaggctggtattaaatagtaaaaggttatggcattgttgctgagaacatatctgaatactttcaggttttgggcttattttttaaaagggagaaaaggaaagcacaagtaggacacggagcgtaagggcatggagctgaattgccagtatggatgcaatggcaaagaagtaatgctaattaacattgcatctgacttgcagaccagagccgattaataattgtgttaaacacctcagcatgctatcagggcccaggggaacacatgcacagaactagagccccaggaactaaacagtgacttaaaataaatatttgctgaattgactaagaaatattccactgtgaggtggtgtttgctgccctagctttggcaaaaagaagggtcttasgttctttgatgaatcttctagtatatgaagctcccatgcaaaatgggaaagtcaagacaagagagaggtcaatagagaagcaagaagagtcagcttcttgtatgtatccttacagctacctatct

SEQ ID NO: 668075 - DNA, 1126 bp, Homo sapiens
caatagaagcagatgtggggaggctgactttaagaccaacaccaggctctgggaagggaaggaggaacaattacagtctctatccacaccctttcctctaagtgatgatctgggaaccagggaccaagtgctccagtgctgggagacaggaaactccaaacagcagtagcgtctatactataactctcaagaggaaaaggagaaggaaataccaagttaaagttgtgggaagggaaggaaccttctgtggccacccaactggacagcctcataaatgcatgggtatgctcaaatggcaggcatctgagaaatcagtgagtccagtcttttccaagctatatcccttccaattccagaatccctcaccaaatcaacaaactgggggaagaaatattccatggtcaatcagtttcagaattgctagactaaataaaatcatagtgcatcactggctattttaagataataatgagcattataaatcttggcaatgatgggggaacatacactatgcagcacttccaaaactattttaacacaaaatgctttttggaaaggaaaactctacacaagtcatacgttgcaaaatacacatcaacccacccttctcattccacagatgaggaaactgaggcctagagaagcaaaaagaaaaaaaaacttcctaaagattgcaggcttagtatgtggaagagcagggatcagaagtcaaaattttctactctrggtcagtactatctcttctataccatcacacatctgaccccagctctgaccacaggttcaattctgctcggcagctatgccttagccctgccttctctcctgacaatcctgaggctctgcttccaccctcccactatggctaagtgcccgagctcattcaagactgcccttgattcccgtccctggtcttttctgcttcatactagatccaatctcaactcctagctcacctgatctctgcagattacctgcttccagaatccccctgacaacatggctgatcaccagccaaaacttcacctgttgcccttaatggacctcctcaatgcttattacctgcttacaacaacactatctcctggtatcacatgctccctgaacaggccaggcccagccctga

SEQ ID NO: 668076 - DNA, 1999 bp, Homo sapiens
ctgtctcccagattcaagtgattctcctgcctcagcctcccaagtagctgggattacaggcacgcaccactgtkcctggcaatttttgtatttttagtagagatggggtttcaccatgttggccaggcttctctcaagctcctgatatcaagtgattgcctgccttagcctcccaaagtgctgagattacaggcgtgagccaccgtgcctcgccatactattattttttaatccaactccagcttgtgtgaaagctttttgtagaaaaaggatgagatccatatctgggtcagaatggagcacaggaaagaaaagctgtagaaagtgagacacatggtcttgtgagtctgacctctgttgggttctcagagtcagaaggaactgtgagcctgtgagaccctggaagttgccagaaattttggagagtccattggctgttccctaatcatgagctaggggcctggagttaattatttttgatgaagtacattaaataaaaataagtaaataaaatatttccagctgtcctttgaaataaataaaatgttttatttatttcaaaggacagcagacagctggcatatgagctatgccttcattcaccccatgagctatgaaatcactctttcttcctaatgggttctgtgccttgtacagatatctgtgattgaatctgtgaaatactatagtctctggactcagcaatgagctggaggtctaattaatctttatatcctcagcacctcgcataggatttggcacaggaaagtcactccgtaaatgcttgttgaagtaacctttggttcttaatacaaccaagacttcccatcgttcatcaagtcttgcccttatttaactgtcatcagtaccctggtcagggttcatttccatgcttccccctcctggcttcctcatttctttatttttttctcttgcagatggtcctgtggtttcacttcctatttggtttctgaactctctgagcacgagacttggagacgtggagtcctttcactgcagctttcaaaacctttcttagggctgatatgacaattgctggcactgcgtaattgctgtgtggctacttgaaaacttctccactagagactcactgagagcacctattctgttgaatggatttggcacaaggaggaggagagaagacaaatggcctgggctggtaagagacaaaagtgccgtgtgtgagtcttggcccacctacctgctgtgagactctgggcaaatcacctggtccctctcttcccacatcttctgatgagccttgctgcctatttcctgagtagctcagtggccaccagagaccccaggctctttatcaacatttcaagattgtgtaagttctggcattttgtacattatcaaaaagagaaggctaagacctaagtcaggctaaatttgattcaggaaaacacctgacgtttttgtacttaagtatcgaggggtaaatcacatcttttgcacctgaatccgtaagaactgtggcctaaccctcttcttctggagaactcactttcctgtctttctgagactccagctagatagtcctttggcagatgttgaccccatactaccttctccgtgggcaacatctgagtgcatggtctaccttagtgaaggacctctccttgcccctgaagcacttctatcatcctggacctcaacgtggaatggtgacccctacctgccccaccagtcacgaccaccttcttccagcacctccaatgtgtctgccctccagcaccacctgctcccaacgtaagactgctggggtgaggttgcaaaacttgtgtctcccttaagtatggcttctgtacaggtttgtacccagttgtattttaattaaaagcttggctctctaacaatgcaggttctaaagaggccttagtttgctcccattgccagtcttcttagagactaaattcagtcagcgggggaaggctttgcctctgcttaggattggaagcctccatatgcataa

SEQ ID NO: 668077 - DNA, 1264 bp, Homo sapiens
gttctctaaagcacgtcatgtgattctgatgatcagctaggcttatgaaccaattccctacagcatatcttattcttctcattcccacctcctcaacgagatattcttgggaagcacaagctataccatgaaccaatatggaagcagtataaatgtgtaacagaacattacacaattatacattatataaatgtataatttagaagaaatcaatgataaacatacataaaacacatatatactaaggtcagtaaataaagacaaggaagtagaatagatcctctccctacatattttccccatggatgaaataactgataacagtgaggagaggaggctgaggtgggaggatcatttgagcccaggagttcgaggctgcaatgygctatgattgcccaactgcactccagcctggataacagagggagatcccatttctttaagagaaaaaagaggtgaggagagcatcaaccctttggtgaaagcaaaaggaaaagaaaaaaaacaaacaatagtctttgagtaacggggacttcacgtatcctatagcttggcttgagaggacatctactgataatccagtagcctctgaacaattagatcttatcgagatagctggcagtggatttgctttcttccagtttgtcttcatctgtctaataaccttttttctctcaccaaattaaagatgagagatagtaagcacattttttattttaaaaatcctgccaagtatactcaacattcatgtcccctttacattaaagcagttactacttataagaataattacagactgaggtttcttcaatgctgaagtcactgtgttcattcctaagtgggaaggtgatatgaattatacagggcaaaataggggttcagaaggttaatatctaaagaactattcagtcaaatgtagggtgagttttaatgtctctgaataaaaacacttacaatgcaacataagaaactagcctccctccccatctaccactcaggcacttcaatagtttcctagaagtttctgaaaacgctgaagctcttttctactcaattattcatttagaatgtttggcacaaaatatggagaatggacatgtggtaacacagtatataaatataataaaattttgtcaaatggcattaatcatgttttgtatacttctattagtcatgcggcacaaagtaaaaaaggataatgcttactttgctctattatccattccaacagcaattacgcttgtttactcttgttccaaattat

SEQ ID NO: 668078 - DNA, 602 bp, Homo sapiens
ctatccgagtgaccttgggtacctgataatccacatggctctcagtcatcctcttaaccgtttgaacctcaggggtttaggctaccaaaatgaattaagacccagtctttagcttctcacacatttacttttccattttgtaaaatgtgactaaaaacctcaactcattgtcaaaaggactgaattaaacatatcaccacacttgcacagagatcatttatggaaccatgttcacaaatttatttatgctcgtgtaatttaatcatttctacagctgctcaragaaagtcaaagtcgagaaaggacttaaatcgtcgagtccagtcccccttaactcctcattcattccactatttctcgagccaaggaatcgggtgaaactcaacaacgactcgcagtcttcaggtttcaccctcttgccctgagggcagcatcctagccctaggtggttctctggtgtggcctcagtaaaaccgtgacgaggtcctcggcctctctgtccccaacaggcggctggcacacttcggggtctgagatgccatctgccttgcctaacctgggcaagaccactcgcgtcctttcccttgaggagcagcgtggga

SEQ ID NO: 668079 - DNA, 972 bp, Homo sapiens
tgtgtaggcacttgaagaacatgtgggcactggatcggatcagtgatcaatgacaaaggttgcatagggtgcaagtggtagcagtaaaagtgaaggtctccgtgcatgagttggcagtggtagggatacatgacaaggggagtttaactgacaaacagtctgtcaggttgaaaagaatggagatttgccagagagctggctgtagattataaaatatatctcttgatttcaggggaaggaagaggggataaaaccccaccccaagcagagccttccattcttgaaagcgcttacgcaaatttaatgaatgtgtgggatagtaaatttttattctacgagtgtttatctcatgacatagacgcattcaggtgtgtagggatttaagattatagcaggattcagtaatgctatttcataaagggtgtgtgtttgtacgtgtgtgcacacatcacaccaactttaccaaaccagacccattgctgttttagattgttccatgccagcttattatggatattcaataacaagaaagtcattccacgtgagtccttctattcttaccaatacgatttgtggtcaacaccaccaaaattgattgttttatagtggtaggagaaaaataaattttttcaagtatcttttgtagtggtattttaataaattccttgcaatttcyctctcccctcaactttttattttctaaaaaggagtttctgactttttttcttacacaaatatttctgctggtgttgttattttatgaagagacattggctttaagaaaaaagccacatggcatgagttttatttcatattatgtgctttgtctgttggagtaagactcattaggcacactgtacatagcgtggtagaaggaagatggatatcgagacaaaaaaacctgagtttgaattctaccttggccacttcctgctgtggcgcttgggagaattattaacagcttcaagtgtg

SEQ ID NO: 668080 - DNA, 1314 bp, Homo sapiens
  misc_feature 315, 316, 317, 318, 319, 320, 321, 322, 323, 324, 325, 326,327, 328, 329, 330, 331, 332, 333, 334, 335, 336, 337, 338,339, 340, 341, 342, 343, 344, 345, 346, 347, 348, 349, 350,351, 352, 353, 354, 355, 356, 357, 358, 359, 360, 361: n = A,T,C or G
  misc_feature 362, 363, 364, 365, 366, 367, 368, 369, 370, 371, 372, 373,374, 375, 376, 377, 378, 379, 380, 381, 382, 383, 384, 385,386, 387, 388, 389, 390, 391, 392, 393, 394, 395, 396, 397,398, 399, 400, 401, 402, 403, 404, 405, 406, 407, 408: n = A,T,C or G
  misc_feature 409, 410, 411, 412, 413, 414: n = A,T,C or G
gcctcgccttctgtctccctgaaacaagtggagaaatacgaccctggggccaacaagtggatgatggtggcccccttgcgggatggcgtcagcaatgccgcagtggtgagtgccaagctgaagctctttgttttcggaggaaccagcatccaccgggacatggtgtccaaggtccagtgctatgacccctcggagaacaggtggacgatcaaggccgagtgcccccagccttggcggtacacagccgctgccgtcctgggcagccagatcttcatcatgggaggtgacacggaattcacagccgcctcggcctannnnnnnnnnnnnnnnnnnnnnnnnnnnnnnnnnnnnnnnnnnnnnnnnnnnnnnnnnnnnnnnnnnnnnnnnnnnnnnnnnnnnnnnnnnnnnnnnnnngtcttgaactcctgggctcaattgatcctcctgcctcaacctcccaaagcactgggattataggcatgagccaccatgcctgcccctttttaattaggtgctaaacacttggtttagtgctagattaagtatatcatataatgggtaagtaatcatagctactagccttatactaccagaagccttgccttctatgttcatattttgtgaaatatattttttccaaattagacatatttaagacttacctgctgatcaaacatcctatgttctctctggtctgactccagatcctcttctgaaagtgacaccaaagagtcaacccgttcctcaccactgaatgggtgtctgagctcttcggcatttgcagagcttacttctagagatgaggatggcttgtttccgacaccagctcctcctgtcaagccttctagactgaaactgaacatagggcacaaaagttaattcattctatttctgggtctcaaaaacaaaggaggacacaaaatccctttgggtatatctcccttgtttgtgtattatttctatgtcagctagcaaaactgtctaaaagggcatggcacaaagaatactacctacctttcccccacagatcttggaatactgagaaagaatactgcacttagattttcttaccgcattaaatttatccaaatgttgaaccacctaagatcacttctcagatttttttctatacactatatggacagaccatagttatctgatattttayatatgtgttttttccttgatctaattaatctttgtgaatctaactctactaatgccaagtaattaaatgtcacagagaaaatacgagcttaagtaactttcagaaggcaaactgggtaacttgcccttatgtccattaagtggacc

SEQ ID NO: 668081 - DNA, 1536 bp, Homo sapiens
tgtttcatttataaacttttttcccctatgtaatgaaaacagttttggcttagcacactgttctggtcaaattatgtggccaaattctgcggaaatgatgagggggcgacacacagacaaagcagcccctgggcaccgagaggctctgggctccgagaagcttgtggrtgtggggaagatgactcccgtgcagacttttcaccctgcggggtggttccacgttataccaatatttaaatggttgagtatttcagattgagcgtacaacgtataaagatacataaagttgcaatgagcagagcctaatagcttttttagactctagagagatacaaaaagacacaaatatagataaatgatcaaaaaggaataattgctctaacagccctttcccttgcagtatttaacatatattccgtttgctcccggtacacgtggttctagaatgtaaaaagtaattgcattttccattcttcttccctcttcaatatacaagcacctctagaaacctacttgtagaatattatgtaggtttctctgcttcatttagctccttttctcttaggaaaacacattatgactttgtacaagccttgatcgatttcttaagaggccttatctgattgcttttatattctattgatttttctgaattaagttttatggccctcaattattttcttgtatgattgttcacatctacgtatggtgtaccatataattacacagtggcatgattatgttctagttgataatcccattttaatatacagcactttccctttttatggagattatcttccatatgcagaccgatctgttgaattccgtgcaatgaagataaacccaaatcgcagaagcacttgctcactgtagaggccactatcacgcattgtgacatcttgacaaaagcgtttattgcaaagtgttgtgatcatcagcttcattaggaaagcgtttaacaatcataggagatgatttttataaacctgctgttctgctgactgggggataccactaccacagcacaattaagtttcaaatgggttttgaacactgatggctaatataattcagccctagcagtagactgttgcattatacaatcatttatcatttgaggggaaattctgacagtgctcaaacgttgaggcctcgattaaactgtctccttttacatagtcttctgaaaacaagcaagggctccttcaggtgatgtctgaagaagaagttaagacaaaaacaattggttgaagagaagtttaatcaatttattagacgagttgagtgctcgaagatatttttcttatgtagtacatgtctatcaaagctgtcataagtgacactgcaaatgtcggaatgctttatggcaaatagatcgctgctattgttctaggcgtttggaatcttttatgaatataaatgtatggagagagcatcacaggatctgtttgccctcctaaaataattcatattctatacagcacatggctgactgatttcctcccaacattacaaagtggttgtgttatttca

SEQ ID NO: 668082 - DNA, 1536 bp, Homo sapiens
tgtttcatttataaacttttttcccctatgtaatgaaaacagttttggcttagcacactgttctggtcaaattatgtggccaaattctgcggaaatgatgagggggcgacacacagacaaagcagcccctgggcaccgagaggctctgggctccgagaagcttgtgggtgtggggaagatgactcccgtgcagacttttcaccctgcggggyggttccacgttataccaatatttaaatggttgagtatttcagattgagcgtacaacgtataaagatacataaagttgcaatgagcagagcctaatagcttttttagactctagagagatacaaaaagacacaaatatagataaatgatcaaaaaggaataattgctctaacagccctttcccttgcagtatttaacatatattccgtttgctcccggtacacgtggttctagaatgtaaaaagtaattgcattttccattcttcttccctcttcaatatacaagcacctctagaaacctacttgtagaatattatgtaggtttctctgcttcatttagctccttttctcttaggaaaacacattatgactttgtacaagccttgatcgatttcttaagaggccttatctgattgcttttatattctattgatttttctgaattaagttttatggccctcaattattttcttgtatgattgttcacatctacgtatggtgtaccatataattacacagtggcatgattatgttctagttgataatcccattttaatatacagcactttccctttttatggagattatcttccatatgcagaccgatctgttgaattccgtgcaatgaagataaacccaaatcgcagaagcacttgctcactgtagaggccactatcacgcattgtgacatcttgacaaaagcgtttattgcaaagtgttgtgatcatcagcttcattaggaaagcgtttaacaatcataggagatgatttttataaacctgctgttctgctgactgggggataccactaccacagcacaattaagtttcaaatgggttttgaacactgatggctaatataattcagccctagcagtagactgttgcattatacaatcatttatcatttgaggggaaattctgacagtgctcaaacgttgaggcctcgattaaactgtctccttttacatagtcttctgaaaacaagcaagggctccttcaggtgatgtctgaagaagaagttaagacaaaaacaattggttgaagagaagtttaatcaatttattagacgagttgagtgctcgaagatatttttcttatgtagtacatgtctatcaaagctgtcataagtgacactgcaaatgtcggaatgctttatggcaaatagatcgctgctattgttctaggcgtttggaatcttttatgaatataaatgtatggagagagcatcacaggatctgtttgccctcctaaaataattcatattctatacagcacatggctgactgatttcctcccaacattacaaagtggttgtgttatttca

SEQ ID NO: 668083 - DNA, 1536 bp, Homo sapiens
tgtttcatttataaacttttttcccctatgtaatgaaaacagttttggcttagcacactgttctggtcaaattatgtggccaaattctgcggaaatgatgagggggcgacacacagacaaagcagcccctgggcaccgagaggctctgggctccgagaagcttgtgggtgtggggaagatgactcccgtgcagacttttcaccctgcggggtggttccacgttataccaatatttaaatggttgagtatttcagattgagcgtacaacgtataaagatacataaagttgcaatgagcagagcctaatagcttttttagactctagagagatacaaaaagacacaaatatagataaatgatcaaaaaggaataattgctctaacagccctttcccttgcagtatttaacatatattccgtttgctcccggtacacgtggttctagaatgtaaaaagtaattgcattttccattcttcttccctcttcaatatacaagcacctctagaaacctacttgtagaatattatgtaggtttctctgcttcatttagctccttttctcttaggaaaacacattatgactttgtacaagccttgatcgatttcttaagaggccttatctgattgcttttatattctattgatttttctgaattaagttttatggccctcaattattttcttgtatgattgttcacatctacgtatggtgtaccatataattacacagtggcatgattatgttctagttgataatcccattttaatatacagcactttccctttttatggagattatcttccatatgcagaccgatctgttgaattccgtgcaatgaagataaacccaaatcgcagaagcacttgctcactgtagaggccactatcacgcattgtgacatcttgacaaaagcgtttattgcaaagtgttgtgatcatcagcttcattaggaaagcgtttaacaatcataggagatgatttttataaacctgctgttctgctgactgggggataccactaccacagcacaattaagtttcaaatgggttttgaacactgatggctaatataattcagccctagcagtagactgttgcattatacaatcatttatcatttgaggggaaattctgacagtgctcaaacgttgaggcctcgattaaactgtctccttttacatagtcttctgaaaacaagcaagggctccttcaggtgatgtctgaagaagaagttaagacaaaaacaattggttgaagagaagtttaatcaatttattagacgagttgagtgctcgaagatatttttcttatgtagtacatgtctatcaaagctgtcataagtgacactgcaaatgtcggaatgctttatggcaaatagatcgctgctattgttctaggcgtttggaatcttttatgaatataaatgtatggagagagcrtcacaggatctgtttgccctcctaaaataattcatattctatacagcacatggctgactgatttcctcccaacattacaaagtggttgtgttatttca

SEQ ID NO: 668084 - DNA, 640 bp, Homo sapiens
gaaattgatatttctgcgggcctgcgtggcttcttagttccacttgcaaaagggaaagattcattgaagaaataacatattaagtcgctacaccttcgtattaatgagcttatcacagtggttctcaaatgggagattttgctcccagggacaacgggcaatgtccggagacattttttattgtcgcagctgtggaaggagggttgctactggcacctggtgggtggaggccagggaggttgctgaacatcttatgatgttcaaataaaagaaaaagaatgtttcagccycaagtgtccatagttcctaagttgagaaatcctcgatttctgtcccgaatcaaaagataggttcagcataaaaggatcaagttcctcaaggagcaaggaggaagaatataaaatgaactgaaagagaaaatcatttctaacctattctacattttggaataccagtagttccagcagagtaacttattacttctaacaagagaaaaaaggaacttcacagctattgcatttcctagagtctgcaaaacaagtactcaaaacagtagcagtcacacagtgtaataaaaacactcaggttttaactcatcaccacctggaaggcacaacaaacacctcctacgcaggtttgg

SEQ ID NO: 668085 - DNA, 619 bp, Homo sapiens
tttcgttatttacccagtagtcattcaggagcaggttgttcagtttccatgtagttctgcggttttgagtgagtttctgtttttttgtttgtttttgtttttgtttttttttgagatggagtctcactctgtcgcccaggctggagtgcagtggcgctatctcggctcactgcaagctcctcctcccaggttcatgccattctcctgcctcagcctcccaagtasctgggactagaggcgcctgccaccatgcctggctgatttttttgaatttttagtagaaacagggtttcaccatgttagccaggatggtcttgatctcctggcctcataatccgcctgcctcagcctcccaaattgctgggattacaggtgtgagccaccgtgcccggcccatcacaggtaagtttttaaaaacatatgtagggagggaaaaagaacagaataaaggaactaaggtcttccatgaggcacagagggttaagtgggagatgggattaattaactctccagccggagatggcgagtgtctcacatggccacatatttctgtggccagcacaggtgcatttaaaaggcttgggcaggatagacagtcccaaataatcactgctggagg

SEQ ID NO: 668086 - DNA, 1008 bp, Homo sapiens
tttgtggaatgagaaaatcaagaccatttggatacttcagtagtagataataatgccataatttagtatttagaatcttcatagtggcttaatttagcagctttaatttttttagaccacttcctgaattcatcttctctttttcaccatttgtaccagaacctcagggactccatctagacaggggactccccctagcatatgagaaatacactccagtccagcctctgggcctccgtctccccagtaatctcaggtgtcaatacctgaatgtgcgttccagtagctgagcccacattcctttaatcttcctctgtttttaatgaatggccctcaaaatgcatattcagtatatgctttgagccatatgaaatacmctttcaaaatgcaatattcattgccaaaagaaaaaggttgagtttaatgcatctgtacaaatagtgacagcattccctcttttatctctttccagcacaagcatgactttactgtgaaatccaggtgcagtcatgaagtcgttctctttccttactccagaaaggcagtctattaactaaagcccaagaatggagtgcatttctctgttaaccatttattaagtcaacaagctaagtaatgactacatttttctttctaatgtgcctgcagtattatgcatttagcaatattattccttgaacagatgtgtcttttcacagtcgtcttcctttcctatgaacataggatttcttcataattgtatgcctgtaagctgcaactgtttcgaaaggtgcttctgaacacacactgagatccctccatactgagagccaagtgacatgaaaaccaaaacatcatcaagaatgggagcagccagctccccacatcaagcacccaattagctcgtattctttggctaagtatactccgcagccaatccagtcacctcagtgctttgatttcagaagctttagaaatacctggagttacttgaatgtggcagtattcaaaatacaacagataaggaag

SEQ ID NO: 668087 - DNA, 682 bp, Homo sapiens
aagaaatataaaagaatgagatggaatamatatatacttaagttctaggttttcttcctccaccctctgtggaatgcttaccccacttaagaaacccctaagatttcaccgtgtcctcacagtgagattgtactcactcctcaatgagaggagctgattaatgttaaagctcttttggttttgttatcaattatgcacttgaattttcaaataatctagctgtacatattatactacagtggacgatactatgaggtaccaactggaccagctcagcagaggctgggaggtttgactcatcagtagtcatgacaccacttctctcttagacttttccagtagaatttatttttggttttgacagcaagggtgacagctctgttctctataggtatctatggtagaataagcattgttacctcgcagaagggagaagtctatggtattcgacaccaacccccaagtccttcttacacatcctctctttgagatatagggactcttgtgaaaaatggaaacccaggaactggctctgcataaacttaagcttcgtcttggcaggacaattatgagaagcctaccactgactctgaaatatgttgtatgcaataaaaactctgtactatttaggtgttgtttctgacccacgatactagaaataagcatcaactacccatacaaa

SEQ ID NO: 668088 - DNA, 682 bp, Homo sapiens
aagaaatataaaagaatgagatggaataaatatatacttaagktctaggttttcttcctccaccctctgtggaatgcttaccccacttaagaaacccctaagatttcaccgtgtcctcacagtgagattgtactcactcctcaatgagaggagctgattaatgttaaagctcttttggttttgttatcaattatgcacttgaattttcaaataatctagctgtacatattatactacagtggacgatactatgaggtaccaactggaccagctcagcagaggctgggaggtttgactcatcagtagtcatgacaccacttctctcttagacttttccagtagaatttatttttggttttgacagcaagggtgacagctctgttctctataggtatctatggtagaataagcattgttacctcgcagaagggagaagtctatggtattcgacaccaacccccaagtccttcttacacatcctctctttgagatatagggactcttgtgaaaaatggaaacccaggaactggctctgcataaacttaagcttcgtcttggcaggacaattatgagaagcctaccactgactctgaaatatgttgtatgcaataaaaactctgtactatttaggtgttgtttctgacccacgatactagaaataagcatcaactacccatacaaa

SEQ ID NO: 668089 - DNA, 682 bp, Homo sapiens
aagaaatataaaagaatgagatggaataaatatatacttaagttctaggttttcttcctccaccctctgtggaatgcttaccccacttaagaaacccctaagatttcaccgtgycctcacagtgagattgtactcactcctcaatgagaggagctgattaatgttaaagctcttttggttttgttatcaattatgcacttgaattttcaaataatctagctgtacatattatactacagtggacgatactatgaggtaccaactggaccagctcagcagaggctgggaggtttgactcatcagtagtcatgacaccacttctctcttagacttttccagtagaatttatttttggttttgacagcaagggtgacagctctgttctctataggtatctatggtagaataagcattgttacctcgcagaagggagaagtctatggtattcgacaccaacccccaagtccttcttacacatcctctctttgagatatagggactcttgtgaaaaatggaaacccaggaactggctctgcataaacttaagcttcgtcttggcaggacaattatgagaagcctaccactgactctgaaatatgttgtatgcaataaaaactctgtactatttaggtgttgtttctgacccacgatactagaaataagcatcaactacccatacaaa

SEQ ID NO: 668090 - DNA, 682 bp, Homo sapiens
aagaaatataaaagaatgagatggaataaatatatacttaagttctaggttttcttcctccaccctctgtggaatgcttaccccacttaagaaacccctaagatttcaccgtgtcctcacagtgagattgtactcactcctcaatgagaggagctgattaatgttaaagctcttttggttttgttatcaattatgcacttgaattttcaaataatctagctgtacatattatactacagtggacgatactatgaggtaccaactggaccagctcagcagaggctgggaggtttgactcatcagtagtcatgacaccacttctctcttagacttttccagtagaatttatttttggttttgacagcaagggtgacagctctgttctctataggtatctatggtagaataagcattrttacctcgcagaagggagaagtctatggtattcgacaccaacccccaagtccttcttacacatcctctctttgagatatagggactcttgtgaaaaatggaaacccaggaactggctctgcataaacttaagcttcgtcttggcaggacaattatgagaagcctaccactgactctgaaatatgttgtatgcaataaaaactctgtactatttaggtgttgtttctgacccacgatactagaaataagcatcaactacccatacaaa

SEQ ID NO: 668091 - DNA, 682 bp, Homo sapiens
aagaaatataaaagaatgagatggaataaatatatacttaagttctaggttttcttcctccaccctctgtggaatgcttaccccacttaagaaacccctaagatttcaccgtgtcctcacagtgagattgtactcactcctcaatgagaggagctgattaatgttaaagctcttttggttttgttatcaattatgcacttgaattttcaaataatctagctgtacatattatactacagtggacgatactatgaggtaccaactggaccagctcagcagaggctgggaggtttgactcatcagtagtcatgacaccacttctctcttagacttttccagtagaatttatttttggttttgacagcaagggtgacagctctgttctctataggtatctatggtagaataagcattgttacctcgcagaagggagaagtctatggtattygacaccaacccccaagtccttcttacacatcctctctttgagatatagggactcttgtgaaaaatggaaacccaggaactggctctgcataaacttaagcttcgtcttggcaggacaattatgagaagcctaccactgactctgaaatatgttgtatgcaataaaaactctgtactatttaggtgttgtttctgacccacgatactagaaataagcatcaactacccatacaaa

SEQ ID NO: 668092 - DNA, 878 bp, Homo sapiens
gttattttacaatgcctatttatttatatagtggctctgctgattttgatgtatatcctaaacttaatattttctttaaaggatgttttatacaactttatgtaaaatgtttcagtatcttcacrttatttccctgtccttttgttttgctcttatatggtgttcttgagtcttttctctggcttttcaaacctggtaagactaagacactaaaggaactttgcccgtggttttgtaatgccttccaaagcacatcttaagctctggtgcatacaggggtctcctttgagctctgtgcttttgagatcccatatacctaaattccagtactccaaatcagtactgctcagttttagtgactaagtttaaaaaggtattttaatagcaagttagtttagtgcactcttgcttctttcttgactgcttgtatacatgtatattcctttaaatgaatcttggaatttatttaaaaattttaaattatactaatgaaactgtacattgttgtgaattcataagtgaatttggaaagaatttgtctttatgatactaaatcttttttacccaagaatcatatgtgtctttatatttattccagtctatatttatatcactgagtaaatatatagaaatgtagatacatacagctgtagttatagatacaaatatagatataacatgttaaatctatatctatcccatataacatatatacatgttatatgtgtgtgtgtatatatacatattattatgttattaaagagctcccttaaaatttttcttttatttcccatataattttaggtcgagcttgaattttccttgtataaacaagcaaatgttatactagttttaatactgatgtttagacattgtat

SEQ ID NO: 668093 - DNA, 648 bp, Homo sapiens
tgaacgcccctctattttgttctcctggagtgcttgttgggtcacgtggcatctttctttagaaaagagactctctcttgttgttttaaacaatacaaaaacacgctcaggtgccaatgggaaaatttgttggtgaggaaacaatttattattttaaatggcatttcttagagagttattggcctttttctgatctttcttgaagaaactgcatttctctttctcccatggactaattcaagagaaatgaatttgtaagctcagrgcagtcattccctttggaagcttcctggctttaaagatgtctattgtatgagaatcacagacttcagagttctggggggcgtcatcaggaaaaataatggcagtgtggtggccagagtgtgagacacaaatgcagattgccaaactacatgacagcttctaggacacttcccagacttcattttgaagatcatttagaattatgtgtgaggcttactctctccttagggtttgggcagacgcaaaaatgtggaatgagaggcttcatttttttgtctgtatgtctgattgaattagttaatcaaatttactccctgatttggaatcttgtaaacacagcctgtttatcccaaaggtactttgactgactggcattgaccttta

SEQ ID NO: 668094 - DNA, 648 bp, Homo sapiens
tgaacgcccctctattttgttctcctggagtgcttgttgggtcacgtggcatctttctttagaaaagagactctctcttgttgttttaaacaatacaaaaacacgctcaggtgccaatgggaaaatttgttggtgaggaaacaatttattattttaaatggcatttcttagagagttattggcctttttctgatctttcttgaagaaactgcatttctctttctcccatggactaattcaagagaaatgaatttgtaagctcagggcagtcattccctttggaagcttcctggctttaaagatgtctattgtatgagaatcacagacttcagagttctrgggggcgtcatcaggaaaaataatggcagtgtggtggccagagtgtgagacacaaatgcagattgccaaactacatgacagcttctaggacacttcccagacttcattttgaagatcatttagaattatgtgtgaggcttactctctccttagggtttgggcagacgcaaaaatgtggaatgagaggcttcatttttttgtctgtatgtctgattgaattagttaatcaaatttactccctgatttggaatcttgtaaacacagcctgtttatcccaaaggtactttgactgactggcattgaccttta

SEQ ID NO: 668095 - DNA, 603 bp, Homo sapiens
agcagaattatctgtgtggttgccggactttggagggaccattgcttcaaccctaagagtgcccagagatccaaatcagggctgaatccactgcctgaagaacccatagttcctggacagaaatgaggggagaagggagatgctggtttgcatttcagcctggacagcaagcaaacctcagctaggtaagagagttattagagaaatctcagaagattctggttgctacagagacgtctcaaacagagtttccaatctttccaactcctaggccctcccacatcctccagaccctctgagatcaaaggcagaaactttcctctccctcttcctgcctcttctctccagggytgctacaggtttccaggacccttaatctgaacacgcaaccagagggaccacagggcctcctggaatcctttaagtgtgaaagctgccgtggcattcggcaatcagctcaaagccaccgacataaggtgcttcaactgtgagggactctatggcctcatgatcaatataacatctacactgccattagcctctacaggagggtgtcaggtaccatgtggtggacatagcatcgttaacaaacgatttcattta

SEQ ID NO: 668096 - DNA, 2929 bp, Homo sapiens
aaggaaaccatgcggagggagaaccggctgacattggcatggagtggaagtgggggattttggagagggggccagtggaaactggtgccaggacagtgtgccactggcaaccatagaaatgtgttggcgaagagatgctgattgaatgaagggagaagggagaggaacagtgggtttctttctttttttctttttctttttttttttttttttggtcttcaccatttccaatattgggagaacatgccaggagagatttttctatccaccactggagatattattattcaggatgatggaactgtagattgcagaatgatcaaaaccagtttgtaactgaaaccaggtgagaaaatgagcattcaagggagtggaggacggagaaaaaacagaatggacgcttgattgaggcttgagaaaatggtggcataagtggagccgagcttttcagcctcagcaatgctgacattttgcgatgcctcattcttcattttcaagggctgtctcatgcatcctaggatgctgagcagcatcccaggcctctacccctgctccccactcatgacaatgaaaactgtctgcagacattggcaaatgtcctttgagaggaaaaacagcccccagtagagacccatgggttagaggtaatattgatatttattagacatttataatatgccaggtactgttctaagtcctctataggtattaatgtatttaattctcaaaactatatttttaatcactgtattactattattctccattattcccaaataaggaaaccaagactcaggagtgatgtaatttttcaaagtttccaccactaaaacgtggcagcttcaggcagtttgactccaaggcccatgtttttttaccaaaaggctctactgcctttttgtggcaagaggattcatatgcaaaagcactttgaagacaccacagggggactgcggagagggtactgggggcatggaggagaccccaaagcatcaggcctaaggcactaaaagaaggctcatactacctaagaaacagggaccccagagagaggggctgggggaagacaatgaattttgttttggatcagtaaaggttttagggtgaccacactgaaagcagcagtgaagaagcagagaaaacagaacttcctgatgtcagggaagacaggaagtattgtgtgacagcaaagtccgtaatgaagagacagattgggtcaggacaaaggcagttgtagctgtaaagaacaaaacaaagtcccctctgaagcatccagcaaacaaaagatagacatgagtgtttatactggaaagagaatgattatggacctttacatcaaagaatgatgatttctcagcaaagtgtgatgacaccatcaactgagaccaggactatggaggagagaatgctcagagagcccatgttttgagagtggggtgggtgcttgtgaacaaaggctggtcatgccgtcattcgtgatgatgggctctggaagaaaggattctgacgactttttttttttttatctgcccttagtagtgtgagtgacagaacactaaaagcagatatgcctgcaagtgggtgggtcagtactggagaagctgaattccagttcgaggaaacagagtggcaggggagggaaggaagggaagcaacaaggaattctaagcccaggagaaggaagcattagagaattccacactgagaggtaaggtcagtgatgtaagtgaagtggaggaagcaaagcctgaagtcacaaggagagaggatccagatcttatgggaggggtgagagagataccatagggaagaaatgctgctggacacctggacaaagaggcaatgtggaagaattggagggcacatttttgccggtaagtggttgatctgcaatggaaatgtgcaagaatccataaatccaacatattaaaaaagttaatttagtgtatattttgaaatatgtaggagaaaatgtaacaaagtgcaaaaatgttgaccattttaactgaataactaaataaacacttgttttattaaaattagactaagttctttccctctgggcaatctgggcaatccacttacaatgaaaaatctaagagtagttatttccacagcatgaggagctgtgtgcataaaattagagggttgagagcatttatttaatcaacccaccacatcttctagaaacgtaggtccagcggaatggcagacaagaatcactggagtcccaagaagtcagaggctgtcttcctcccttagagtggaggttgcaggcagcacggctcaggcacatatgagacaaaggaacgggtgtgagagaggtggtgggagggtctggaagagcaattctcagacttggctgtacattagaaccacctgagcagcatttcaaatatgctggtccctaagacagaaatcagaatcagtgcccttatgaatataccctaaagttcttataccctgtgaagaaatggtttttcatttgtattctcagattctgtctctctcatacatacacacacacacacacacacacacacacacacacacgtgcacgaagctggctcttccacacagtgarcggcagggagcatggctttgcttggcagctgcttcttcttccagctgcatctgggcttgaacccaactgcaccgaggaaccaggcgggagcagagggaggctcacgctcttcttgtctccacatctacttcatgcccacccctgattccagtaccaaagtgagatcaagacccaatgccttaaatatataccatcccttctcccatggaaacagaagggcttcacaaagatcaatatatccaccagcctgcagttattcaattcagattttagaaaattgcattcgttttgtataaaagtaaccctgaattgcctatgctacaagtaggcaccgtactacaaata

SEQ ID NO: 668097 - DNA, 698 bp, Homo sapiens
  misc_feature 2, 3, 4, 5, 6, 7, 8, 9, 10, 11, 12, 13, 14, 15, 16, 17, 18,19, 20, 21, 22, 23, 24, 25, 26, 27, 28, 29, 30, 31, 32,33, 34, 35, 36, 37, 38, 39, 40, 41, 42, 43, 44, 45, 46,47, 48, 49, 50, 51, 52, 53, 54, 55, 56, 57, 58, 59, 60,61: n = A,T,C or G
  misc_feature 62, 63, 64, 65, 66, 67, 68, 69, 70, 71, 72, 73, 74, 75, 76,77, 78, 79, 80, 81, 82, 83, 84, 85, 86, 87, 88, 89, 90,91, 92, 93, 94, 95, 96, 97, 98, 99, 100, 101: n = A,T,C or G
tnnnnnnnnnnnnnnnnnnnnnnnnnnnnnnnnnnnnnnnnnnnnnnnnnnnnnnnnnnnnnnnnnnnnnnnnnnnnnnnnnnnnnnnnnnnnnnnnnnnntcaggaaccagatggtgtatattatttggggctaaattgttatgccatgacaaaatgattttttctttttaaaatatttatttaaattttgtaataaaaagagaaatcaaataaatcttgatcttggtcatttcctgtggtccttcatcctgtattacattaagatgtaatgatacctgaagcatcctctttctgaaaccaccattcattatgtaattacaggtctgcaaggtaccagccttaagccagcataaggcgtaaaatgagtgagcctagactcygcctgcaacatgttactgtacacctcatgaagaaccctggaagtatgtttagaagtaaaatattttaatgcaatttagtttagactatatttctttcattctgccttcctatcacacgtcccttcatgtagggtggatcaggtccatttgggattcagctaaggggaggtagagacggcaataccattggtttgtgttcagggggatataattgggtgtgtcacagtcatgttcatgtatagctcagttgttgtcatctatttcagcatatcatttcctttagcacacagcactggatatatatgagttgtaaaga

SEQ ID NO: 668098 - DNA, 635 bp, Homo sapiens
agaggcaaaaagagggatcattgcggtgatggggctggtctgtattttgactgtagtggtagatgtagaagcctacgtatgtgacaaaactgcatagaaataaatacacatatacacacacacaaacacgtgttcacacacacacaggagcagaagtcaaactggaaaaatctaaactggattggtagattgtatcaatgtcaatatcttgctactgaaattgttctatagttttgcaatatattactattgaaggaagccgggtaaagagtacaaargatctcttcatggtatttcttacaactgtgtgtaaacctacaattatttaaaatatgtatttttttaatctaattacatacagtcattgcaatggccaagaatggatactaggagaagagtcaaggggcttttttagttgttcagtggaaaaatggtgatagcttaaacctagaggttgaagaaatggggacaaattaatacattcaatcatgatttaggatgaaaaatatatttggtttagtaatttgggagctggaatgagagagagaattatcaggagctgccctaatttcttaaaatatagcattaaaagttttctcaccttcatgattttgcctaggatctcattgaaaaac

SEQ ID NO: 668099 - DNA, 599 bp, Homo sapiens
ggctggagtgcagtggcacaatctcagctcactgcaatctctrcctctcaagttcaagtgattctcctgcctcagcctcccaagtagctgggacaagaggcgcacaccaccatgcctggctaatttttgtatttttattagagacaaggttttgccatgttgccccatctggtctcaaactcctggcctgaagtgatccacccgcctcagtctcccaaagtgctgggattacaggtgtgagccactgtgcctggctgctgttaatttttttggcaaaatgagttttgccaaactcattttactgctagagagttttcttttttttacgtctttctataatatctgacttttttacatgaatataaacttcctttatactcaaagggaaaataatcaataatcctatttttatttttcaaaagagaaaaataaaggagggaaaagtctaatagaatgaaagtagataagagttgctcccaggccagggagctggaactaaccagaaggactagttcggaaatggcccaggctgagtgagataccagctccctaaacagcctctgacaagaggaaaggcagccatgcacatgagcaacttt

SEQ ID NO: 668100 - DNA, 599 bp, Homo sapiens
ggctggagtgcagtggcacaatctcagctcactgcaatctctacctctcaagttcaagtgattctcctgcctcagcctcccaagtagctgggacaagaggcgcacaccaccatgcctggctaatttttgtatttttattagagacaaggttttgccatgttgccccatctggtctcaaactcctggcctgaagtgatccacccgcctcagtctcccaaagtgctgggattacaggtgtgagccactgtgcctggctgctgttaatttttttggcaaaatgagttttgccaaactcattttactgcyagagagttttcttttttttacgtctttctataatatctgacttttttacatgaatataaacttcctttatactcaaagggaaaataatcaataatcctatttttatttttcaaaagagaaaaataaaggagggaaaagtctaatagaatgaaagtagataagagttgctcccaggccagggagctggaactaaccagaaggactagttcggaaatggcccaggctgagtgagataccagctccctaaacagcctctgacaagaggaaaggcagccatgcacatgagcaacttt

SEQ ID NO: 668101 - DNA, 599 bp, Homo sapiens
ggctggagtgcagtggcacaatctcagctcactgcaatctctacctctcaagttcaagtgattctcctgcctcagcctcccaagtagctgggacaagaggcgcacaccaccatgcctggctaatttttgtatttttattagagacaaggttttgccatgttgccccatctggtctcaaactcctggcctgaagtgatccacccgcctcagtctcccaaagtgctgggattacaggtgtgagccactgtgcctggctgctgttaatttttttggcaaaatgagttttgccaaactcattttactgctagagagttttctyttttttacgtctttctataatatctgacttttttacatgaatataaacttcctttatactcaaagggaaaataatcaataatcctatttttatttttcaaaagagaaaaataaaggagggaaaagtctaatagaatgaaagtagataagagttgctcccaggccagggagctggaactaaccagaaggactagttcggaaatggcccaggctgagtgagataccagctccctaaacagcctctgacaagaggaaaggcagccatgcacatgagcaacttt

SEQ ID NO: 668102 - DNA, 593 bp, Homo sapiens
ttccaaatgtgacaaggccgacagatgaggaaatgagtgacttgggagcttggcaagtggcaggaggcctgaaatctctggtgtcttggaaaatgacgcccccattgccaacctcatttacagagctattgtgtacagggccccgcagcaagcccttcgtgtgctatctcatttattgatcacagccaccctcttatttcacccattttgcagatgagaaaactgagtcacacataggtccagcaacttgcctaaaattgcacggctagtaagtagcagatccagcgcttaaagccagctgtctgacttgagaggcccctctcttggccatgatggtattaattcctcttctttcaattcattccttctcccttaacaaatgaaagggcagctttgagctcctctaccacagtctcgaagcactgcaggaaaggtccactgcagtgtccctracagtggtcagcaacctcggttatactctcccagtgacgaggggctcactgtctcttaaggctatgctgcctctaatcttggacagtttgcaaggttggccagtctttcttctattaagccaaaagttgggtccctgcaag

SEQ ID NO: 668103 - DNA, 1528 bp, Homo sapiens
tgtcccttcctggtcactaaaacaccatctgggaggaggaaagaactcacattccaccctggggaaggctgacaagacctggagagggaagtgactgtgagaaccctgcacgatgacacttccaggctggccctgctgtgggcctgttaccagtatctgttgtgaaagtcactacaaactccatcaggtgaaactggaatctgcgttccttcagtccattgagttttggttaggacctactctgtcttccacagaaactcagtccagtggtaagaaatgctcacagtcaatgactgcacagttggatatgccagtggagtgcagagaacgaaggaccaggtctcactgtgtcttttattttctgtattttgatgttttggcacctggggcctgccctcccagggttagccaactcctagacagagtaaaggatctcacctgggactgtgcttttcagatgcaaaccaaccaacccagatcccacacccccaaccatccaaccttctcacacgcaggccactgtccatctgccctaattaccagagagcaaggcacagctcctatgcctcagagcccactgaaatgattcacactagccagtctttagcctgcttaccctcccctccccatttcttcctgtggaaaccacagcaaaggccctggaccacagttccctgccattccttttgcttcctgatcaaccctggggcttccccatgtggccctgcgtggtggggggctccctcctcttgggaactctgagtaacaaactaccttttcaatggcaatcatctcctgatcttttggccccaacagaaccagtgcagggaagtgatttcttttccctggtgcctcggaaatgagaaaagaacttgtcttgaaaagaggtggacctgggtttgaattccagcataacactcactacagaatgctgctggtgtataaatcttttccaggattcagcagaatgaatactccagggaagatgaatgggcctgcgcctgggatctgggccttttttcttttcaaagaaaactgaagagcactgaaaatgtcccagagggtctgccttcagagctgggcacaccagtcctcttcctccctcccttctcaaatctctgcctctactcaatcagtccaaagctctttcccgcccttctaggccgcaggtgcagccagtatcccagccagcactgtccctctgctcaatcctctgtgttctgtcagggtgaggacgcacagctacttctgctcaaccctcttgggaccgcacctgcatgacctgcccaacccccaaatccaggctcaacaaaatttctgcgaagacctccagtgtacttcctgtgccctttgsaggttccttatgggctcccggagtctgaggagcctgtgtgtctgtcacctgggagcaggaaagccagagagcagggcaggggacaaggaccgcctcccttacaaagtggagcttcagagggtgccattatctctagttgcttggtgcattaacttaaaatcacaatagagaaat

SEQ ID NO: 668104 - DNA, 967 bp, Homo sapiens
tgtatttttggttaagatggggtttcaccatgttggccaggctggtcttgaactcttgacctcaggtgatccacccgcctcggcctcccaaagtgctaggattacaggtgtgagccaccgtgcctggccacagaaattttacagttttaaatgcttacatttaaaaagtaaataggtttgaaatcagtgatctaaaattccacattaagatgaaaaaattaaaatgtaaacagaaggaaagaatagtgagtagaaatcaatgacatataaaacagtcracttaaaaaattaaaatgccaaaagttgattctttgaaaatattgacaaattggacattgttcaggttttattcaggaaagcagagccttaatgagtgttactggatgagagagtaagattaggagctataccttatataatagtgggaagagctagagaagtgaaggttcagaagtcctcctgaagcattggtgctagatgacaaattggagcctaaagagataattggcaatccaatactactttactcttgcaagaatggccataatcaaaaaatcaaaaaatagtagatgttggcgtggatgtggtgaacagggaacacttctacactgctggtggaaatgggaactagtacagccactgtggaaaacagtgtggagattccttaaagaactaaaagtagaaccaccatttgatccagcaatcccactactgggtatctaccccagaggaaaagaagtcattattcgaaaaagatacttgcacacacatgtttatagcagcacaattcgcaattgcaaaaatgtggaaccaacccaaatgcccatcagtcaacaagcagttaaagaaaccgtggtatatttatatacaatggaatagtagtcagccataaaaaggaatgagttaatggcatttgcagcaacctggatgagattggagagtattattctaagtgaagtaactcagg

SEQ ID NO: 668105 - DNA, 967 bp, Homo sapiens
tgtatttttggttaagatggggtttcaccatgttggccaggctggtcttgaactcttgacctcaggtgatccacccgcctcggcctcccaaagtgctaggattacaggtgtgagccaccgtgcctggccacagaaattttacagttttaaatgcttacatttaaaaagtaaataggtttgaaatcagtgatctaaaattccacattaagatgaaaaaattaaaatgtaaacagaaggaaagaatagtgagtagaaatcaatgacatataaaacagtcaacttaaaaaattaaaatgccaraagttgattctttgaaaatattgacaaattggacattgttcaggttttattcaggaaagcagagccttaatgagtgttactggatgagagagtaagattaggagctataccttatataatagtgggaagagctagagaagtgaaggttcagaagtcctcctgaagcattggtgctagatgacaaattggagcctaaagagataattggcaatccaatactactttactcttgcaagaatggccataatcaaaaaatcaaaaaatagtagatgttggcgtggatgtggtgaacagggaacacttctacactgctggtggaaatgggaactagtacagccactgtggaaaacagtgtggagattccttaaagaactaaaagtagaaccaccatttgatccagcaatcccactactgggtatctaccccagaggaaaagaagtcattattcgaaaaagatacttgcacacacatgtttatagcagcacaattcgcaattgcaaaaatgtggaaccaacccaaatgcccatcagtcaacaagcagttaaagaaaccgtggtatatttatatacaatggaatagtagtcagccataaaaaggaatgagttaatggcatttgcagcaacctggatgagattggagagtattattctaagtgaagtaactcagg

SEQ ID NO: 668106 - DNA, 967 bp, Homo sapiens
tgtatttttggttaagatggggtttcaccatgttggccaggctggtcttgaactcttgacctcaggtgatccacccgcctcggcctcccaaagtgctaggattacaggtgtgagccaccgtgcctggccacagaaattttacagttttaaatgcttacatttaaaaagtaaataggtttgaaatcagtgatctaaaattccacattaagatgaaaaaattaaaatgtaaacagaaggaaagaatagtgagtagaaatcaatgacatataaaacagtcaacttaaaaaattaaaatgccaaaagttgattctttgaaaatattgacaaattggacattgttcaggttttattcaggaaagcagagccttaatgagtgttactggatgagagagtaagattaggagctataccttatataatagtgggaagagctagagaagtgaaggttcagaagtcctcctgaagcattggtgctagatgacaaattggagcctaaagagataattggcaatccaatactactttactcttgcaagaatggccataatcaaaaaatcaaaaaatagtagatgttggcgtggatgtggtgaacagggaacacttctacactgctggtggaaatgggaactagtacagccactgtggaaaacagtgtggagattccttaaagaactaaaagtagaaccaccatttgatccagcaatcccactactgggtatctaccccagaggaaaagaagtcattattygaaaaagatacttgcacacacatgtttatagcagcacaattcgcaattgcaaaaatgtggaaccaacccaaatgcccatcagtcaacaagcagttaaagaaaccgtggtatatttatatacaatggaatagtagtcagccataaaaaggaatgagttaatggcatttgcagcaacctggatgagattggagagtattattctaagtgaagtaactcagg

SEQ ID NO: 668107 - DNA, 1508 bp, Homo sapiens
attttaattatttctcatcataatttatacgtcatgtctatgtgcaaattgtagtattttattgaccatttttcattttcctttcatcactctatatacctcattttcacacagctcataataattttatattatgtgttccataatataaaatgggatacatttactattaattacaatatttacattgaaatatggtaggagaaacaatatagcattctgtatatctctgtttctttcaagttacaaattttgtttctgggaactataaagcattcttaatttcattataggtaggtcaatagctattcttgttcccrtcttatagatgaggaaaactgagactcataatggtcaagcgacttactcagatcatatagctaagtgcagagacaggaattgaaataaagtcttccaaatctaaattcactgcccttttaatttcttcatgctgccacctaaagtatacctcaggtacattggtgcctcattcattcttctttggcttgcattgcgggcaattaacttttggagggaattcagaggggttgctgcagacaattgctatagcggcaattggtcatagactcttagctttgtgacagctcaagtcaatgacaggcacagtaccatgaaataatttctgcagtcttttagaataaggaaacttcccctgaacttcagggaccacaggggatcccacaaagattcattccatgttaggatcagtctgctggcctctggagcagcagaaccaatagttattacctgcctctctgcttcagttgagaggactagctctgcttgttctactaccgtgacagtaatattaactccaggttccatttgtgtctcaacccccagctctcaatccagcaggagtctgggcacatgaatactgattctgcacattggattctgagtaattcttaactttttcaaattaagaataatatcataaacttaaaataattatatgtatcagtggctgagccacccagtgagtctgcagtgtgtaaaaaggtagaaatggcagatctcttggagatttgattcccaaccaacatcagtcaatccttttaagcagtgagtaatttataaatatcaccaaaagtggaaactgtttaattagaagttctagatagaagagaaagatttgaaagatataagtcccagccaggtgtttgaacccaaatcaatgaccgcactgtataaaggccctaagaaataatgaactgcctttaatcttgcctttcaggttgttgatctgaatatatctcaagtgaaaaaggcattttaattttttaatttttctcttttcagagttctttagaagaataaaatggttcagcttttatataaaggctcagggaattttgaaagagagaaaatatcaatacattctttgtttttattcctaagaaaaataagttgcctttagatcaaggacatgaaagtagctcagattagctaataaaatataccataaaatattcgtttccaaacta

SEQ ID NO: 668108 - DNA, 1191 bp, Homo sapiens
gtcttgaaaacagtgaactgaccaggaaaagtatgttgattcaaacctcttacagcatcctggttacctttctatttttgttccatcacagtgacaggcgatttgaggtgatgataaatccacgcatttaaagccttgattgcctgaataaatagattggatagcttcagtaattggataattaaagcagaagctgagaaaggatggctggagatttctttcttttttttttaagccgaaaccaaagctgtgggagtagaaaaggttaaaaccaaaaaacaatgcatattcacatcaaaaggygggtgcaagggaaaggggatagaattccactgaactgagattcaaatgtcaaaggaagacacatttgaactttgtctcccaaagcatgttggtcctccgctcaggattctaggttgggccacacaggagaccagagactggagcccctcttctgaataagcgctcttcccactgcctggcccaccccacttcccacacacacaggcacgtatagatgtacgcgctaatggacgcacgcatgagtgcgcatccctctgctttgccctttattttcatctttccatttctctccgatttttattgccctttcaacatagtgcttgaagcctgtggttggactcccaaatctgtaaaaagctaccagagagggaattcactaaggcactcctcctgtctgtacacccaagggagcaggaaagaaagcagggccaaggtgcaggcacatccttgtttccagatggtggaaaccagcctcatagagagagtcatgcacccaggaccccactgccagacaaggaagttaagctgttttctctgcttgtggagagtcagatgagcctctctcctggagccaggcatgcccaaccagcaccagatcactgcacagagccccacctccttcaagcctcgcatctgggagtggcccatccgctccagctgctagccaccctcatgtcatgcggtctatcatccccatgcacaccagcctgcactggaggtggttaagtggtggccatgcaagaactcggtcaccgccctccagccgcaccagcagttgttgtgttgtgtgcttactatgcactgcctaagctccaatctcagcaggcagttgtgttgagtgctcactatgtcggacgctgtgctaagcacatcctcgatgtcttggcc

SEQ ID NO: 668109 - DNA, 649 bp, Homo sapiens
caccacatccacatcagcacagtgttgggggtgagggagacacaggaatcccagtttgcaagaacccaacagagaagagaccactccagggaaagacttgacaccagttggccttttacacctggaaagtcttccctcaggctctaccctgcacagagcaatccttggagactctatgctttttttctcataagtaagaccatttccttacaggagagtaattcagcattggaaagctagttgcagtgccctgtgactgktttaactgagtgtttcccttttgcatgaattgctctggcattatttaagcccagtcataatattgtggttcaccggaagctaaaaagaggcctgtgtaggttgatcaaatcatgatctaatgaaaatggatggctggctcttccaaaggagtatgaatatgggccacctctgggcaacttagccctagaaccttgctatgcaaacactgtttcagagaaatcatttttcaagtttttttttttttaattttcttcatgacatctggactaaatccagcagtgttgctctgtgactttttccaacatatacagagaaccccatgtggctgtcctctaacactccattctccactacccccacctcagccaggtttgtcaacagacactta

SEQ ID NO: 668110 - DNA, 438 bp, Homo sapiens
gttttccagccctcactcagtcatcaccaattgttcacctattttagcttaaaaatgtttaaaagtgtttggtttaaaaaagtttaaaagtgtttagttctgcctgcctaaartgatagcttgtttgtgtcttaaagcagacattgcctgtctttagattttgcaacagttttaatttctccatgataccagccctccaaagagttccaaaaagtcataaatttgaaattgatctggccctttttgtgttgtaagactgagaatgaaaacttcttttatttctcaacatcccaatgtagaagctggaagtcatatttatttatttttaaatgttaagccaattttgaattactggaaagtacaacttattaatgatacattgtttaaataacactaaatgctgtgtgctaagactttcttaagattatagtttctctg

SEQ ID NO: 668111 - DNA, 438 bp, Homo sapiens
gttttccagccctcactcagtcatcaccaattgttcacctattttagcttaaaaatgtttaaaagtgtttggtttaaaaaagtttaaaagtgtttagttctgcctgcctaaaatgatagcttgtttgtgtcttaaagcagacattgcctgtctttagattttgcaacagttttaatttctccatgataccagccctccaamgagttccaaaaagtcataaatttgaaattgatctggccctttttgtgttgtaagactgagaatgaaaacttcttttatttctcaacatcccaatgtagaagctggaagtcatatttatttatttttaaatgttaagccaattttgaattactggaaagtacaacttattaatgatacattgtttaaataacactaaatgctgtgtgctaagactttcttaagattatagtttctctg

SEQ ID NO: 668112 - DNA, 438 bp, Homo sapiens
gttttccagccctcactcagtcatcaccaattgttcacctattttagcttaaaaatgtttaaaagtgtttggtttaaaaaagtttaaaagtgtttagttctgcctgcctaaaatgatagcttgtttgtgtcttaaagcagacattgcctgtctttagattttgcaacagttttaatttctccatgataccagccctccaaagagttccaaaaagtcataaatttgaaattgatctggccctttttgtrttgtaagactgagaatgaaaacttcttttatttctcaacatcccaatgtagaagctggaagtcatatttatttatttttaaatgttaagccaattttgaattactggaaagtacaacttattaatgatacattgtttaaataacactaaatgctgtgtgctaagactttcttaagattatagtttctctg

SEQ ID NO: 668113 - DNA, 1729 bp, Homo sapiens
tcccagctactcaggaggctgaggcaggagaatcacttgaacctgggagatggaagttgcagtgagcctagatcctgccactgcactccagcctgggcgacagagtgagactctgtccccaaaaaaataaataaataaaagatgttcacaatatattgttaagtgaaaaaagcaggctacataacttgcataatatgagtgcattttaataaaaatatacatatttagcaaaataaaaggacaaatggtatttattaaaatatttacgttgattatttcaacacagaggatgatagttgattttgcttaatttcttccctccttcttttcaatttgaattttctataatgaagattgtttctttttctttctttcttttttttttttgagatggagtttcgctcttgttgcccaggctggggtgcgatggcgccatctcggttcaccacaacctctgcgtcccaggtttaagtgattcttctgcctcagcctccctagtagctgggattataggcgtgtgccaccacacccggctgattttgtatttttagtagagacgggctttctccatgttggtcaggctggtctcgaactcctgaccttaggtgatctgcccacctcagcctcccaaagtgctgggattacaggcatgagccaccgcgcctggactgattattttttaaatagggttagaaagtgaggaagttactaaactccgattagcccaaatatgccccagtgggtccttctggcagagtaaatgtctcggttcagcctgaatctgggaaattgttcctacggttcagcctgaatctgggaaattgttcctaccttataaactggagtatccttcagaaatgacatttactcaaacttccttttaggcagactgcataatagcaatttttaatattaaccatttaaaaaaaaccttcagattaattaacaccaaaagaataattgggaaaatacaactcctcactttaaaaaagaaacaaccaaagtaaatactaaaaaactatatgatgttatattatctaagcttagtttactgcaaagatcaagagcacactactagttgacggcctctattcacactgttcatagccctcgctcgcttctccagccattcactcactcatgcaaaaggtctgtacacacaatgatgcctgatggtataataggaaccttaacatttcaattaaaaggcaaaatgaggacacttaccatcagcctataaaattattcttattattcttcttcttcttctcctcctcctcctcctcttcttccttcttcttcttcttcttcttctccttctccttctccttctccttctccttctccttctccttctccttctccttcttcttcttcctcttcttcttcttcttcttcttcttttttttttgagatggagtcttgctctgttgcccaggctggagtgcagtggtgtgatctcggctcactgcaacctctgcctcccaggttcaagctattctcctgcctcagcctcccaagtaactgggattacaggtgcatgccaccacgcccrgataattttttgtatttttactagggatggggtttcaccatgttggccaggctagtctctaactcctgacctcaagtgatccacctgcctcggcctcccaaagtgctgggtgtgggcggcaagccacccaggtgccaaggcaagagacagagggcacgagctgttccagtataa

SEQ ID NO: 668114 - DNA, 592 bp, Homo sapiens
ttagagtattctcctctatcttatcaatcatggtacctatccatgggcattcatagactagttaataagaaaaaatattgggaggctgaggtgggaggatcacctgaggtcaggagtttgagaccagcctggtcaacatggggaaaccccatctctactaaaaatacaaaaattagccaggyacgttggcatgcacccataatcccagctactcaagaggctgaggcagaagaattgcttgaacccaggaggcagaggttgcagtgagctgagatcacgccactgcactccagcctgggtgacagagtgagactccatctcaaaaaaaaaaaatatatatatatatatatacgtatatatatacacatatgtatgcgtgtgtatatatatgtatatatatatatatagccctcacagtgcctttaagtcactcagagagtcactttcaatcaagagaaaactaacagaatgcaagcgatgaaagcgatgagggataaggcatccaggaataaaagatagagagactgtcactcatggacaggcaggacgcttttgcctgcctatcaattgaaggctcactttggcttgtttt

SEQ ID NO: 668115 - DNA, 778 bp, Homo sapiens
tgtggaggatggattttaaggggtgacaatctcaattctcaagagaaaaaccaattaagatcctttggaaatggtccatataggaggaattgataatatgacattggtaagtggagataggggtggaaaggaaaagaccaatttaagaaatatttagatgatacgttctgtagaacttggtgaccatgtaagtgtggggattgcagaaatggctccctgatgtgaacagaaaggagcatcctgaactgagataggaaatctaaaaggagaaaggaaaggcccaggggccaaaataagctcggttcttgatagtccaatgggaatgcttggcagatcctacatctatcattgcttatgacaaaatatattgaatcaatgggtttacatggcttaccctcctgcctgactaaaagtcaaatggcaaggtcatgccttattcatcttgtatcctcagggctggctaccccacccgagctctgggagasgtctgcctgcagcacaggtgacaggaaagccatcgatggttgagatctcgcagggagagtagaggagactgagaaaagcagtgacatgcaagaaaaagacattcacacctggggtgagaatttgagaagtaagtggcctggtggccttgcattgtctgtggctcttccatgggccctgtgaaaggccacctcaatgcaggcctgcagccctgtcagtgtccaggcaagtcattccctttgtatgcttttaatatctacatgaaggctcctagtgattgtgcagaagtcatctc

SEQ ID NO: 668116 - DNA, 1629 bp, Homo sapiens
atcgcaagaacaaaaaatcaaacaccgcatattctcactcataggtgggaattgaacaatgagatcacatggacacaggaaggggaatatcacactctggggactgtggtggggtgggggaaggggggagggatagcattgggagatatacctaatgctagatgacgagttagtgggtgcagcgcaccagcatggcacatgtatacatatgtaactaacctgcacaatgtgcacatgtaccctaaaacttaaagtataataaatttatataaataaataaaatttctatatatgtatttttcttgaaaacaagtaaacaaaacagtaggttttctactatatccagatgcagagcataaaatctgttttctaactcagattttccaaaatttccttggattccaatgttgacaaaactcccccttaatactgaaaacaaaacaaaacaaaacaaaactaactgctggcaattataactttgcactayaaaatatgttactcagtctgaattaggtcaacgggaaataaattgattgtcaaaagctgcatattaaaaaaactttcattaaatgcatttgatatgaatacataactgtaaaaggtatatatttctaatgtacatatatgacataaataaatctgaagccaagctatactgttccacaaaataacttaattttgaaaagaaaagctttctattcttccctgaccattcaaacaatatactgaatgtaggcctcaaagtgccaattaaaaaatgcctttttgcagaatgccctatttgaggtgtcaggtaatgaaaagttaccaactggtattagagaaaaagaataattttccaagagaaaaatattgttgcaatttagttttattctacatttaacgaaattatttcaatagacctcaatctgaagaaataatagcacagaaatatccaagtaattactggctatttaaaaccccccacttttttttggtttgtttgtttttcattctctagagtaaaaacatagaggaaaggaaaagaaaagtgatatatttattgtcttcctgataaaaaattaaaaatttctgagtgagtcttactataaatgtctggtattttatttactatcattgtatgtcaactaaacatcatataaaacatgtcatgctgtaaatgggggagaagatactaccagtttcaaatgtttcggaaacataagttttatctagataggccaacctttcattttctatcggtatatactcagaagcctgatagatgtgccttggactcttcagtcccacacatcatcaaagtccactcttatgatgttcttattatagttaacatttcaattctctcatttcaagggcccaggatggcttgtattatgacaagaccaagggtggctgcctctcctttgacctattacaatgacttttggtcccaaagattgtcagaatgtaagcctctgttactgctaatgatatctcaagaatatgtgaaaagggctggcacaatctgtagaaaatggctacatatctggaatttaataatgacttttcatatggtcaataatgaagacttttcataacatcagttaaaggcaagacagtagcggttttacctctgcttcagcaaaa

SEQ ID NO: 668117 - DNA, 1112 bp, Homo sapiens
gacaggataaaaaagacacataataacaagtagccttgcagtatagttcgaagtcaggtagtgtgatgcctccagctttgttctttttgctattcatggaataagtttaagttgtaatattgatgtaagtaacgatttcaatatgaaaacaatttcttttctctattgcaaaaataaaaaataacaagatcatgttatttgcagggacatggatagagctggaggctatcatccttagcaaactaacacaggaacagaaaaccaaataacgcatgttctcacttgtaagtgggagttaaattatgagaatacatggacacatagagggtaacaacacatactggggccttttggagggtgtagggtggaaggaaggacaggatcaggaaaaataaatactgtatactaaggcttaatacctgggtgatgaaataatctgtacaacaaaccccatgacacaagtttctctatgtaacaaacctatgtacccctgaacttaaaataaaagttaaaaaaatttaaagcaacagcaaacacatctatattctaaagtaaaatgcaagcataatattttctttaagtaataatttgtccatgtgattatttattcttagcccaagaatgcaatactattagggtggtgcaaatgtaattgcagtttttgccactaaagggatggcaaaaaaagtaattacttttctatcaacctaaatatatagctatgctattgtttatcycctagatgtatttgaataagtatatgctactaatcttgtaaaaaattattgttaatgcctctgcctatcttttccactttcgaaaatgttggatttctcttttgagcatgttttctaaattttttgagtttgttcataggtgaatgttaccctgatgtgaataaaacaaaacaactacaacaaaggagaaaaaaaaggaaatggaaaagaaaaaaaatactgattttaatttgtgcctctactaattacaagctatgtgatcctgaacatattgatacttgaccctcaattttctcatattttaattggtaatatgaaggccttctctactaatttatttttattcttgttagtatcaaatgggagcactctaat

SEQ ID NO: 668118 - DNA, 1112 bp, Homo sapiens
gacaggataaaaaagacacataataacaagtagccttgcagtatagttcgaagtcaggtagtgtgatgcctccagctttgttctttttgctattcatggaataagtttaagttgtaatattgatgtaagtaacgatttcaatatgaaaacaatttcttttctctattgcaaaaataaaaaataacaagatcatgttatttgcagggacatggatagagctggaggctatcatccttagcaaactaacacaggaacagaaaaccaaataacgcatgttctcacttgtaagtgggagttaaattatgagaatacatggacacatagagggtaacaacacatactggggccttttggagggtgtagggtggaaggaaggacaggatcaggaaaaataaatactgtatactaaggcttaatacctgggtgatgaaataatctgtacaacaaaccccatgacacaagtttctctatgtaacaaacctatgtacccctgaacttaaaataaaagttaaaaaaatttaaagcaacagcaaacacatctatattctaaagtaaaatgcaagcataatattttctttaagtaataatttgtccatgtgattatttattcttagcccaagaatgcaatactattagggtggtgcaaatgtaattgcagtttttgccactaaagggatggcaaaaaaagtaattacttttctatcaacctaaatatatagctatgctattgtttatctcctagatgtatttgaatragtatatgctactaatcttgtaaaaaattattgttaatgcctctgcctatcttttccactttcgaaaatgttggatttctcttttgagcatgttttctaaattttttgagtttgttcataggtgaatgttaccctgatgtgaataaaacaaaacaactacaacaaaggagaaaaaaaaggaaatggaaaagaaaaaaaatactgattttaatttgtgcctctactaattacaagctatgtgatcctgaacatattgatacttgaccctcaattttctcatattttaattggtaatatgaaggccttctctactaatttatttttattcttgttagtatcaaatgggagcactctaat

SEQ ID NO: 668119 - DNA, 1112 bp, Homo sapiens
gacaggataaaaaagacacataataacaagtagccttgcagtatagttcgaagtcaggtagtgtgatgcctccagctttgttctttttgctattcatggaataagtttaagttgtaatattgatgtaagtaacgatttcaatatgaaaacaatttcttttctctattgcaaaaataaaaaataacaagatcatgttatttgcagggacatggatagagctggaggctatcatccttagcaaactaacacaggaacagaaaaccaaataacgcatgttctcacttgtaagtgggagttaaattatgagaatacatggacacatagagggtaacaacacatactggggccttttggagggtgtagggtggaaggaaggacaggatcaggaaaaataaatactgtatactaaggcttaatacctgggtgatgaaataatctgtacaacaaaccccatgacacaagtttctctatgtaacaaacctatgtacccctgaacttaaaataaaagttaaaaaaatttaaagcaacagcaaacacatctatattctaaagtaaaatgcaagcataatattttctttaagtaataatttgtccatgtgattatttattcttagcccaagaatgcaatactattagggtggtgcaaatgtaattgcagtttttgccactaaagggatggcaaaaaaagtaattacttttctatcaacctaaatatatagctatgctattgtttatctcctagatgtatttgaataagtatatgctactaatcttgtaaaaaattattgttaatgcctctgcctatcttttccactttcgaaaatgttggatttctcttttgagcatgttttctaaaytttttgagtttgttcataggtgaatgttaccctgatgtgaataaaacaaaacaactacaacaaaggagaaaaaaaaggaaatggaaaagaaaaaaaatactgattttaatttgtgcctctactaattacaagctatgtgatcctgaacatattgatacttgaccctcaattttctcatattttaattggtaatatgaaggccttctctactaatttatttttattcttgttagtatcaaatgggagcactctaat

SEQ ID NO: 668120 - DNA, 1500 bp, Homo sapiens
gatggtgctggtatgccactgaatgaggtctgagcaggttttcttcacatctgaggggacagtgccagccagtcaacttttggggtggggctgaagtctgctgaaaatctgcagttttacatgtttcatgggacattcttctgtgcaataaagtttgagaagtatcattcttgatatatggggctgatattttcaacttctcatcatctgaattttagagtgacttttcacctgcgttccttatttcagctgtctagtctcttccacacttgggaatttctgtttcctgtgtgccgtttgtctccacttaatcttcacgctcctctgtttttcaagtctccaagcctcactatcctcctctaacctttcagtctstctctcttagccttatctcctgacttgatctttttgttaattatttactgttttcctcttcgctgaaggcagttgctaaccctatatgaactggatctttactccttaaggcatgaagttttagaaaagtcttaaatgacacttgctgttatctctgcctgcgtgtgagtgatgctaacccatgttggtaattcaggcttttctttcattggacacgtttcactgaggcttagaaataacgatttttctaagtaccatgacaaataccacatgggagaagctgcttttattggaaaactttcatttattaggggcatactgaatttttatgtcatgtctttggttaacacaggaggcccccagcttatcttcagccccttcttgtcaagactcctgtgttctgcttttaggctaacattggctgtgacctgacttggcttgttcatttcagaaatagccactttctgacatgtttttctaatttacatctttgtattttgatgtaatttctccctttctcaaagtaaaagaacattataatgatttcctagtggccaattttattttatttttattcttacaaagtttcatccatacctagccacatcattttgactatctccctaaccatcttagaatctaccatctttctgacctttgttttctgactaccatttgtaaaccacttgcctatgttttattcagatatcccttatatcatgatgttatactgttattcagagtaatttcattttttcttttttgagaataggccttaacaccagtgtcagagtggtttatagatgtgtgctagctattttagttcattaaaaaaaaaattttttttaggtttcttttcccttaatagataatgaatgatatttacattttctgtttatttcagatgatgatggtaggactgaaaatggagcactagctccaaagcaggagcttccttcagcattagaatcccatgaagttcctggcactctcaatatgggtgttcctcaaatttttaaatatggagaaacctgtttccccaagggcaggtttgaaagaaagagaaatccctctcgaaagaaacaacatatatgtgatgaatgtggaaaacacttcagtcagggc

SEQ ID NO: 668121 - DNA, 1500 bp, Homo sapiens
gatggtgctggtatgccactgaatgaggtctgagcaggttttcttcacatctgaggggacagtgccagccagtcaacttttggggtggggctgaagtctgctgaaaatctgcagttttacatgtttcatgggacattcttctgtgcaataaagtttgagaagtatcattcttgatatatggggctgatattttcaacttctcatcatctgaattttagagtgacttttcacctgcgttccttatttcagctgtctagtctcttccacacttgggaatttctgtttcctgtgtgccgtttgtctccacttaatcttcacgctcctctgtttttcaagtctccaagcctcactatcctcctctaacctttcagtctctctctcttagccttatctcctgacttgatctttttgttaattatttactgttttcctcttcgctgaaggcagttgctaaccctatatgaactggatctttactccttaaggcatgaagttttagaaaagtcttaaatgacacttgctgttatctctgcctgcgtgtgagtgatgctaacccatgttggtaattcaggcttttctttcattggacacgtttcactgaggcttagaaataacgatttttctaagtaccatgacaaataccacatgggagaagctgcttttattggaaaactttcatttattaggggcatactgaatttttatgtcatgtctttggttaacacaggaggcccccagcttatcttcagccccttcttgtcaagactcctgtgttctgcttttaggctaacattggctgtgacctgacttggcttgttcatttcagaaatagccactttctgacatgtttttctaatttacatctttgtattttgatgtaatttctccctttctcaaagtaaaagaacattataatgatttcctagtggccaattttattttatttttattcttacaaagtttcatccatacctagccacatcattttgactatctccctaaccatcttagaatctaccatctttctgacctttgttttctgactaccatttgtaaaccacttgcctatgttttattcagatatcccttatatcatgatgttatactgttattcagagtaatttcattttttcttttttgagaataggccttaacaccagtgtcagagtggtttatagatgtgtgctagctattttagttcattaaaaaaaaaattttttttaggtttcttttcccttaatagataatgaatgatatttacattttctgtttatttcagatgatgatggtaggactgaaaatggagcactagctccaaagcaggagcttccttcagcattagaatcccatgaagttcctggcactctcartatgggtgttcctcaaatttttaaatatggagaaacctgtttccccaagggcaggtttgaaagaaagagaaatccctctcgaaagaaacaacatatatgtgatgaatgtggaaaacacttcagtcagggc

SEQ ID NO: 668122 - DNA, 634 bp, Homo sapiens
agtcaccacgcctggcccgtttaatgaatcttgataaccagtagagcaagtcttatcacctacattctcctttcaagagtgtctttgctcttcttaactctgtatttccatataaatgttagtattcatttttcaatttccataaaaagtgtttcaatttttattgggattacattaagtctacaagttaatttgggaaaaattgccatttttacaatattaggttacgataggttacaattaagktataatcagtccatgaatatggaattcactccagttatttaggtcttctttaatgtgtttcagtaaattttttttactggtttctcaataattttatccataaatattgttttataggctctgttcatttttttaattgtgttaaaatatacatgacataaaatttacaatcttaactatttttaaatgcacagtttagtagtgtcaactacattcacattgtgcaaacaatctccagtactcctgtaattctgcaaaagtgaaaccttatacccattaaacaactgcccattgccacctccccctccgcccagtccctggcaatcaccattctactttctgtctctatgaatttgactactctaggtacctcatataagaagaataa

SEQ ID NO: 668123 - DNA, 634 bp, Homo sapiens
agtcaccacgcctggcccgtttaatgaatcttgataaccagtagagcaagtcttatcacctacattctcctttcaagagtgtctttgctcttcttaactctgtatttccatataaatgttagtattcatttttcaatttccataaaaagtgtttcaatttttattgggattacattaagtctacaagttaatttgggaaaaattgccatttttacaatattaggttacgataggttacaattaaggtataatcagtccatgaatatggaattcactccagttatttaggtcttctttaatgtgtttcagtaaattttttttactggtttctcaataattttmtccataaatattgttttataggctctgttcatttttttaattgtgttaaaatatacatgacataaaatttacaatcttaactatttttaaatgcacagtttagtagtgtcaactacattcacattgtgcaaacaatctccagtactcctgtaattctgcaaaagtgaaaccttatacccattaaacaactgcccattgccacctccccctccgcccagtccctggcaatcaccattctactttctgtctctatgaatttgactactctaggtacctcatataagaagaataa

SEQ ID NO: 668124 - DNA, 637 bp, Homo sapiens
cccagataatggaaataagggaagcctgagaaatgctctaactctggagccagttcaaagagccaatcggtatttagtgtgctgcaaagagctcaaagaaatagtctcatgagggaagcacttttgtgtgacttttttcagcttttactgttaaaacattacttcgacattaaaggaaccattaaaaaaaaaataaaccaatcagctgggcactgtgcttatgcctgaaatcccagcactttgggaagccgaggtgggagatgggaggatcacctgagcccaggagtttgggaccagcctgtgcaacatartgggaccccatctctaccccaccaaaaaaaaaaaaaaaagaaaaaacaacaaaaaaggcaatcacgttccttcatctgaatgtatttctatttttttccatatccatattacttacttaactattttaaaatacttaggttgtttctaatttcactattataattaatgctgggaggcacatctttatgaatatactgtttttctcctttcaaagtatttctttcaagcatgtcccaaggcctctgcttgttgaggatcaaaggagaagagcaaattctgtcttgctatgtattatcaaaatattgcacaaagactgtatcaattc

SEQ ID NO: 668125 - DNA, 640 bp, Homo sapiens
aagcccacctgtctgcatggcagcagttggacctcacagtgtggattgtgccttcaccctggaatgtttatgccctatcaccatggtgatgggattagggatctcctgcccttggtcctaagtgccactatctgtgctgagtttttcaaaggtcagagcagattgaaccattgtggtttcattttccctgattttgatttttcttatggggaacctgtgtggctgcattcaaggtatgttcatactggcctgtcaaatgcgatcttttcaaattactagttaatgctttcaaaatatgttatttaaaaaattagcctctgtattttccatatgcagttataaatatgtttcatgattatgttttattcctcaatttatatatttgattattgtaccaagcagagtatctttgaaatttttcttcatttaaaaaatatgtatcttgactcaggcctgtaatcccagcactttgggaggccaaggcaagaggatcacaaggtgaggagatcaagaccatcctggccaatacagtgaaaccctgtctctactacaaatacaaaaawttagccaggcatggtggcagctggtgtagtcccagtgtgaattgggattcagtttattcccaaattcccaaattata

SEQ ID NO: 668126 - DNA, 546 bp, Homo sapiens
gatggcaagtgatttttatttttttcttaatattttactccttcccccagtcctctgcaatgagtatgtaccagttttataactagaaaaaaattttagccaaaaagaaaaataatgcatgtttgctatataaaattcactactgtagtatatatatatatacatacatacatatttggtctttgtccccagttcctggcactgagctcctaaaccccttggaacttcytaagcaatgggagtaccttttgttatttataagaagccccttttggccatcccagagtttatgctaacgaggtgactgaaggtgagcacggaggcagtttcaaggaaggagctggccacgcttagaattgtggagttttcagccccgcccttagacctccaaggacaagagggggaccgcagattgatccaatcagcattggtcagtgatttgatcagtcatacccacgtaatgaaatcccatatgaaaaccctaaataatggagttaggagagcttctgggtgctggaagcggcgtgcaccaggagagggcatggg

SEQ ID NO: 668127 - DNA, 651 bp, Homo sapiens
acagctctgagacaggaaatgcctgtctgctacattttgggaaaattagggatgaacgaagggtcatgtggaataacagatgatttgctttgcatcacttgtagtttacaagggcaaatgcaatgctccaggaatgtgtaaaatgtatattatgctaaacttgaggtcatcctctcacttgtcagaacatagcttctagtcctaacttccaaaactttagaggcctgtgaaatacttggacaggttccaaaggagagcaatgaaagtgataaaagatttgaaggctaatacctttgagggaaagctaaaagaacaagaattatttctcttctaaatgagaagtcagagataatttaacaatcttcaagtatatggaatgttttatgtgtagagcaatggtatccaaattcaggtaagtttgagccatgaggtctgggtacaaaaaaagcaaccctggcagggagggttgttgtgtgttgacaccgggtatttgactgcagaaacctcttcttcggaggcccagaagactagacattatctagcagtgakgtgtcacgtactgtctgcatgaacactggggtaaaataaatgacttccaagaatttaaattcagtagttttctgggtttttaaaaggtcttccatttgaggg

SEQ ID NO: 668128 - DNA, 651 bp, Homo sapiens
acagctctgagacaggaaatgcctgtctgctacattttgggaaaattagggatgaacgaagggtcatgtggaataacagatgatttgctttgcatcacttgtagtttacaagggcaaatgcaatgctccaggaatgtgtaaaatgtatattatgctaaacttgaggtcatcctctcacttgtcagaacatagcttctagtcctaacttccaaaactttagaggcctgtgaaatacttggacaggttccaaaggagagcaatgaaagtgataaaagatttgaaggctaatacctttgagggaaagctaaaagaacaagaattatttctcttctaaatgagaagtcagagataatttaacaatcttcaagtatatggaatgttttatgtgtagagcaatggtatccaaattcaggtaagtttgagccatgaggtctgggtacaaaaaaagcaaccctggcagggagggttgttgtgtgttgacaccgggtatttgactgcagaaacctcttcttcggaggcccagaagactagacattatctagcagtgaggtgtcacgtactgtctgcatgaacactggggtaaaataaatgacttcyaagaatttaaattcagtagttttctgggtttttaaaaggtcttccatttgaggg

SEQ ID NO: 668129 - DNA, 1149 bp, Homo sapiens
actcatggctaatgatggtctcttatttttctttttaatcttacagcactcactgaaacaactctctataaagatactttcagctaattcctagagatgaagaatctgagtatcagaaaatttaagtgacttgtccaatgtcatgcaaaatatttaaatatttgcatttgatctataacccatttaaacattatgaggtacataaaagtatactgtaaatgataaattatcatgcagttgtataaccaaagtgtcaactggagcttcattccttctctggaaactcaaatgtgcttggttcacacactcaattttaaagtctttgaagtacagagcttcctgtaatttctgctaattaccagcactttccctctaatgacgtattctgcatcaggctcctgcttcaacatgtgctgttctgaaacagccagtgttgactcaaattcagaatcacattagattatcccccaaaatgtcattcacccaaaagcaatagggaacctcgcaaattttactgaaaaggttacaaaagcagagtggttttaaccccaaagttcacaacatagaattgctatgagacagtccagttctcctaaaagtagtttctaagttgccccattaccaattggtaactattcagcaactgggtctcctggggaaaaaacacccttatttgtagagtctgccaattaatgtggtgtaaatattccactgtagtcattttcaaactatcaatgacatcactgaactcagagctggaattgagaaaacaagtgagtaactggatcttgcaagccattgtggactaactccagcacattgcagcccattaccagagaactttctcagtgagcttcttcaatgcatgtcccagcctctcttacttcactggtcttgccctgaatcatcactactagcctcatccctggagaactttaaagtatttcttcccttgaatatgaagcctcttagcttttttacactctatgacaggtctaaaacctgtccaacaagttctttgattcacctccctcacatgggtagagactcratcaatcttagtaactctcttgtgatcagtaaactgcagcagaaatgtctcattgtaacttccaaaactagttataaataagccacacatttctgcct

SEQ ID NO: 668130 - DNA, 668 bp, Homo sapiens
tctttctgagtaggaactggagcttaagtatagagcttacatagatgaagcttaatcaatacatataatatgagttaaattagactctgattatgatctttgaggccttagataagccactcttgaggatctactcctgaactgttactcatacatgccaataaagtatctttttatgcttaaggaagattgagttgggctttctctcacatgtcacagaaaacatcctaactcactcatggacggcacactctgtaattactattggtcttaataaatcaagcttcatccgggttggaaaccatcattctcagcaaactaacacaggaacagaaaaccaaacaccacatgttctcactcacaggtgggagttgaacaatgagaacacaaggacacagggaggggaacatcacacactggggcctgtcggggggtgggggactagggcaaggatagcattaggagaaatacttaatgtagatgacaggatgatgggtgcagcaaaccaccacggcacgtgtrtacctatgtaacaaacctgcatattctgcacacgtatcccagaaattaaagtataataataataataataataaaagaaatcacattatctttctctcatcttattcttcattgaatatggtcccaaagtgggctgtgtaccctaa

SEQ ID NO: 668131 - DNA, 1661 bp, Homo sapiens
tttcagacttacagaattgaaagagattagattacaccatatggtaaccgacccagtttcttcagtgacctcagacacctacctgaatttcctagaagtaccagttaaatgggatcatttttttattttactttatttagttgtgttatatcactggaaatcattaataactgacaatattgacaatttttctacattgtgttttagaactcttgtccaactctgagattatggtccatggaagtgcttccttaaaataattcattctaaaaaatagcaatctatactatgataattttttttagtcagataccacagtcaggtaacaatgaactcataaatgacaacattccattttaggctagagataatatatattttttgtactggccagatttagctaccaaaatctttaatgtcattctaagtatctataaatacatatatgcataaagtaagattgattgtagatgaatttaactattaaacaaacctgacctacaaatgcctaagtagatctaaaaactcacataaaataatgaaacatagatgagtaatgtaaaagtaaaaatgtaaaagtagccagcataacgctctgcatgatcgtgcttcttttattaccttttaattaattttgtgtgtgtgtgtgtgtgtgtgtgtgtgatggagtttcactcttgttgcccaggctggagtgcaatggcgtgacctcagctcactgcaacctctgcttcccaggttcaagcaattctcttgcctcagcctcccgagcagctgggattacaggcacccgccaccatgccctgctagttttttgtatttttagtagagactgggtttcactatgttagccaggctggtcttgaacttctgatctcaggtgatccacccacctcggcctcccaaagtgctgggattacaggtgtgagccaccatacccggccccttttaagaaattttaatcaatttattctccccatctgatattatcatttcccctcacttctctcaatcaactaaacaaccaaccgaacaaaaacaaacaaaaaccacaatgtccatgaattccagggtcaattcagtgtatgggaatcagtcatcctgtttatagaaagatagagtggagaaggtggagagggtggttttcaccgactggggcagtggcttctgatgctgccacacaatgttgtggaatatggagtccacgcatcctgaaggacacttggtctttccacttcagtccccagagaagagtgaagtsactctatacttgggctcaacaattaaaattctttgaatttatattcaatcatttacgcatgttttcccgaagaaagacttcatgcaagaatggccagtgcttagggatttccagagtaagcaacacttttggccagaaaaagccttttcttaggacggccagagcttgtgttgaaaactagtatcaagccacccttgttattaatgttaccatccttgtgaattctccaaatgctcctggagtgctactctcagaatagtttgtcaagtgccactctagtccattccatcactttcccaagctttgtgttggggtcacaatcactttcctccctgaggatctctgggatccctgtgtcaataagttatctactaacccggatactcaatgagaaacacca

SEQ ID NO: 668132 - DNA, 819 bp, Homo sapiens
tgggtgcaaaaagaaatttcatgtgagataatctataaggatatactaaaatgatatatgtggaagttagcattttggggcataaatagcatgtaatttgtcattcatttcaaaggacagattttcaaggtcagcagttcgagaccagcctgtctaacatggtgaaaccccatctctactaaaaatacaaaaattagcctggcgtggtggtgcacgcctgtaatcccagctacttgggaggctgaggcagaggaatggcttgaatccaggaggcagaagttgcagtgagctgagattgcactccaacctgagtgacagagcgccgaggctgcataaaaacaaacaaacaaacaaacaacaaaaacatagtaatgagaaggactggggattttgcctttctggcaaaacaaaaaatgtatcctaatatggatacatgaattctagtaggaagcaatgagaagactcctgggacagagatcaagaaaagtttagtaacagcagtatccagagtatcaacattttgttcccacatggcaacacaaagargatcatgtaaaacaataatttacaaggggcaaaggaatttataggggaagaggaacctgaacttagggaacctgaatgttctataatggggagtaagtatgtttgcacactgtttcacaggcagaaatgattcttcatttccaaggatgtttgctatataaacatcctcaaaagagaatccagaacaaaaaggtggtcagtgcctgacttgcaagatgtgcaaaaatgtgagagacgaattttctcccagtgaagatatgctgggaggatgca

SEQ ID NO: 668133 - DNA, 622 bp, Homo sapiens
ccaagaaatgccaggcaaagcctcccccaacacggtgggctcctttgcagcaaacctctgcgttttcttcttggccatgcattttggccttgtgagtttgcatgtttggtttgaaagctctctatggaaatattcagttatttttccatctggtggccccatggcagggggtgtggcagcaggaacccttgctaaagggccccgggcccaagtgagatggagctggtgtcaggcacataagaaatgtttcctctagatggagggctctgcacattgtcacaaacccctgttttgtgcctagcctttaaaaatcccagttatttaaatccctgggtttacttagctccattcccagtttggccaggggtgtttcttggcgctctgtccctgactgtgacatagacccttagctgtgaggcagcaggggagccgccagcagcagggacccccagccctcacgcagggtgctctccaccctctcctagtaccagcccctgggatggaccctgaagctgacctgtgcccccagccctcttggccttggagaccctctgcctccctcctggccctgggtcaccgccctgagtcgggggtctgttgkttgctggtctctgtgccctca

SEQ ID NO: 668134 - DNA, 1412 bp, Homo sapiens
cacaggagacttgacacacaactctctaaggaacaaatgcgccatctggtggaaacagagagcaatcagaagggaagagaagaagctacctgagtgctcarctatctaactgaactgtacaagagctggtgatttagataaaattcaaatgtgctccagggagttgtatacctcttgagatttaagaaattctcctagattgccaacgatcctgtcttgaaggtaatatatatagtatcaaaagagccttcaagaaaacccagtatactcaaaactacaaaatggaagctatagccaccatcctttgcagatacaatcctcaaatgttcagaacactacctaaattaaagagtttctgaacacaatttaaggagtaaaccatgttggtatctcacatctgagagaagtttagccaggtataaataagtaagcaggaaaaggaatacattaactactttcataaattagagaattaacatttattgaaagcctactacaagtacactactaataaacattttgtatacactgtctgagatcatgagaatcaaccatattttcacagatgatttgtactaagaaaaactgaggcccaggccagaatctgaacttagaggccttcaaagcgtaggtacttttcttctgtggaatactgtagggaaaaaaaaaaaaaaaaggtgtgcagtttccttaacaccatgctttagcataagcatttctgctacaatacaccggaagagtaaagaaaagcctcaaaaagttaaagcaccttccaaaggactttaaatacccataatgcaagttatgaatataatacacacaaataatgaggtggtcagagaaatacagagaagtcagagaagaatgacagactacacaggttagcccttattcctacacagcaggtatgcccctcaattgattatcgatcaccaacctacctgggtctgtctgtgctggatggagatctgtttttgggagctgcaggaatgctctgtgttgccagatcccgtagatgagggactgttttgctgagcctacaataaaggtgcattaccaatcacaggaaagtttggcatctttttccacaaacacttgtattaatgcaaacaactccataatttgtatctccacaatacaaaccccttcttatgaaagtgagaagtcagggccacgtggccaagaagaaagtaaaacaattcaaatatgagacaaagggctggacatggtggtttataccaagttcctgtaaacaggtttaaagtatcaaatgcttacaaatgaatttttaaaatatgaaaattagagaaaatgaaaagttattcctgtaataacttgcctttttcacttgtattttcatatgctttagtcagaaaaggctagtgaagcatccaatgcacaggggatgcatg

SEQ ID NO: 668135 - DNA, 1412 bp, Homo sapiens
cacaggagacttgacacacaactctctaaggaacaaatgcgccatctggtggaaacagagagcaatcagaagggaagagaagaagctacctgagtgctcaactatctaactgaactgtacaagagctggtgatttagataaaattcaaatgtgctccagggagttgtatacctcttgagatttaagaaattctcctagattgccaacgatcctgtcttgaaggtaatatatatagtatcaaaagagccttcaagaaaacccagtatactcaaaactacaaaatggaagctatagccaccatcctttgcagatacaatcctcaaatgttcagaacactacctaaattaaagagtttctgaacacaatttaaggagtaaaccatgttggtatctcacatctgagagaagtttagccaggtataaataagtaagcaggaaaaggaatacattaactactttcataaattagagaattaacatttattgaaagcctactacaagtacactactaataaacattttgtatacactgtctgagatcatgagaatcaaccatattttcacagatgatttgtactaagaaaaactgaggcccaggccagaatctgaacttagaggccttcaaagcgtaggtacttttcttctgtggaatactgtagggaaaaaaaaaaaaaaaaggtgtgcagtttccttaacaccatgctttagcataagcatttctgctacaatacaccggaagagtaaagaaaagcctcaaaaagttaaagcaccttccaaaggactttaaatacccataatgcaagttatgaatataatacacacaaataatgaggtggtcagagaaatacagagaagtcagagaagaatgacagactacacaggttagcccttattcctacacagcaggtatgcccctcaattgattatcgatcaccaacctacctgggtctgtctgtgctggatggagatctgtttttgggagctgcaggaatgctctgtgttgccagatcccgtagatgagggactgttttgctgagcctacaataaaggtgcattaccaatcacaggaaagtttggcatctttttccacaaacacttgtattaatgcaaacaactccataatttgtatctccacaatacaaaccccttcttatgaaagtgagaagtcagggccacgtggccaagaagaaagtaaaacaattcaaatatgagacaaagggctggacatggtggtttataccaagttcctgtaaacaggtttaaagtatcaaatgcttacaaatgaatttttaaaataygaaaattagagaaaatgaaaagttattcctgtaataacttgcctttttcacttgtattttcatatgctttagtcagaaaaggctagtgaagcatccaatgcacaggggatgcatg

SEQ ID NO: 668136 - DNA, 382 bp, Homo sapiens
gcaccgcacccagttaatgtttaaatttttagtagacacggggtttcaccatgttggccaggctggtctcgaactcctggcttcaaggaatccacctgccttggcctcccaaagtgttggaattacagaygtgagccatcacgcctggcccgtcactacagtgttttcactattaaagtttatgatcttggtctttccttcgtgcctttgtatagggccaaaagagagacattgggcactttgacaaccttaaagcagactccaggaatatcacctttttttttttttttttttttgagatggagtctcgctctcattgcccaggctggagtgcagtggcatgatgtcggctcactgcaacctctgcctcccaggttcaagc

SEQ ID NO: 668137 - DNA, 1019 bp, Homo sapiens
caaaaacaaacaaacaaaaattttctgctggttctgtttttcatgtcaaaccctgactgatacataaactgaagaagcaattgttgccttatatatcattcagttggacggtttggaacccagatgtccaccagcattcattcaattattcataactgtaccatagttgacaatatagcaataaacaaagcagatatggaccctgcccttggagagtagattctagcaggaaacagatgttatttaatatttataggataatacattagcatagagttgtcagaaggtgtaactaggagaccctgcctgaacttaggtgtcagagaagagaagtaagggcctggaagaaagagtgagggcctgacaacaaatgaaagtaattcaggaggttctgcaaagttgtcgttcatggcagtagaagggatgaggcttgggagataaackgtagagggctatgcaagccaagataaggatgtctgactttaccctaagggacaaatacttttatttaaaaaccttcatgttttggaatcctatatagttattttataatgtcacaatgtggttatattttgaacctttgaagatcccatggtgttagtgtgtttgatcagccattcctgcccctgtcctcttatttttttgcacattttttacaatcctcttgtgtaacccatgatgccctttctattgtgcaagcatcagttggctactgtcatactagtcatagtatttttaactcgttctcctgccttatgctttgaattctcacccattgaaaggaaaagaaaacaaaacctgcacttttcaaattaatttacctgacagtttcctcttgtcaacgtttactttctgctctatttagatgtacagaaaagcttccggagggtgggcattccccagcctcattattcctgttcttctgacaccacctgcggtgtgggagcttagcccttcctgaggctgttaaccctttcttactgctgagccccctgatgctctaaggattttcttaatga

SEQ ID NO: 668138 - DNA, 1019 bp, Homo sapiens
caaaaacaaacaaacaaaaattttctgctggttctgtttttcatgtcaaaccctgactgatacataaactgaagaagcaattgttgccttatatatcattcagttggacggtttggaacccagatgtccaccagcattcattcaattattcataactgtaccatagttgacaatatagcaataaacaaagcagatatggaccctgcccttggagagtagattctagcaggaaacagatgttatttaatatttataggataatacattagcatagagttgtcagaaggtgtaactaggagaccctgcctgaacttaggtgtcagagaagagaagtaagggcctggaagaaagagtgagggcctgacaacaaatgaaagtaattcaggaggttctgcaaagttgtcgttcatggcagtagaagggatgaggcttgggagataaactrtagagggctatgcaagccaagataaggatgtctgactttaccctaagggacaaatacttttatttaaaaaccttcatgttttggaatcctatatagttattttataatgtcacaatgtggttatattttgaacctttgaagatcccatggtgttagtgtgtttgatcagccattcctgcccctgtcctcttatttttttgcacattttttacaatcctcttgtgtaacccatgatgccctttctattgtgcaagcatcagttggctactgtcatactagtcatagtatttttaactcgttctcctgccttatgctttgaattctcacccattgaaaggaaaagaaaacaaaacctgcacttttcaaattaatttacctgacagtttcctcttgtcaacgtttactttctgctctatttagatgtacagaaaagcttccggagggtgggcattccccagcctcattattcctgttcttctgacaccacctgcggtgtgggagcttagcccttcctgaggctgttaaccctttcttactgctgagccccctgatgctctaaggattttcttaatga

SEQ ID NO: 668139 - DNA, 494 bp, Homo sapiens
tactgctccctcgtcccctgccagcgcctctccatactgctccctcacccctgccagtgcctctccatactgctccctcacccctgccagtgcctctccatactgctccctcatcccctgccagcgctccctcatcccctgccagcgcctctccataatgctccctcacccctgccaatgcctctccatactgctccctcacccctgccagcacctctccatactgctccctcacccctgccagcacctctccatactgctccctcgtcccctgccagcgcctctccatactgctccctcgtcccctgccagcgcctctccatactgctccctcgtcccctgccagcgcctctccatactgctccctcgtcccctgccagcgcctctccatactgctccctcgtcccctgccagcgcctctccatactgctccctcgtcccctgccagcgcctctccatactgctccctcgtcccctgccagygcctctccata

SEQ ID NO: 668140 - DNA, 620 bp, Homo sapiens
agggatatccgaatatggactggctatgagatattaccaagttattcttgctaatattctaagtgtgaaaaagccattgtgattatgtaaaaacacgtgggggtatttttcagacgcatattgaagcacgtgggaataaaatgacatgaggtctggctaatagttgacagaaaagggagagacacaacaaatagagaaagacctttgataattattgaatccagattataagtgttgtgttagtcggctcaggctgttggagtgactttaaaaaacagaaatttattttctcagtgtgcaggctggaagtccaagatcaaggtgccagcaggtttgttttctcccgaggtgtctccacttgaagacagccacctggccgtgtcctcacagtcttctctcagtctgtgttgtctgtggtcctaatctctttttctaaggacactggtcatactggattgggcccatccatatgacctcattttaccttaattacctctttgaaggccctatctccacataaagtcacattcttaggtactgagggttaggacttcaacatgaattttaggggatgcggtttaacctayaacaggtatatgggggttaccatagtctctcat

SEQ ID NO: 668141 - DNA, 2774 bp, Homo sapiens
tatcataccatattgaccaagcttattttaactgctacctattttttttttttctgtttgttaaatcattctttccccataaaacctcctggaatacacacgttaaaaagcaaatcaaaaacaaatcaaacccccagcactttgggacaacgaggcaagtgcccaggagtttgagaccagcctgggcaacatggcgaaaccccatctctacaaaaaaatacaaaaattagcggggtgtagtggagtgtgcctatagttccagctactcagtaggctgatgtgggagatcacctgaccccagcaagtcgggctgcagtgagccatgattgtgccattgcattccagcctgggtgacaggaatgagaccctgtcacaaacaagcaaatcaaaaggtatagagaaaattaagtcttcatctaattcttattccacttcccagaggttaagtactattaagcttacctgtattctcagagactgcctatatataattaactagctacagggactttttttctaaataagtaaatgagcttatactattcttactcgtctgtaactttcttttctttttttatctattctaggtataatatccttgcacatgtacgtttgtgcaactgtgattatggcatagggtaaattccttaaagtggaatttattagatcaaatggtataagcattttgaatttgaaagatatttgctagattatactcaagtatagtctaagggatttggaaaaaaacagataatgtgtcaatgcacacactttgtgcaactgtatgggaacagcctagaattgctgggtcactgcagacacataaaatttcaaagatactgacaaactgycctttacaaaaattaaaacaatagacatacctatcaactgttagagagagctgatttttttctaagacctttaatgttaaggtttgcaagactcttaatcactacagctttaatttgtatatgagtgtgattaagtatcactcatgatgattggtcattgtatttctttatctgttaactaccttgaccatttttctatcagtttgttaatctcttaaaagatctttaatatgtttcaaatattttccttagtgtattatttatcttctgactttatttaaagtatttttaaaatgacaactattttatgttaaatttaggaacattttcttttacagtatctgcatattgttttctaaattttagattgcactttatagctattaacatctcactacttaccaagaattaatcccatgacaaatgttttaaagtgaactgggtcatagatccatacatacacctagaagaatcaagaaacctcggtgcttaaaagttctaatgtcacattagaaagtaatgcttaattctatattttaggtcccttaaagcagtcatcaacctcttaacatacgagaagtaatttctaaggtaaataaattccaaagatctttccttcagtagtagtggttcttctggcgctagaaaatgattataggataactataaattctataaagcacttaagtaaatttgtatgttcttacatacacttaaaaatttgtttgactgggcttggtggctcacgcctataatcccagcactttggaggccaaggcgggcagatcacttgaggtcaggagttcaagacaagcctggccaacatggtgaaaccctgcctctactaaaaatacaaaaattagccaggtgtggtggtggacgcttgtaatcccagctactcgggaggctgaggcaggagaattgcttgaacccaggaggcagaggttgcagttagctgagatcacaccactgcactccagcatgggcgacagagcaagactctgtcttgggggaaaaaaaaattgttccatgtgtgcacatcattatttattcaaccaaaacaccagcaactgccaacctttttgtccctaatgtaatgatgaaccagtctgggataaaagcgcagttaagacagattccagccaggccctattacagatctagtatcactcaactccacacttttctctcctgagaagacacaaagatcaattattaaagatcatgcttggtgaacatagtctctatgactgtattaatttcattgcctactcctccatggagggcccataagctgggaaccactacttcaaaacttaatttacttttatcaggctcttattttacacaacagaaatttacttcattcagatcagaactctgtttgatcattcatccataaaactcagttttatttcttagtttctataaataacagtactcttccctcttatttctatattgaccagaactctttattgtctttccaacgtggttcttcaatttttaacaccagaggttccactttaacctcttattttactctgcccatttccttgggaatcagattcacagatattacttctgccagtttccattctaaaaaaacatgtttttttaaaaaagatatttcacaactttaaaagttatggagtgcatgctgctttctacagaataaaatctaggcttctcaggataccaagcacccatgcgtttgctcaggctgtttccttccctaacagacctaacctccttcctggcacgcctggcaatctgccagtcatcttcaagtctaagctcaaatgtcctttagacccttcttatccttcctgactaaattaactattcctacctggtgctttcacaccattaatgcttaccacactgtactatattaacatgtttaagtgcctgtatctttgc

SEQ ID NO: 668142 - DNA, 639 bp, Homo sapiens
tgctccttttggggcttgaataacctagttgggcacgaggcaggaggtcagagtaaagctgggggatggtatccgctcacatctgctggcagtctgtctgccaggagtccacatggctccaggggtgtttgggaatgtattatatatgtcaaaatgtcagtgaaaaccttccattgaagagtggctactttctttgaaagaacctattgaagtttaaatgagggttccccacctcagtattttcattgttagctctaagtaaaaaagtgcctctttgaatgcttagggacgtccttttagaaggtgagagatatttttggacttgtgtgtatggggtgagggaaaaagaagcaagccctagccagtggtccaggaggtgagacccattgcagactggaccattttatttttcttttctccacattcagtttataaatgatggaaatcaaaacgtgtgccaagctgacacttgtccaaaattgtcactcttactttyctcactgacttctcaataagaccaaatatgaaatactagaacctgtaaggtacatcacaaaattaaagatcttctcaaaccttcagaagcaaactttgctcatctgtaaaatgagctggtgtttcctaccgtttctctcagct

SEQ ID NO: 668143 - DNA, 688 bp, Homo sapiens
acattttggacaaagacacattgagttgatttttatttgtttttctgttccagaaacttcatcaagttacgggcctggtctaagaaaacacattgcaatctattttggcagacttctttcaaataaaatactaatttcattagctgatagtatagtaattggcaaacatttcctctttggaaataccaatttgggctagccattttgcagaaatttgtgtagttttgattataacctgttggagagcatttctaaattacttatacataaaagataatcttttttttgtttgtttttttgagaagaagtctcggtctgttgcccaggctggagagcagtggtgcgatctcggctctctgcaacctccgccccttgggttcaagcgattcttgtgcctcagcctcccaagtagctgggactacaggtatgtgccaccacacctggctaatttttgtatttttagtggagacagggttttgccatgttggccggggtggtctggaactcctggcttcaagtgatcctcctgcatcagccttccgaagtgttggaattayaggcgtgagccaccgtgcctggccatagaagacaatttttatgttaactaaaatatttgcttagctattataatatagcttttgtaaggataaaagtcatgtgactacattggaggactctccctacctca

SEQ ID NO: 668144 - DNA, 916 bp, Homo sapiens
aaaaaaaaaaaagctaacatttattgtgataatgcatttaactgcttagaatagccagacaccattgagatcactttacaggcactgatcacttaattttcacaactgccttatgaggtaggcactatcattaccggaggaaggattcaaactcaggctgtctaatccaaagaaaatcacatggcatttcccctcaaaaaatatctagtttcctactgagtctgtattgctgaaagtcagaattatatcacaaatatttttaaaacaaatctgtcatcatttggagcagttaatgtatctaagttgggttggctgaaactgtggagcttttagaaagtaactagttactgtgaggctgaggtgtgaggatcacctgagtctggggaggtcgaggctatagtgattgtgccactgcactccagcctaggtgacagtgtaagaccattacaaaaaaaaaaaaaaaacagacaaagtaactggttagtaggcaaagaaaatggtctataccaatatttttttttcattttattcttataatcagtatactcccttggtggcaaatgtctaattgagacaagaggcactgcactgctagttacaaggcatcttctaaagcatagaggataggaaagaagaaatcgtagctcaagaaaacacgaaactgtcaactgtaggaaattctttcccacstccctccttcctagtcattatagagcaggcaaatatcttttttttttgagacaagatcttgttctatcacccagttggactgcagtggtgcgatcttggctcactgcaacctctgcctcccaggctcaagcgatcctccctccccagcctcctgagtagctggaaccacaggcatgcaccaccacatctggctaatttttctattttttgtagagatggggtttca

SEQ ID NO: 668145 - DNA, 1564 bp, Homo sapiens
taactctaggcagtggtaaaaccacagtgcccagtaatggttagtaaagaatacaagagagtgtaggccgggtgcggtggctcacgcctgtaatcccagcactttgggaggccaaggcgggcggatcacgrggtcaggagattgagaccatcctggctaacacggtgaaaccccgtctctactacaaatacaaaaaaaaaaaaaaaaaaaaaaaattagctgggcgttgtggcaggtgcctatagtcccagctacttgggaggctgaggcaggagaatggtatgaacccaggaggcggagcttgcagtgagctgagatcgcgtcactgcactccagcctgggtgacagagcaagactctgtctcaaaaaaaaaaaaaaaaaaaaaaaaaaaaagaatacaagagagtgtgacccatagttcagactactcaagtctatgtgggtctgcttcctgaacagctggtaaacagtggagaaagccatactcaaatgaatttcctttcaatttcagtgcgtcctttcactacaaaacagcccaatcaatgtcctgggttctgttcactcagactgagaaaaagaagtaaatcatccatagattttggcattttgttattatcacaaagtatgctagacatacacctcataagtgattttgacaaaaagatgtgctgcaagcacagtgcttgaggggtggtcacgattatggatatcactgtactaatctcagaaatcttagtgtatgtttttttttgtctttactggatagtttcgtatttctacctgcatgtggagttctgtcagggccacattcttccgggatatataaacgtggagaaaagtccttacactgtggtacagtgatccgctggaggaaagtgctatatctgtgcattttgcaagaagtcattctatagcatgtgtatgtctattaacacaatcactgaaccagagccaaggttccaaagggactatctgagatcatctttctaacccagtgattctcgagctcaggtgcatggcagaatgcctggagggtttattaaaaacactgattcctaagctccacctaagaccgattgaatcaggttcttttagtgtagggtgcaggaatttttttttataacaacttccccaggcgatttttctgccagtctatagaatggcctttggggatctctttatcttttaccttcaagttaaaacacatcactctgaaacttcatgagccagatacgaatctaacctatattcaaagaggtttagaaaaagataccttcaacctctctcagcacaatttttttttctattaagctcccttttcaaaatacttgaactccacctggacctaggcaaaatgttttaaaatggcatcagagtgaatcaaatcacattaacctgagatggtgggcaaggatcatgaaaaaggacagagggaagcctgaatgtgagtttgcctgaagaggaaatgatgattccaataagtgccttttctttccgtttgcattctgtgcgtagctaatccgctcggcataatcctcttaacggcatgtgttccatcagtatt

SEQ ID NO: 668146 - DNA, 1564 bp, Homo sapiens
taactctaggcagtggtaaaaccacagtgcccagtaatggttagtaaagaatacaagagagtgtaggccgggtgcggtggctcacgcctgtaatcccagcactttgggaggccaaggcgggcggatcacggggtcaggagattgagaccatcctggctaacacggtgaaaccccgtctctactacaaatacaaaaaaaaaaaaaaaaaaaaaaaattagctgggcgttgtggcaggtgcctatagtcccagctacttgggaggctgaggcaggagaatggtatgaacccaggaggcggagcttgcagtgagctgagatcgcgtcactgcactccagcctgggtgacagagcaagactctgtctcaaaaaaaaaaaaaaaaaaaaaaaaaaaaagaatacaagagagtgtgacccatagttcagactactcaagtctatgtgggtctgcttcctgaacagctggtaaacagtggagaaagccatactcaaatgaatttcctttcaatttcagtgcgtcctttcactacaaaacagcccaatcaatgtcctgggttctgttcactcagactgagaaaaagaagtaaatcatccatagattttggcattttgttattatcacaaagtatgctagacatacacctcataagtgattttgacaaaaagatgtgctgcaagcacagtgcttgaggggtggtcacgattatggatatcactgtactaatctcagaaatcttagtgtatgtttttttttgtctttactggatagtttcgtatttctacctgcatgtggagttctgtcagggccacattcttccgggatatataaacgtggagaaaagtccttacactgtggtacagtgatccgctggaggaaagtgctatatctgtgcattttgcaagaagtcattctatagcatgtgtatgtctattaacacaatcactgaaccagagccaaggttccaaagggactatctgagatcatctttctaacccagtgattctcgagctcaggtgcatggcagaatgcctggagggtttattaaaaacactgattcctaagctccacctaagaccgattgaatcaggttcttttagtgtagggtgcaggaatttttttttataacaacttccccaggcgatttttctgccagtctatagaatggcctttggggatctctttatcttttaccttcaagttaaaacacatcactctgaaacttcatgagccagatacgaatctaacctatattcaaagaggtttagaaaaagataccttcaacctctctcagcacaatttttttttctattaagctcccttttcaaaatacttgaactccacctggacctaggcaaaatgttttaaaatggcatcagagtgaatcaaatcacattaacctgagatggtgggcraggatcatgaaaaaggacagagggaagcctgaatgtgagtttgcctgaagaggaaatgatgattccaataagtgccttttctttccgtttgcattctgtgcgtagctaatccgctcggcataatcctcttaacggcatgtgttccatcagtatt

SEQ ID NO: 668147 - DNA, 613 bp, Homo sapiens
aatatcctcccagactctgttgatgaccttgaaaactatgagatttgatttatcattccaatactttgcacttttacaatacatgatcaaaatacgccgaaaaaggaagcttgaataagtgacctcgttgtgatgaagtggaagatgactctgaaataatataattcaatctccgcatttttcagatgaggaaactgaggaacagatgaggagactttcctgaggttgcccagcaggcggaacctggacttgaaccagggagtcccacctcccagtctttacaagttcctttactttgtgctctgggctaattaatgttttaggcagggccatttttgcttcctgggtctcarttcccacttgtaagagggaccggagcaagattctgttctggcattgcttcacagagccacaatcaggcaactcccacatgtccatcctgctcctcaaagcagcaggtcctccctcctctcctgctcagcccaccaccctcgtgtctgagccctgtggcagcacaagaaggcagaacctgacccagcttatagtggtgaccttcaacttcatccaaaaatcagtggctctgaaggagtgttccctgtgataaataacaaca

SEQ ID NO: 668148 - DNA, 1043 bp, Homo sapiens
ctttaaaaatcttagtcttcctttacctccctgaatacacacatagtttactatgacacacatactaccattacagtgcctattcccaattaatcattttcttttagagcatctccctgtctgttatttaggttgacaagactaaacgaatacagtttacacacagtacatagggcagagtgagtgtgcaaacagtatcagctagcattactattccccatctgctcatccacctctttcatccccacctctgtgaagtccactcacacctgtgagaccctcctttttgcccacggtgtgcacgcatgtctgcaaaggactaaacactcttctgatgacttttgcttgaatgtgacgtagatcgttctctccatctgcttgtgtgttattttagaagcagaagtgctcagggaatagagwgagaccagtagacttcctggctgaccaggacctttgaaggatgtgtgggaatctgccactcaagggaacatgagaaataaaggtgtggacataggagatgggatggtaacatatttgaggagtagtgaggaccccagtgtgaccagagcctagagtgcagggcatgaagtttgagatgaacacactttcagagatggtcgggggacttgcagagatgggggagtttctgacccgccacataaatggaatctcacagtgtatggtattttttcactggcttctttcacttggcataagtgaaaccactggaaccacttcaaggttcatccatgatgtagtgttatagctgtgtaaagtaatatttcttttttttcttttttttttttttgagacagagtctcactctgtcacccaggctggagtgcagtggtgcaacctcggctcactgcaacctccacctcccaagttcaagtgattcttcttcctcagcctcccgagtagctgggattacaggcatgcaccaccatgcccagctgatttttgtatttttagtagagacggggtttcaccatgttggccaggctggtctcaaactcctgacctcaggtgatccacctgcctca

SEQ ID NO: 668149 - DNA, 523 bp, Homo sapiens
ctgcctccatgatccaatcacctcctaccaggctccacctccaaacattggggatgatgcagatccaaatcatatcaacctccaactggggtcccaggatctagttttgagcccccctccaaactagcatacacataattgtcatatttaatctccctaaaacttttctctttaaaggagaatcccctggtcaggcatatgcaaagacacctgtcacactagaagactgagcccaaaatcctatcctacttagcacaatcctccaccaccakgtctcttccaaatgcacctctgtttctgcaaatcctctcctcctaacaaacccagacatacttatatgagttcctctctctctacttttacactaatgtcacatcttaagtaagttaaaccgattagaattcagccttatgcaatcttcccaccactccaatcattcctccattcccctgtttggcccatgagacaaacacagacggtgtctccttgtgaataatatttattctgctgctgactgttctcc

SEQ ID NO: 668150 - DNA, 1210 bp, Homo sapiens
tcggattctttggctctgaccatcacaacttaatcaccagctgatcttcctgaaactttaatcccagcagagttctatctagctcagaatgagtcagctcatttgcttcaacaggtaaaggtcaaactgcatccattatttgtgcacaggcatttccagtctctgtcacccatggctgtcaatccaaaggctggatttacactcagtgtggtctgggttctcattaaccttgaatcgcctcctcctccacagagctgtgacatttaaaatcttatcagagtactctaaaacaaccatcagactgagccttcgggggataaaataaatgatccataagcccaggatgagaaagaaataaaaacagaccttaaagaagtaaggtctccatcaaacgcatcactcacaacacatcattttgtgttggtctctgtttgtggtctacctggaattgaatgatattcatctaatttagcccttcagatgtaattttagttctgaatgccaccttgaaaacagtgactaaccaaaatttccaagaagggggattgtcatttttaatgggtttcaaaaaaaaatgttatacaagtttcaaagactgaggtcttatttttttaatgatgattcatgtaggccatctcaaaaatggattgatttcccaatatttttataccacatcaaatatatctctgtgcccagccaggctgatgggcaatgtgcatcatttatacacatttcactggttgaaaatttatggataacctattacacgtcagatgatgtgacaggaactaggaatggaaagataaatacaaactgggttctgtcttacagggctgccccgtgcagtgaaggggacagccataggggatgaaatgcagtgatagcagcgtgtacacagtacatgctctcaaagcctagaagaggcactgatagaatttgggaagggacattttgatggggagaatgttctaggccgaggaaagaggatgagcagaaacacagtggtatagatgtgaatgccagttcagggaaccttaaatgcactctggtatcgtgttggacagatgggtcttgattccaccattttgtaacctcatgaccttgagttgatcaagtcaagtcgatcrcttgacttttctgaccctcagtttccttgtctgtaaactggagtcattaccactagtcactgaattgctatggggttctaatg

SEQ ID NO: 668151 - DNA, 641 bp, Homo sapiens
cttaagagaaaatccaaagtcagttattaatgcagtaaagctctccctcctcatcaatttttaccattgtttttttttctgtccatccaccctgacctactttcagtccctcagacctgccattcctctagagctgcccacttayggcttctcctgcttagaatacttccctgactaccccagccactccctttcatatggatgaatcctattcatcctttaggtctccttaaatgcacatcctctatgtagtgaggtcacattgctcaccccaatttgtcatacttcactgtattcacacacttcttttggatgactttgaaatttcttccaataatgagttagagaatatttccccagactttacatttgagttcagccccatgactttctttaaccaatagatcgaggcagaagtaacaatgtcccagttctgagcctaagtcttaagaggtctcacgtatttccacttgccttctttgattctgccatagccatgagaacatacttgagctaaactgctgatcccaggaggaatataaaatcatctagagtagaaccatccaggcaagcttcatcagccaagcctagaccagatcagctgttcccccgatgaccatggacacatgagtgagtccaga

SEQ ID NO: 668152 - DNA, 580 bp, Homo sapiens
tttggtgagtgtcaggtatgcaaaagtgttgagtggcagatacagaaagactgcttaaaggcatctgactcagttgcaaaggacatcctttgtccttcttgctgcctgtactatgaatgtagtggttggatcttcagaagcctatttaatcataaggtaatcttaaagatggaagttatgattaagaatgccagaacacaaagataaaaaatatagaagtctcagatgaaatttctgaatcagccttaaactataatgcttaaactgtttaaatgtgaagggataaaatttggggcatttatgccactattttatkttatcgttgttacagtgagtacaatttttaattggtatgtgtgtaagatttgctcagatctcaatcaatggttctaagaggaaaaagcttaattccaagctgcctctctcctgtctatgatatcccaagcatcacaaagtacacttccagctcctcagaccctgtccttgttttgcattgtttagccaaaccacttcttaacttcaagtagcaaatagataactcacattagcattaggttctcttattacaagtaattgacaa

SEQ ID NO: 668153 - DNA, 1183 bp, Homo sapiens
ggtgggaggatcacttgagcccaggagttcaagatcagcctgggcaacacagtaagatcccatctctacaaaaaataaaaaaattagctgagtgtggtggtgcatgcctgtagttcagctactcaagagactgaggtgggaggatcatttgagcctggaatgtcaaggctgcagtgtgctgtggtcacacgactgcactccagagtgggcaacagagtgagaccctaaaacaaagtagtctctacaaaaaaaaaaaaaatacaaaaattagccaggtgtggtggtgcayacctgtggtcccagctactcaggaagctgaggtaggaggactgtttgagtgtaggaggtcaaggctgcagtgagccacgtttgcatcactgtactccagcctaggtaaccaagtgagaccctatctcaaaaaaaaaaaaaagtaaaacgcaataaaaataaactgcaccctgatatttcctttttaattctactttttttaaatggaaaaattctagttggctgaaacctgttatgctgatttcattacccattaatggatctcacatggtagtttgagcatgctctcctacagcaactaatatttaaaataacaaacttttcttccaactataggtagaaagatagatcttatacacacacacactctcacatgaggtatcacctggcaggttcttgagccggaggaataatacaagacagaaggaaaaaatgtgaatcgcctcttctctgtagcttgaattcacctgactgcggcaacgctcaaagtgtagcatcaattcatatggcgaccagttcatttgaaggagttcctttcaggtgaagagatttgttgaggcccagccaaagatgaagcaaatcaaggcccagatgagaggtaactcaggacgtgacttcagtggcctccaagaacagatgcaaagaacccagcggcccagcaattacacagaactgcaaagtgggagaatgcagataggcaaaataaagagtaataagaccacaaccacacctagggcagttcagggagccgatgtcaacatagagaaggagaagtggttgacgggaattacagggggacgaacagccccaggaacagaaaccagccatggaggaaggggtgtaaaccacacaggtaaagtgatacttaccctggaaccagaaccagaaactatgg

SEQ ID NO: 668154 - DNA, 1097 bp, Homo sapiens
atatataaagaaccttctagaattatcatcaattctaacattagttggatgttcaatatgtgtaccagatactgtgctgtttggcttgcaatctctcatttgatcctaacataaccaacagaataaggaattactattctcagtttatggatgggaaaactgaggccaagaggggttatgatacttgtcctttctactaaagagaagaaaagggatttgaattgaaatccaagtccaaaatatggggttttttatttttcttttggtgataaaagattttgctcatttgaaaaacaagatacaagagataatcaagcagcagaggataacagagtgagcatgacctcactactcggtttgagaataaacattacaaacacagttaagatcccttatgttcattccactccctcccagaaaaacccagaacatgaacttggtgtttattgttcctaaacattcctttatatttttactacatatgtgtgtatacttaaagaatgtattatattgttttggctgcttatttaaactttaaataaatggtatactgtaagtatcattttacgattttcattttcactcttcatggtgagtgggtgaaatttattcatgttgataactttagctctagtttatttatgtcatctgctatataatattctacttcataaatgcaccatgacttattattcattcttctgcagacggatatttaaacacctttgacttgtcataattacaagtaatgctgcaatgaacatacttrtacttttctgctgccagaatttgttcagaggacataactagaagtacaatggttgggttatagcatgcctgtatcttcaaatttactagatgttgtaaaattacaccagagtgattgttctaattgccactaccataaacagtgcatggcaggaccagttgcctgcatctatgtcagcacttggttttaccacgctttttaagttttgccaaccctaaaagtatgaaatggcatccagttgtggttttaatttgaatttttcctaatcactcttgaggttgagctgctttttatacgtttatttaactgctagttttcctcttctgtg

SEQ ID NO: 668155 - DNA, 1333 bp, Homo sapiens
tgtccttaataaagcatctgtggctctacatggatactgtgtttgaataacagccccttgaacaatgatgtccctccctccttcaccaattaccagagttgttggggatttgagagctaaacattggaaaagggtactttactccctgtgtagagtgctccagggatatgttctagagaaatgagtatttgaagaatagaaaaagtacttgacatgattcctcattataaaatcagattgtcataattttgatagaaatacattttgttgttyacatcttttctggcttatctgtggttccatttctgatttgaattattttgtactcgtgataaagaatcaatagcaattcaaaggttccttttgttaggctgtatcccaaagagtagggaaagatctttacttcatgtcagtgggtgataccactattaaaggtaacttgtgtttttaaaacaaaatacttttatcacccagaattacaatttcttaaaaatattgttatgctgaatccctcaaacaaaaatggtttatcaatttctttggacataggtagcagggaagaaaaaccactttaggtaaaaaaatttaaatatacttatggagataaataacccaagatgaggatttcttgaaatataggaaatttattaattgaattaatcttgaaagttaaattatgaatgtgataaattcacattttaaagaattttctctgttaattagctcatatgttcaaatgatatttgttaaataatctcttggaatttctgaatctttagtttatataagattcaaattattggctggttcttggtattgcacattcttgttcataaataatgcagtggttcttagaattgaggcacattgagaataaaatcagctaatggtagctttaatatcatgtgaaaaatatatactaatcaaaaaggaaaaagaactaattgattatcagccttgttcacaccattctctagcaaaatataaaatatgccaatttcataatttttagagaaacttgatttgatggtacagtgtgagaaccaaaatattaataagaaaataaaacattgtttctatagaaataatgccctatagtaattagaatactcatctgtcccctctcccttttagagaacattacatttgtcatggtaacacccatggaaataaatttttttgtttgtatgtttctttctcagtttgaagtttttctctttttgtttcagaaaaggggtttggaggtgatggagatttaaccgtggatctatagctgtggccaatcagtcagaagctgcccttgaacaagtggcatcttacgcagaccaacaga

SEQ ID NO: 668156 - DNA, 650 bp, Homo sapiens
gctcagccaagcattcaaacataattaagcaccaataatttgcataacagttatagctctgagaggatggaacaaaatttggaaacttagaattcgattgtttcgacaagcaattcatacaagagaaagtagagtatyggagtgagggcatcgttgcttggaaaccaaatgatatagatagcaatgccatctataggggcagttcatgatggggtgccctccgaagaacctgaaaatgcagttatcttcagaaagttgaacaagtgaaaattttgcctatgatgagattagttatctatagaagtaacccaagagacattctcttaaaggtaatgtcttacattaaaaatatccaatatcacaattgagatgctttggggagtaaagaggcagaaccttgagtcctgactcacagattcacttttcccaatttcatccatcatcccctacattcaacgatctccatcctctgtggacctcagcatcagcagacattgttctctgaactttttaaaatcctaacataccacaatgtgaccatagctctcttcactttatcagttcctgcattatcaccaggtcttgaattcatcaagatctcttgtcactcaacttctcctttttctcctaatctatcaccttcctgaagg

SEQ ID NO: 668157 - DNA, 741 bp, Homo sapiens
taatcttttgcatataggcccaatgacacattagatgctcatcgatakttcttaattgttttggggtaactggatttccatccaagtatcagttttgtgtcaatgtattaaattgaaaatatttttgtatctttacaaaatactggtgtttggattattttcccttccagtttttcttgatgtataatatattactgcaatgattagaatgggaaacatctatgatattctaggaagaaccaaatatgcctatgagataactgggaaacaactatgactaattccttaaaagtaagatctgatcaaatgccacaacaatgtcaacttccatgtatgaagcttgaattcctgaactccaaagtgaggctgtttcaacgttctgacgaacagctccttgactggcactgtgtgggggtggagtggaaacggccctactttggaggaagaggcaagcatttcccaccaagtactgggaaatcaggcaattcaaactctataggctttgggttcttcacctgtacactgaggatgcaacattagatgattcataagagcatataccagcattctatcataacagctactgataatgagtaaacattttaaaatgttattgcaaagtttttttctgttccaaagtagacatggaactgataaacactatatttgattttcatctgatgactggtattaccccaagagaagggagagaacacatcgttttactggtatgtgccatgc

SEQ ID NO: 668158 - DNA, 598 bp, Homo sapiens
gatagaaagcgaccgcacagatgtgttcctgtggcatttgctaatttatctatagtgaagtaaccagaaacagtatggattcaaattcttagagaggaagttgattttttaaaaaaagataacgaagaagaaactacataggagaagcaccagaagagaaagataaaaatgaagaaactaaaaataacatggctcagaatgctgcctaatttatcaaacttgccaacagcagcagttaggggtagaaatatgttctttaagggaaaaaacagacaaaagttatcaaatagtattagtccttaaagaaacaataaaaaacacaaataattgtcaataatacawcttttttttttttttttgagacaaggtcctgctctatcacccagactggagtgtagtggtgtgatcttggctcactgcaacctctgcctcccaggctcaagcgatcctcccaccttagccgccagagtacctgggaccacaggcatgtgccaccatgcctggctaattttgtaactttttgtagaggaggtcttattatattgcccaggctggtctccagtgatcctcccgcctcagcctcctgagtagctgggac

SEQ ID NO: 668159 - DNA, 598 bp, Homo sapiens
gatagaaagcgaccgcacagatgtgttcctgtggcatttgctaatttatctatagtgaagtaaccagaaacagtatggattcaaattcttagagaggaagttgattttttaaaaaaagataacgaagaagaaactacataggagaagcaccagaagagaaagataaaaatgaagaaactaaaaataacatggctcagaatgctgcctaatttatcaaacttgccaacagcagcagttaggggtagaaatatgttctttaagggaaaaaacagacaaaagttatcaaatagtattagtccttaaagaaacaataaaaaacacaaataattgtcaataatacatcttttttttttttttttgagacaaggtcctgctctatcacccagactggagtgtagtggtgtgatcttggctcactgcaacctctgcctcccaggctcaagcgatcctcccaccttagcckccagagtacctgggaccacaggcatgtgccaccatgcctggctaattttgtaactttttgtagaggaggtcttattatattgcccaggctggtctccagtgatcctcccgcctcagcctcctgagtagctgggac

SEQ ID NO: 668160 - DNA, 3417 bp, Homo sapiens
attcttcaggctgttctattggtgtagcaagcatttattggcgcctactgtgtaccaggagcaagcatgttcagtactgggacaataaagataaggcacagcatctattgtcaaaacttgtccacttgtgggactacaaaatggtcttctgttctgtggagagtctgagcaagttgtgaattactgagaagaatttaagacatgacagtgattgatacctctgacggaagatgtatgctgtgggcgcataatgataccactaatcgaactcttttccaaagtctggaaaagggtcattagactgtgtgagaagctccagtgtctgtgcacaggttatgtgaggctttatcaaaacactgtgctttttctggaaaatgtcatgttatttaagtccttagacttgtctctggagacttctcagttgggcagtgtggtgggtcccatcctccccgcccagcaccacctgctcccagccattcctttaggtgtttccttagttgaagagcctgatgaatgtggctgggaatgtgcggctcgggcccctggccttgctgcatgtcatagcagagcatgccttgcgcaacacaggtgagcactgagctagaaatttcgtacagagatctggctgtcacaagccagcatacggggctcccagagcaaggccagagagggagcagggccctgtggcgcattggatggggctgggcagttgcagaaggagaagccagaagtctcctgaagctgaaggttaccatgcagggttggggcgggggtcccacctgggacattctgttggcattccaggcaaggtggcttaagtgccttcactagacccctcaggttaaaagctgtggccgcaggtgaaccagggactttgttctctgtggttggttagtttgcaggtggccgggcctaggtaggggtggaaataaaagtacagtctggcaattctggccagaaaggtttaagtcaggccggtttcattgtgcaggctttcccttacacacttgggaaaatccaaaatgtggcctggtggcttgaatgcctgctgggtgtgaggtgtgggtgcacaagagagggacgccacctgtcagccaagaggcctacagacttctgcgcgcgttgccttgacttgtctctgatcttttcctgatcggacttcctctgcagcagtgaaacctaatttggaaagttcttagtcacaggaggcagtctcgctacagtagtgggcttttccttttctattcacttcttcctttcatccacttttatgagcggccattatgttcctttcttgtttgatccttaattcattggtccagtgttttaactttaaattcttcctgtcaaccactaagctaaatacagaggttaaaaaatgtttgctttttaagtgctactttatttttcttcagttgtgtggggaggaaaacattcctgagcattcatgatgcctgaggcacttgacatatgcccttatgtctaattttctctgcaacccagggaaggacaaatcactctcttcagagagtcctctcaaaatgcgtattttctattataatagtatatgtacataatttatagtacatgtatttgggatgtatgccaagtcttgtcttaatagtatggtatgatcagagcagtgtagagaggccgsgcatggtgggtcacgcctgttatcccatcaccatgtgaggctgaggtgggaggatcgcttgagcccattagttcaaaaccagcctgggcaacatagggagattttgtttctacaaaaaaacttaaaaatgagccaggggtgctggtggtgcatgcctgtggtcccagctactcaggaggctgaggtggaaagatcgtttgagcccgtgaggtcgaggctgcagtgagctgtcattgcaccactgtactccagcctgggcaacagagcgagaccctgtctcgaaacaaaaaaaaaccatgtagagccccattctaggatagagtgggacttagggcattctggggctttcctgtccatagggctgttaatgagagtcagtgagttgaagtgcaaaaagaacttagaatgaagcctggcatatagtaaacagtattccaatattcatcttagccactgttgtgatttcttaaggatcattacttaattcctcaccagtgaatttgaaatgctcaaaacagacatgtaataaaccaagatttttccttttccatgaaggtatgagttggggaaagtatgaaatagggcaagagaaaagatgcattgaggagtcacattcataagactgtattcttcttataagtgggcagaaagctttactcctaagtttcctgatagctagtggaaagagagaaaacacatgtggaaggtggtgtttataaagacaaaaatgtccattgcccaaaatggtaccgggtctggagacgcatacctccttgtggaccccctagaggggagaagccaaggttgcagcaagccccttgctcttttcacccttgtcttctctgtagctcaaagagaaggttctgatgaattgtttgtggcatatgtttggtatctctggtccttagttcctgaacaattctgggctaatgctgtagtcaggttacagttagctttcttcttgatgttcatttaagcctataacttgatttggatcccaccaaactacctatagggccctggaccgacactgattttatttttcttttgctgattctattttaagtgtccattcaacatagaaccttcagaaggcaaggggtaaagttggatcctagcactttaggaggccaaggtgggtggattgcttgagctcaggagttcaagaccagtgtgggcaacatggcggcaccctgtctctacaaaaatataaaaaattagcaaggtgtggtacctgtagtcccagctacttagggggctgaggtgggaggatcgcttgagccttggaagttcgaggctgcagtgagccgagatagcaccactgcactccagcctgggcaagagagtgagaccctgtctcaaaaaaaaaaaaaaaaaactttgggaaggtgaagaaagagtgcagtcgtatttcagagccttgcagagcaaagcatttgatgactgagtggatgactttttaacaaggcagacttcatgaacttttagccacagataattaactccttttatgtaatgagcaccatgcaagcaaatggtgttttaaaaatacgctgtatgtataatcagaagaattggtattagctataccactaattgtgcatacacatacgtgtgtgtgtgtgtgtgtgtgtgtgtgagagagagagagagagagagagagagagagagagagagagagatcaggttctctggagccttttatctctataaggtggggttgatggttctcagcctatctgcctcctctcatgggatgt

SEQ ID NO: 668161 - DNA, 643 bp, Homo sapiens
cctaggcctttggggaaccagtctatcatcaatctttgcaaagctattctttttccaactttattcagaatgctctgccttcaaggtacagattttacataggaaatataccaggtatagttactgagctggggtcatcaatagagatggagcaccamagactcttaagagttctagccatgctagagtgggaagatctatccaccttctgatcgtacggggcagaagcctccaggtcctggagccaggctttctcctggttttccctgtgctgatggcaaatactgaacaagtctcacatcctttacttctaagcccagaaatgcagtctcactccctgacactctctgctctcttctagaagcagtaagcctgactggtagggaaaccaccctgaggggtatgggaaggggaagtctgttcactttccctgtctcccaaaatacaagaggtggggtaacaccctccccaggctctccgagcctacagagctagcccagtctccaggcaaggcccagatgccctgggacttagctcggggagggaggtataggcatggggtgcccatttgtcccgggggttgcagagccctgccccttttctgggtggcagtaggaacacagaagctaaggtcaccaaaatc

SEQ ID NO: 668162 - DNA, 593 bp, Homo sapiens
tagttgattatcatgtttattacgtatagcccttggccaaaataagctaattctcatgtacctacctcatctttttaaagatccaacattcaaactgatataaaaataaagcacagtggtgtgtgtctgtagtcccagggactggaaaggctgaggtgtaaggaaggatagcttaagcccaggattttgaggctgcagtgagctatgatggcaccactgcactacagctcytgtgacagaacgagaccctgtctttttttttttttttaaacagagtgtttcctctgtcgcccagcctggagtgcaatggcgctatctccgctcactgcaggctccgcctcctgggttcaagcggttctcttgcctcaacctcccgagtagctgggaaatttttgtatttttagtagagatggggtttccccctgttggccaggctggtctcgaactcctgaccttaggtgatccacccacctcagcctcccaaagtgctgagattacaggcatgagccacagtgcccggttatgagagagagaaagagagagaggaagagaaaaggaggaggagaggagaggaggggaggggaggggagggg

SEQ ID NO: 668163 - DNA, 593 bp, Homo sapiens
tagttgattatcatgtttattacgtatagcccttggccaaaataagctaattctcatgtacctacctcatctttttaaagatccaacattcaaactgatataaaaataaagcacagtggtgtgtgtctgtagtcccagggactggaaaggctgaggtgtaaggaaggatagcttaagcccaggattttgaggctgcagtgagctatgatggcaccactgcactacagctcctgtgacagaacgagaccctgtctttttttttttttttaaacagagtgtttcctctgtcgcccagcctggagtgcaatggcgctatctccgctcactgcaggctccgcctcctgggttcaagcggttctcttgcctcaacctcccgagtagctgggaaatttttgtatttttagtagagatggggtttccccmtgttggccaggctggtctcgaactcctgaccttaggtgatccacccacctcagcctcccaaagtgctgagattacaggcatgagccacagtgcccggttatgagagagagaaagagagagaggaagagaaaaggaggaggagaggagaggaggggaggggaggggagggg

SEQ ID NO: 668164 - DNA, 593 bp, Homo sapiens
tagttgattatcatgtttattacgtatagcccttggccaaaataagctaattctcatgtacctacctcatctttttaaagatccaacattcaaactgatataaaaataaagcacagtggtgtgtgtctgtagtcccagggactggaaaggctgaggtgtaaggaaggatagcttaagcccaggattttgaggctgcagtgagctatgatggcaccactgcactacagctcctgtgacagaacgagaccctgtctttttttttttttttaaacagagtgtttcctctgtcgcccagcctggagtgcaatggcgctatctccgctcactgcaggctccgcctcctgggttcaagcggttctcttgcctcaacctcccgagtagctgggaaatttttgtatttttagtagagatggggtttccccctgttggccaggctggtctcraactcctgaccttaggtgatccacccacctcagcctcccaaagtgctgagattacaggcatgagccacagtgcccggttatgagagagagaaagagagagaggaagagaaaaggaggaggagaggagaggaggggaggggaggggagggg

SEQ ID NO: 668165 - DNA, 944 bp, Homo sapiens
atatttgttatatgtctaattcctataagaacgtattggaatgcaactttcatttcagtcagtctactctctctttgggttttagaaatagcaagcatgaaagaaagtggtacattgcacatatctatattttaaggaattttttcttctaaaaagcacataatactttgtaagcatcagaaatgccacattaaaatgaactaacaatctttttgttttaaggaaatggaaaagtttattagcaaaagcaatcaaaatgctattattgccctacttttgtgtctactttgcttatacgcttgtggttggatctcatttctccagacagtgaatataagccttttcagtgtttttccattgcttcacaaaagattcatgagaatattttatcaatattattggtaaacccatacatktatatatctatatatacagactttaatctggatcagtaaatgattgatttcagtcttgaatcctgaggcattaaaacaaacaagaaaaaatgtgataatccaatttaatatggaaaaggactaatatgcttcattaaatgcactgtttataaaaacctaattttaaaagagatattttcctggggtagtttttcacaacttttggacacattctctcattcatattgcctgtaagtttcactctctttgatggaaagtttattcaaataaagatataacccgtgtgtgtgtgtgtgtgtgtgtgtgtgtgttaaactttcagcattgttaattgcacattatgttttcatgttctgctccctcacaggtgtgtgtgtgtgtgtgtgtgtttgtgtattaatctttcagaattgttaattgagcatcatgttctgctccctcacaggtgtgtgtgtgtgtgcatgtgtgtgtatgtgtgtgtgtgtatgcatacacacatagaagtgcctttaatcatttttgtaattg

SEQ ID NO: 668166 - DNA, 2044 bp, Homo sapiens
aactttttgttttgttttgtttttttgtttttgagacagagtttcgcacttttttgcccaggctggagtgcaatggcacaatctaggttcacagcaacctctgcctcccgggttcaagcaattctcctgcctcagcctcccgtgtagctgggattacaggcgcacaccaccatgcctggctcattttgtacttttagtagagacgaggtttctccatgttggccaggctggtcgcgaacccctgacctcaggtgatccgtcctccttggtctcccaaagtgctgggattacaggtgtgagccactgctcccagcagcagaacttttaagaaatagaaactattgaacattcttagccggcaagctaacaaaatcagttcacattttagaagtgctactctggtagagaacgaagaatggattaaaggtcagagaaaccttgaaaaagtcctcttctatacttaaacggctagttgtgttacctaaagtagcataaaaatatagggataaagaggtagagattggtgggagagatatttagaaggctttgattaaacataagttatgagacagagaaaggaagccaggatggattcaaatttcaggctgggagatcactgagagagaaaacaccacgatggaggatatttcgaatctctagtgcgatggaatcatccagattgtgttattaagtgtgctgtggggtattgaagataaagaggaacctgtgggsagaatgaggaaaaaggcaggcacaggaggagactggggagggtgtagtgtcccaaaggccgtggaaggaaaaagttttaagagtaagtggtcatgagtccaatgcattcagaagttcatatgacattaggactcaaggattttgttagtgacccaggcagaagacgcattggtatcctggaggtggagagcagactgcagccggctggagcaagggacaggaggaggaagtgcagggtgtgagtgcattcctctttccagaaggcgaggcctggaactgtgccagtcatgttcacagctctgtcaccagcactcaaaacagtccctgattcagtgtggacactttaaactttgtaatgatttcatgaagggagtgagagattctagcaatagctctgttgggtcacaggatccagatggcttctgtagttggtttatttttagctatgagacaatggagcatgttaactatgccaaagggggagaagctactgccgagagagggagctttagggcacagaagcgagaggatacaagatagaacagagttcctaaaggtggtagagtgagatccagagcatgggtcaaagaatggaggtgaaccagaatggagagatgggcgtgatgagtgcagggattgtgtagggacggacccacaaaattatcaacaccatacggagtcacaggtgatagcttctagtttttctgcaaagaatctaatgtcatatgacattagatgaattaagcaggagacaagggataaggagcctgagaaaggtgatgttttgttccacctgttaaggggaatggaagaagttgctgactagggacaagagccctattcttgtctgaattaagaagtaggcgttggaagtgagggcaatctggctgcgacatctgtcaccccattgaccaccagggttgatttggctgatctggctggctaggcgggtgtccccttcctccctcactgctccatgtgcgtccctcctgaagctgagcgctcagtcaaagaggacgatcatccctgatagaggaggatcggtcttcagtcaagggtatacaactagctgagccatcctgcgagaacctccaaacaagctctcaataagtaggcgtaaggtccagctccagccctgcccagattcccaccctctaaggatgaaacactcaggctcacctctatgatgctgtagctacacccccacctttgaccttgctctttgtgttttgggcttatcccccttgattgggattccagtttttccccacttggaattaagggcaaactgtaacggcagatttcccaattc

SEQ ID NO: 668167 - DNA, 2076 bp, Homo sapiens
cttgcccagagtaagtaatccaagaaggtgagagccaggtagaaactgtcacagaatcacttctgtcacattctatttattagaaagaagtaactaagtctagcccacattcagggggaggtggattaggtttcacatctaaaatctaatgtggcagccagaccttagatgcattctttgaaggcatatcaaagaatttgtggatgtattttaaaaccaccacaacctgttaggttacaggaaaaaaaaaaagtgtctaatcctgtttcaaatatagttcaattcattcagttcctttagatagtattagtatcctatggatgaaatgtttcatctttcataatacctcccaaagaggtcctgtcacttttttctgtagatgactttcatttgtttggggrgaagtgggggtataattacatatccttgtggcactgatgagagagagggtacctcctggcttcattctggacctagagtatgcactgaggtactttcaagtttccaggatgacaccctcatgcagtttgaatatatgtccctgccaaatatcatgttgaattgtaatacccggtattggacgtggggcctggtgggaggtgtttgggtcgtgggacagatccctcatgtcttggtgctgttcttactatagtgagtgaattctcttaagatctgctgtattaagtgtgtggcaccacccccaactctctctcttggtcctgctttcgccatgtgacatgcaagcttctgttttactttctgccataagtaaaagctccctgaggcctacccagaagctgagcagatgtgggcaccatgcctcctgtacagcctgcaaatgtgtacaattaaacctcttttctttataaattacccagtctcaggtatttcttcattgcaatgcaggaacaacctaatacataccccttgtctgcctgatccctggggaacatgctgtcctgtgatgctgaagcctgcagctggtgaactcatggtgaactcgtggcccacctttggattcagacaaatctcccagggagtattggccacctcccctggcagactcagtacccctggcccctgctgtggggttaccttgtcttggttgtggcaggcctactggctgttagttcagcatcatccttcaagagaacagaaaggcttagaataattgattgtcatatctgtgtctgaccatgctattgtggacttggcctgaacagccatagaaatgcaaggaatgaggtttgagggacttgggcagttgtctcaaaaagggagtcaaggcagaaatcccttaccctgagcactgctctcaacatggaggtaactcactgtggtaggcagccttttatttcatgatttgactttttgatgagtccatgctagttctcttgtagaatattatgcattcttgatttggccaattatttcctcataatatcttataacttgtttctccaacccttgcctttttattaaaaaaaaaaactcgacattatatgtacagatttgattatattcgggttaaacatttttagaaagaatacttcagtaacattgagtaggttacatcatttcatgttaggcacataatttcagcttgtctcactattagtaacgctaaatttggtcacttggttaagatgatgaccccccctcccactctcttcactgaaaaaggacacacatccctttgcactttataagtaatctacaaataacccgttcaacaacttttcatcttatactttgaacaccttttgtgatcttttcctgagtcaattatttcactgggggttgcaaaaatggtgttctaactatagtagtctgtatttattaactagcatttttctgtaaagaagaactttctttttttaagagacggagtctagctctgtctcccagattagagtgcagtggcactatcagagctcactgaagcctcaacctcctgggtgcaagcgattctcccacctcagccttctgtgttgctgggaccacaggcacatgccaccgtgcctggtaagagcgttgttttaagaaaaccattttaatgaatttctcagtggacca

SEQ ID NO: 668168 - DNA, 674 bp, Homo sapiens
taatattttcaccaacatatttacaaatatrtgtcaagctaggtaaataacatgaatccttgtggagcctagaccattacctaggtaataacataaatccttatagagcttaggccattatctgggattctgactcaattttaattaaagtttaataggatgctattaaacaatgatggatgaaagtgctagatgtgtcaaaaacatttacctcaatcctagcccagttctgcataatcacgcagcttggatcaccactctcattgaaaccttcaaaaacagaattagtaaaattagaaaggaacttggagacagatagtcgctggctgaaaaggtacatcaaccaggaaatagtacagacaaggaaatacaactgggcaaaaccacaggctggggcatacttacgctcttccacctcctgcttcagatactccaaggcacgagtaaaggcggccctcaactcctccagctctttactggagtctaacggaaagtgcaaaaaaaggctttaggaaaccacatagcctggctttgttttattttttatcctatgctgaaactgcctggagacccactatgtacctggcatcatgcaagggacacagaaataaaattgccaattcctgccctcatcacatagttggggagaaagaaatttgaacagaatagagcat

SEQ ID NO: 668169 - DNA, 963 bp, Homo sapiens
ttgaggaaaacaaagcatagccctattaattattttctctaaattagggtagaataactttatggaagataaagcagcctaggtttaattgttgttcaccagtcacgtgataaagtcattgtgaatgagtgttagttgctagttttataattgcagtctctagtttctgaatgaaaaaggatgccccacattatacagaacattaagaactgtttttaaagctgaaacataatctttatatgcaagaaaaataaatactgttactcaattttagcaaatatgtttaaaatgtatttatttagataattttctttgaaaaacaatgtaagtaacaaaattaaaataatatttttggcattatttgttaattcagattttcctgcctccgattaaaaattaggcaaagctgcttataatttatacaaagattacactaaaatgaactttatttcattgttttgctgttatataaaatttttaccaaatgtttaccaagagattaatgttttagagtatgaggatagaaaaataaaagtgacagatttcatagttttaaatctctactgaacatgttgactatgaacaaaatctaattggctaccacagatatataacaaagtttattactaactttatgcaaattggaaaataatttgctaaagcattaaaaatgtcagatttgtagacgtcttgctggcaactcaaagcagaaaatctgagtatatattattttattcctcatttcaaatataaaagttgaccaaartgatgctttatttccgacttcctgatctgtatgtgaaaacagcaacatttttttaaaaattatcaagtatatataatattaaaaagaggaaaacagatggcactaattttcttacaggagtgaagtgctgaaactaaattgttacatctgtaacaacagttatttcacctcttgccacactcatcctgacatacgta

SEQ ID NO: 668170 - DNA, 2483 bp, Homo sapiens
tgccatttcctttttttccccacatttatcagtgctttagccaatgtagtatgtataccagatatttagataacactttgactgctaaagaaccattcacattgtatggtgtttgtctacaacactatatacatcatatctagataatggtagaaaataagagtagtagaattttacttgtatccaactcccgaaccaaagagcccagtattatctctgtaatcttcacaatgatctgctaagaattggcaagagcaggaactaccatccctgttaccactgggaagccaatccccagaaaggtaaagtggggttacactttgagctcaccgaggtagcaagaggattaaaatgcacgttcctttgcaccacaccagaccttcgttttcaagtggattaagttttgtgaatggaatcttggaccaatcatttctaaaatacagtactccctgtctgcttcatctcaacaaatgactttctggcctagagccaggtggtggttagaataacctggaagtcatagagtagaccctgtaattttgactcaccttcagtgtacgctgtgttatatctgtcagttctcattagtatagtggtgagtacccccacctgtcactgtatcatgcctgactgtgagattatgcttttgtgtctgctttaatatcacatgaaccctttattttgttttccagagtgaaaacttgatcctttgtatgaaaaatgcttttatttatttatttatttatttatttatttatttatttagagacagagtctccctctgttgcccaagctggagtgtagtggcacggtctcagctcactgcaacctctgcctcccaggttcaagcagttgtgcctcagcctcccgagtagctgggattacaagtgcgcaccaccccacccagctaatttttgtatttttagtagagatggggttttaccatgttggcaaggctgttctcaaactcctgacctcaagtggtccgcccaccttggcttcccaaagtgctgggattgcaggcgtgtaatcccagccatgcctggcctgaaaatgcttttaaatggcatctgttgatttttggagagaagtgtagaagggagagtgtacatgtaaatgataatggggagaattgcagaggaagattctggctcaaggaagctgatttcttttggttttaatagaagagacatgctttagctatttctcttagccaagtgagagaagtattatcacttttgaccatgcactgaaatattcatttatattgccttcaaatgttcaatttggtcacttcccaaataatcatttaaggaaacttgactataatcactgaggttaaagaacaatcctcacagtctatttaaattcttttgaggtgtttcccataagttatttaaagttagcaagctgtcaaattcttgctattaaatgttgacatttgaaaggaaataattatccagggatgttcattttaaatgaaaattataactttacatttgtataacatcttaagagctattaccctccagtttttctagaaatatgtggattgtatgattctttgagaaatagaaggaagtcagctctgctacagaaatagaaagtttttgcatggcgtgagtttagacagtcactttcttttaagtttcctggtacctctcatttcattttgaaacctaggcataaatcattctttaatgttcatttttattatcattataacctgtcagttcttccactttttctgtttctagtttatatgattagatatgccattagcatttgatgtttggtagaatctttgtatagcctttgtgtgctcttcatctgtcagttctcctggctctgtagtgggtggaagaggtaaagtgatgtgtctgagagctcacagtaagtcaccggccaggaatctagttctagcactgccctagtccttcattctcctttagtattgagaaagcagtgaagaaagaggatttatccccatggcattgggatcttttttttttttttttttttttttaccagattccaagaggctgagctatatctaaataatcatttgatgtaagctctgtgaaaaaaaaatcattattttagcacttatttttcttgtaactgcctaatttatccttctttattgttgttgacatttatggattttccaccttagtatcacagacattcatagatagcaattggccattttaccaattggtgttggccattttaccaacacccctgtctagagaggtaaagttttctgtgcctcacagcaagctagtggccagcagaattgactggaatccagacccccagatgcccgctgtagtcgccttatcaccacaccatggcaccagctcttcaygccttcaccttataatgccgccaaccacatctacctagagaaaggatgctcatgctccctttttcaagagtacatctggttctgtgtgtgagagtgcacaggaattctccaa

SEQ ID NO: 668171 - DNA, 646 bp, Homo sapiens
cactatggaaacacatatagagataaggcctccagctaggatcttgagttattataataacaaataaacaatgtaaccccactgacttcaccagcaggaacataatgaacatgtagcatgagcaataaataaatgttttctatttatgcttctaaaatttaggagctgtttgttactgcagcgtaatctagcttatcatgactgacaaaaacactacacacaaaacaagtctatggctagattctcccatttgcaatctcaaatgaatcgtttttctcctctttttctctttcctgttttttctaccgttttcttctttcatcattcctatcttttccgctcattcaacaaacattttccaggacatgcaatatgtctgcatgttgggttctggagatgcagcagggaacaagacagactcgttcctgcctctctatcactttcaattcaaaggaaaggtaaacatcactacataagactagaaagcatgggatgaagactgtcgtgaattcagattagtctttttttaaaacaattaytgttttgtatatttgagatttgtaatatgttattgggggattcacatagatagtaaaatgattacagtagtgaagcagatttgcatatctaccatctcacatagtta

SEQ ID NO: 668172 - DNA, 822 bp, Homo sapiens
gtctcttctgtaaagctggctctgaaggggggtaaatttgagaacattgggaaacctgaaaaatgccacaaagagcatggcatagggaaaagcaactagaaacgaaagaaaacgataacagaaggttcgccttgagcatctttcactggggaaatgggcctgaagtacagagttctgtttatacaaatcaataaagcttgaatttttaacagaaacatatgggagtattaattatacagacacccagcagagcatgcagatagataggtcatagaaaccartgttgcctgagagcacgtgctcagtaacttgatgttcagagtaggcgccttcgtccctgggaaggagaaaagaatgatgatcataacaccgaagagaaaatggggaaggagggactttgactgcctgtgattggactgaagccccgtgctcacattttgatgcctgtaaagccttcatgaaatgaagtgggcacttactagatttcttgcctcccagattagactccctgaagactcaataactttgatctttgccttttttttcctttttctttttcttttttttgagacggagtctcactctgttgcccaggctggagtgcagtggcgcgatcttggctcactagaatctctgcctcctgggttcaagtgattctactgcctcggcctcctgaatagctgggattacagccacccaccaccatgcctggttaatttatttatttttagtagagacggggttttgccatgttggccaggcttgtctcaaactcctgacctctggtgatctgctcacctcagcctcccaaagtgctgggaa

SEQ ID NO: 668173 - DNA, 1719 bp, Homo sapiens
atgctatacactaaaacctccagccctcttcccctactttgaccacagaatgctgtcaggatctctgtgttccaagcctgaagtgggaagaggcttctctagggactctaatctccagccaagaagacagattcaaagattctgataatgggagttttctaacacatggtctgatcaagtcaatgctaacgggctgcattgcttggttgagagcttccagtgagtttcctcattcctcacttttattcatacaagcaacaaggattatcagacattaggaaaggttctgatatgaaatacagagaccacaacaaacaaacagaaggaatgcaacttagaggaagaagaggcacaaaggagagaattgtggaaacatctttcattaatgctcttaagacagataagatagtacatgaatgaaatgagaaaaggatgctctaaaataaatggagaggaaaacaagtttyggtaattaaaaacatgaggacagaaacaaaaatctcaataagtttggaagatacatttgaagaaatgttaccaaaagttgagcaaaaacacaaataaaataggaaagaattataacaatattagaagactggtccaaaaggacatccagaaaaaaagatcagagaaggccaaggggaagggtgggaaacaatctatgaaataattgaagaagattttccaggactgaaggacagggttgactgatcaaaagggagttgtctccttatgcacagtggatggaaaaaaggatccacaataaagactgtcataaaatttctgagtatttgtgataagaaaagagtctatgagtttctgaaaagagaaaaaagaaacaggttacatacaaaggttcagctatcagaatagcttcagatttttcaacagcagcatctccaaaaattctataggtcagtaatatccaactaacaattatatacctagccaaattattaatcataattgagggtagaataatagcattttcagatatttgacttcttaaaattgtctcaagaatccactggaggatgtacttcaagaaaatgaaagaatcagccacgaatgaggaagacacaggctgcagcacgtggcagagctgagagaggagagggtgatgggtgtgttgggaggatagtgaagctgtgtccacacatggaaggcaaccgcagatctgagtagagacagaggcaccaccatgggctgtccatactaagttcctagctaacttgaggacggggtgtccaggaaagcctggtctggattctgaatgatacctggtttgtcttgaccagaggctgagaaagttcctgctctctcctccatgcgctgctgcctaggtaagctgaggacacttacttcacccacagaaatgtcctgctttgacctaatcttgagagcagactcaggccacatagattcagaagcagcccactctcctggacaggattctctccatacgtctagttcttagcccacactacagccttgccagacaagctgcaggatttctgaagtgaactccacatctctgaggcctcatttgtgaccttgccttgtggtttccccagaaaggactcctggatactctcatggaacctaaagttaggtcatggcctagaggctcagcatgttcttcccccatgggcctctatctagcaggaaaacatgtcgctttctgctgctacccattttccaaaactaaacattatttgt

SEQ ID NO: 668174 - DNA, 1719 bp, Homo sapiens
atgctatacactaaaacctccagccctcttcccctactttgaccacagaatgctgtcaggatctctgtgttccaagcctgaagtgggaagaggcttctctagggactctaatctccagccaagaagacagattcaaagattctgataatgggagttttctaacacatggtctgatcaagtcaatgctaacgggctgcattgcttggttgagagcttccagtgagtttcctcattcctcacttttattcatacaagcaacaaggattatcagacattaggaaaggttctgatatgaaatacagagaccacaacaaacaaacagaaggaatgcaacttagaggaagaagaggcacaaaggagagaattgtggaaacatctttcattaatgctcttaagacagataagatagtacatgaatgaaatgagaaaaggatgctctaaaataaatggagaggaaaacaagtttcggtaattaaaaayatgaggacagaaacaaaaatctcaataagtttggaagatacatttgaagaaatgttaccaaaagttgagcaaaaacacaaataaaataggaaagaattataacaatattagaagactggtccaaaaggacatccagaaaaaaagatcagagaaggccaaggggaagggtgggaaacaatctatgaaataattgaagaagattttccaggactgaaggacagggttgactgatcaaaagggagttgtctccttatgcacagtggatggaaaaaaggatccacaataaagactgtcataaaatttctgagtatttgtgataagaaaagagtctatgagtttctgaaaagagaaaaaagaaacaggttacatacaaaggttcagctatcagaatagcttcagatttttcaacagcagcatctccaaaaattctataggtcagtaatatccaactaacaattatatacctagccaaattattaatcataattgagggtagaataatagcattttcagatatttgacttcttaaaattgtctcaagaatccactggaggatgtacttcaagaaaatgaaagaatcagccacgaatgaggaagacacaggctgcagcacgtggcagagctgagagaggagagggtgatgggtgtgttgggaggatagtgaagctgtgtccacacatggaaggcaaccgcagatctgagtagagacagaggcaccaccatgggctgtccatactaagttcctagctaacttgaggacggggtgtccaggaaagcctggtctggattctgaatgatacctggtttgtcttgaccagaggctgagaaagttcctgctctctcctccatgcgctgctgcctaggtaagctgaggacacttacttcacccacagaaatgtcctgctttgacctaatcttgagagcagactcaggccacatagattcagaagcagcccactctcctggacaggattctctccatacgtctagttcttagcccacactacagccttgccagacaagctgcaggatttctgaagtgaactccacatctctgaggcctcatttgtgaccttgccttgtggtttccccagaaaggactcctggatactctcatggaacctaaagttaggtcatggcctagaggctcagcatgttcttcccccatgggcctctatctagcaggaaaacatgtcgctttctgctgctacccattttccaaaactaaacattatttgt

SEQ ID NO: 668175 - DNA, 604 bp, Homo sapiens
tgcctccaaatcctgagcgaggaataaactagaaagttgaatctggttcctaggactgctgtttctgtggcttcccagtgagatatctgtggaatgttggtcccacataacctagagaagaatgtcctatgcctctgggatgagggtgctggccttgggggggtctctgtggggcttgcttgggctcagatattattctgaaggccaccatttggacaggatgtccaggtctggagggattactggsctcagccacatgttacgcagggccaggccattttctttgacttcttaggccagagacctagtcatcagtaacaaaatctttagatttttgcattaaaatatttcttgtttctttcggaaaaaaagtgaagatgtggtccacttatgcctacattcttctgcaacaacagtcagcggaagctgagcgagcattcagtgggcagggtctctggtacatcccacttcctgccacttacagtgttcttgtgactgcttagtccctgaatgcatttgtgctttcaatttgtgccataggcctttgcactgggcttggattctgcgtatatttgttaaagtaatatttatcgagtgccaaatg

SEQ ID NO: 668176 - DNA, 604 bp, Homo sapiens
tgcctccaaatcctgagcgaggaataaactagaaagttgaatctggttcctaggactgctgtttctgtggcttcccagtgagatatctgtggaatgttggtcccacataacctagagaagaatgtcctatgcctctgggatgagggtgctggccttgggggggtctctgtggggcttgcttgggctcagatattattctgaaggccaccatttggacaggatgtccaggtctggagggattactgggctcagccacatgttacrcagggccaggccattttctttgacttcttaggccagagacctagtcatcagtaacaaaatctttagatttttgcattaaaatatttcttgtttctttcggaaaaaaagtgaagatgtggtccacttatgcctacattcttctgcaacaacagtcagcggaagctgagcgagcattcagtgggcagggtctctggtacatcccacttcctgccacttacagtgttcttgtgactgcttagtccctgaatgcatttgtgctttcaatttgtgccataggcctttgcactgggcttggattctgcgtatatttgttaaagtaatatttatcgagtgccaaatg

SEQ ID NO: 668177 - DNA, 604 bp, Homo sapiens
tgcctccaaatcctgagcgaggaataaactagaaagttgaatctggttcctaggactgctgtttctgtggcttcccagtgagatatctgtggaatgttggtcccacataacctagagaagaatgtcctatgcctctgggatgagggtgctggccttgggggggtctctgtggggcttgcttgggctcagatattattctgaaggccaccatttggacaggatgtccaggtctggagggattactgggctcagccacatgttacgcagggccaggccattttctttgacttcttaggccagagacctagtcatcagtaacaaaatctttagatttttgcattaaaatatttcttgtttctttcggaaaaaaagtgaagatgtggtccacttatgcctacattcttctgcaacaacagtcagcggaagctgagcgagcattcagtgggcagggtctctggtacatcccacttcctgccacttacagtgttcytgtgactgcttagtccctgaatgcatttgtgctttcaatttgtgccataggcctttgcactgggcttggattctgcgtatatttgttaaagtaatatttatcgagtgccaaatg

SEQ ID NO: 668178 - DNA, 2438 bp, Homo sapiens
gcccttttgtaaggttgctaatcccatccatgagggcaagtcctcgtggcctaatcacctcctaagtgccctgcctcttaatagtgttgcactggggattaaattttcaatatatgaattttgggaggacacagatattcaagccacagcaaggtaggggtgaggcagtgcagtgaggggaggggtggtggaagcaggagtgggacagtgatggaaagatgggtgagtgctgaagaagggagaaatggagtggcaggaaggggagaaagagcgacccaatgggagatggtgctgagttgccttctttataattttgcagccccattaagaagaaatagaatcagttctgtggcaaatgaggattttaatgaaagccgagaacatgattactttaccttgtagagaaaatagccttcctttttagaccaattttataagaagacctcaggagaaacagtacatttctataagtgactttattaagaggaaactttctgcagtgtggcaatggcagccttgccatttttcatgtttcaagtgtcgagtttcacttttcctgctagcagagaggccttcagcttagatacctccaatttatttctgtttggctttgcaggccattaagcaatggatttggccacagactcgcccttcctaatgatgtttttcttgggctaatataaaaaaccagttggcaattgccaagtaaccacaggatgacagcttggaggaaggacacaaagggtccaggtatgtaacaaatggcaaaaagaagtcagcacgtgatttaggcaacgctgaacccacagagtgggcaaggtacccctaaaaacatgtctgtaaatcattcgtttggaggggctaacacagctggagccactgtggctctggaaagccaccatcactgcccttgaaagacaaatggaaaaaataaacccttgagtgccaggctcctccatccttcaatgcctaattggttatcctggcacaaaagacttttacaatgtcacaaagccaagttctatgatgataggacagtggaaaagaaaacactaccagcgtcagtgcccaaaaagccaccatgcgaaatgagggagggacatatttgaagtctgagttgtgttctaatttttccaccttgaacagagaatgctctgaaggaacttaccatttaaataaagcacgctgaaagttcttgaaatctgggcgyggtggctcacgtctgtaatcccaacattttgggaggctgaggtgggtggatcacctgagtccaggagttcaagaccagcctggccaacatggtgaaacctgtctctacaaaaatacaaagattagccaggcatgatggcaggtgtctgtaatcccagctacttgggaggctgagacaggagaattgctggagcctgggaggcggaggttacagtgagccgagatctcgccatagcactacagcctaggtgacagagcaagactctgttgagactctgtctcaaacaaaacaaaacaaaagctcttgaaatgttaatgacagctaccatttcttgagtatgcactctatgccttgcatggttcaaagtgctgtatgcccacattatcttactggagcctaaaatctataagaagacaatactattatgatccctatgtccaggatacttgtcaccttgtctcggacacacagaagtatctctagttcgagtggacaaaagacttcctcggatgttgtgttcaggcccctgcttgtaactgaggatctcgtgcactacccctgctgtagctgagtggatattttggaaacccggaatctagtttggctcattctttcatctggctcatagtgatgaggaagggttggtgaaaattcaagttgaaagtgtcagctcagatcctgggctatctccatccttatccacctgtgaatgtacctcatgatagtcctttctttctggcacattgcatcctcctcaatcctgcatcctcactctcttgacaacttgaggcttggaagacttcaggtcatcaaaggagataaacttctctccccactgattttcatatccatacagaaagagggtgaggtgtttgctcttgatggtagccttgtctttggaaagcagcatgctcagttcaccctaattgttggtttgctgggactataggaaggacattgctctcctctaccagatgagacaagaagtccgaggcttagagaagaaaagatttgctcaactgaatacatttaaaatgtgaaagagctggaatttgaacccagactcccaaaccccagctcttaaccaccatgacaggcatggcagcaaatctaagaagctgttccagaaataaccagtagtcattctcttcagatctgtccaaacctgatttctctgccagcaaagataagcctggactgctgagttttcactgtcacgcctcctcac

SEQ ID NO: 668179 - DNA, 511 bp, Homo sapiens
ttggagaatagttaaaggtgttggaaattaagtggaaaaaaacaaattataaaacacttatgtgaaagtagagattaccaggagtggggtagagaagggcatgaggagttatttaatggatacagagtttctgtttgatgaaaaagttctggaaatgaatagtagtggtggttgtacaacattgtgaatgtacttaatgccacaaaaaaaawtttttttttttgagacagagtcttgctctgttgaccagcctggagtgcagtggcacaagcacagctcactgcagcttctttctcctgggctcaagcaatcctcccacctcagcctcccaagtaactgggactatcagcacaagcccagctaatttttgtattctttgtagagacaaggtttcaccatgttgcccaggctagtctcaaactcctgggcccaagcaatccccccaccttggccccccaaagcgctggcattacaggtatgaaccaccacacccagccagagttgtacattt

SEQ ID NO: 668180 - DNA, 1076 bp, Homo sapiens
tggagacaaacatccaaagttcctcaaactgtgaagctgctgaaatgtaaacacatttataccaaattatttgagtcgttggttccatggcatttcctacatactgaatgacctatgaggttactagaataaatacatgttttgaataagcttcccatttgttctagtccaaggcaatttcacaagcatgccaggccatctggcctaacagttaaaacttcacggctcagcatgagctctgccagggttccaatctcagaaccactacttcccagccaggtaacctcaggcaagccacctaacctctctctgtctcagttgcctcatctgtaaaatggggagaataaaaatgcccacgttacagggttgttgggaagattaaataagctgatctactgcaagctcttataagatatgtgcctggcatatagaaatgctcaacaagtgccagaggcagttatctggctaggtacttcatacatgtttttgaatgaataaatggattggtaattaattgaaagtatacatgacatacttactaaacgtacttcatctatgtgagggagaaattctcaactgtatacagagaaggacttaatcctctgaaacagaccaactcaactgagtcagcctggacttggaggctactgtcagttgtgttaggctcaaggccacaagctcaggtgttctgaaaactaatatttgcatgttactctggagcaaggttccaacctcaatatgtcacattaacatttaataaccagtgtgttcaaggcctcctagtttatccatcaatgaaggctctcaaagctttaaagagacaatcttctaaaccacaaaacacagctatccttctctcctccatggccatcatatgcccattcctttttaatcctctaagcaatgtacaaggtctagaatttctatttctctrgtctaaaacgtatacccatgtctggatttgagatgtttgcacatttgtttcttaggaatacaggatgtactcagactactgtagccttcttgtttctcatctttaatatgtctgaaatgtcttctataatatatgcaaataa

SEQ ID NO: 668181 - DNA, 616 bp, Homo sapiens
ctacaactagacactaaaccaaactctgaagttaaatgggcagggaaacaaaataaggatgcttcattctgtttttattctttcaactgtcagcagtataaatgactgayacaaataaaaatcaaataataaaatgtagggggataatagaaatcgcttacaacactgaaccccacaaggaaaaatgaagtgaaagacaaggaacatccccaaaatgaaaatttcctctaccacttaagcttcaatttgattacaagcgtccttgataacagaatctgaggggttgagtatgaagctggtgacaagactggcatgtcttcagcacagcaaggccaaatctatgtaatatactcattaaccccaccctgagaacgcccagttggaccagataaataaataccacatagtatgatgctactaaaggaatttggtcttgactggtagtcccttctaagtttgaatcttttcctgatttctatggtatcagttaccagaatcaaatgggtgtctctcttgactaagtttcagcgtcattaaataacactggcaataagcaatgattctgataggtaggcattttaaatcagtacaattcattcagagggcaatgcctaca

SEQ ID NO: 668182 - DNA, 616 bp, Homo sapiens
ctacaactagacactaaaccaaactctgaagttaaatgggcagggaaacaaaataaggatgcttcattctgtttttattctttcaactgtcagcagtataaatgactgacacaaataaaaatcaaataataaaatrtagggggataatagaaatcgcttacaacactgaaccccacaaggaaaaatgaagtgaaagacaaggaacatccccaaaatgaaaatttcctctaccacttaagcttcaatttgattacaagcgtccttgataacagaatctgaggggttgagtatgaagctggtgacaagactggcatgtcttcagcacagcaaggccaaatctatgtaatatactcattaaccccaccctgagaacgcccagttggaccagataaataaataccacatagtatgatgctactaaaggaatttggtcttgactggtagtcccttctaagtttgaatcttttcctgatttctatggtatcagttaccagaatcaaatgggtgtctctcttgactaagtttcagcgtcattaaataacactggcaataagcaatgattctgataggtaggcattttaaatcagtacaattcattcagagggcaatgcctaca

SEQ ID NO: 668183 - DNA, 630 bp, Homo sapiens
tccataccatgttcaattcttggttccaaaacaattctatgctttcttttaataaggtttggcttattagccaaagtgggcttcatggcattcaatggctgagacctgtatatacctcataaaatggaagaatgaggcaggtgtgattcagattgtctcctcacaccccccagcacccaacaccatttgatttttctggacattttatgatgaagtgttcttgtctactttcacaaaacagaataatgaaaagtaactattatctaaaataataaaatgctcgaagaagagtgatttcttttttagaatgcttgcctcacttctccactttgtatgttacaaatctccatttcaccrtcttaccaccattttactcatctctaccccaagcctcagagcatcttctgtggatgtgcattcatttattgatacaggtacattgctaggcattaagaattccaaagataaaagactgaaatctgcagggagtccacagcctagttagacagaccaggaagggaaactaattactgtatggtgggttatggtgttataaagctatacaaagaatgctatggcccataatggccatccttgaagtttttgagagagaagggaaactatctggtc

SEQ ID NO: 668184 - DNA, 663 bp, Homo sapiens
gcttctacctggagagttttccctcagaaagcctcatgagtctcccctgtcattatttagtctctgctcgagtgtcacctcgtgaggaagtacagtgtaatagttataaaaacagacccagaagccagactccctaggtgtcaatttcaatgttaacatttagcatctgtaaggccttgacaaaattaacttctttgtgcctcagtttccccatatataaaatcagaatgattatagtatttacytcacaaatttgttgtgaggattaagtgagttaacatatataaagggcttaaaagagtataattcagtggcccaggacaaacacttgaaataaaggatttcctttatttcaaaaaaggcaaaaggcaataaaagaaaaaaaagaaggattaccttcaactaatttgcttcttagtaaatgactgagtcattgcattactcttcttttctaggacagagataaaagcactttgcaacatgaatctgatctcttaaaacctctgcagcagaggcccttatatctgcccactcccagttgcttttcctgatcctttgacacctttaacagacacttgcctgtcctcaaacattgtcatgtgtaaaatactacaacgtgtaaaaaggaaacattttgcatacagagatttctgcttgcacttg

SEQ ID NO: 668185 - DNA, 1495 bp, Homo sapiens
tgaggacatatggttacgttcttagctaaaatcttaaggcatttaaactttgcttaaagatttttagaaatagtggcatatagactgtggagtcagaaagtcctggggtttctttgggggtttttttgagacagagtctcactggagtgcagtggtgcaatctcagctcactgcaacctcttcctcccgggatcaagcagttcttctgcttcaacctcccaagtaactgggatgacaggtgcccaccaccacgcctggctaatttttgtatttttagtaggggtgggggcttcatatgttggccaggctggtctcgaagtcctgacctcaagtgatccacctacctcagcctcccaaagtgctgggattacaggcatgagccactgtgcccagccagttgtgggtttttttcttggctatgctatttaacctctaggagccttagttattttttgtgtaagcggggcaatcatgttgatcttattaagtagctgtgaacattaaacaaggtggtgtaaatttaacacaacaggccgggcacgctggctcacgcctgtaatcccagcactttgggaggccgaggcaggtgaatcacgaggtcaggagatcgagaccatcctgtctaacacggtgaaaccccgtctctactaaaagtataaaaaattagctgggcgtggtggcgggcgcctgtagtcccagctgctcgggaggctgaggcaggagaatggcgtaaacctgggaggtggagcttgcagtgagccgagatcacgccactgcactccagcctgggaacagagcaagactccgtttcaaaaaaaaagaaaagaaagaaaaagaaaaatttaacacaatagtgcctgcgatcaataaatggtggaaatttttagagctcaagtgattcacgtgttagcaattatgttccttgtcaatgaacataatttaggtttctttgttcagtggctacaaaatttaaacaatgtataatacaaagtgatgctttctaaaatgattatatgagtaatattatataccacttttagagtttgaagtattcagaccaagtttgccagcagaagaaagcaaggatattacatggtttctgtgtctgttacaccctttgccacagtaatgcttggtaacaaccaccaaaccttagtagcacacaacactgtcttaatcacttgtgcacatggaatcagctggaaattagctaagcagctttgcttatcttggctgggcttgttcacatttgtagggtcaactgctccctgtgtcccaatctcccaatagcctagcccccaaatcatatcttcagtcttgggcaaagcacaagaacaaaagccgaaagaatacaactaaactttcaagctctgttttcatcacaactgctaacatcctcttarccatggaaaatcacatggttgagttcagaatcaagggacgggaaaatatattccacctcttgatgggaattgctccaaagtcacattacaaa

SEQ ID NO: 668186 - DNA, 604 bp, Homo sapiens
ttgagtgttagtcttctatgaagactaatctgagtagcagattgtagtatagctctgggattagatgttgttcggatacttttataataatctagattagaatgatgagagcttccgtttgaatggtagcaatgggaaagggaagagaagattcttaagggtatgggaaaggtaacaagatgrgctgtagttggagttgacagaggaaccctggatatctggaggcactgtgaaaataaaggtagccagtcaaatgttaaagatttctacatactatggtgttagtttgatttctttaatagacaacttaatctgtaaaatcaacttttttcccctcattcaggctgcagaaacaggaagtggcaaaactggtgtaagtaataaattatatttactttctctctaaaagttgaattttaaaataactttgaacagtagtttttactttgaaatatttaataaaatagcaacctccaaaaggtaaggaattaattacttgctactgaaaatgatatttttgttgccagctaattatgaagagctaaaaaaagtatgaccttaagaacatagttttaaatgggcgttagagagttacaatagcttt

SEQ ID NO: 668187 - DNA, 674 bp, Homo sapiens
ataaatatcagatcacattgctcagattttttccaaacttcagaaaaattttgaaaaaaataatatgacatacactttaaattttattttattactgtggccatcaattatgtgcttcttatatcccaattataaggaactctagaagaggtcatagcgatgaagtgcctggcatatagtaaatacacaaatacttgttagaggaatcaatgactctaaccattggttattttcctaatacagtaaattagtgataatctccagtttcattattcttcctcttttaaaaatattcctttgtatacctaaatgtaccatccctatttgaattactgcccgcttccctcactttgaaaatccatacatctactacatatttttctatttgtggttatctgaactcagacttaacctgaagcagatccatttctgtccccatatcatgcctaaatttacttcttgagattactatgccctattatagayagactttcactcagggacaaagaggagaattactggtgaagagaagctttaaaaataggggctatttttcttagataacaaggattctggagacaagagctactattattggtgtgaaggctcaatgacatcagggtgtacacctctgcaagtctctcggcccttttactctcagctaaaatgtggct

SEQ ID NO: 668188 - DNA, 2432 bp, Homo sapiens
aaatggaattttaaggatggatttctttagttggttttggagtttctggagttctctgtttaaactgattagacgccaaaatggtaaggactctacttctagtagtatggagaatactgatagtccttggcatgaactgtgtagacatgctcaaagtaaaggctttgagtgctgaatctttttcaaactatttcagttgaagactttattttgtgtaatgagcccagaaaacatatcagtcatagtataatagtataatagttaaaagcattggctctagagctagaatgaattaatccaaatttcaactctcccactgtgtaactggattaacccatttatgcctgaggttgcaattttttttttagtttttgcaatcagaccttggtgatgacattgagcagtaggatataaataactcccacatgcttagggttccaataatggaacactagggataaatgggctaatagctatataacatagacagggcacttaatcttcctgtgcctcagttacttcttctataaaatggggattataatagtacctacctcataggtttgtggtggggaagaaataaataattacatcattgcatggcacatagtaaactttcagtagttaatgcaactgtttttgtttttatggttacgggatgaagttttctatttcttgaacccaattgctctgttttttgttattattattagtcttttatcattattttttctggctgctgcaatacctacctgggtctttatttctcccaatgctatcataaatgttttagatcccattagctaaaaggatcctttcctacctagagtccagactcaaaacagaccacttcatgcctctccatgcctaaataagggtcccttcacccactatggtagtgtagytattatatctcttcatgcctgatgtcctgggaatataactaaaactctagataggaagaaggatcagaaactccccagcctaattgtagagaaacccattgcagcctatctgagaaatgggaattttgcttgtgtctcacacccctagcatcactgtctcctgagccataaaataacagtaaacaaagttctcatttatgtgaaactttaacagcatgcatcaatcgagagatgttcaaataccctgggaaaactattcaaacaaaagcatatccactcacacaaaaagccacaaagaaatatcctctgctcttctttcttgctcttgctcttgctcttcaacatcttgaaagagttttatggaccatgggaagtaatacgtctttgcagctgacctagttgtcttaccacaatagtagaggtttctagcctttggttccaggtattgttaccaatttgactagtgctcccaattcatcagttactggtactgaggctcatagcaatgatgtcttggctttgcccagaaacatgaacacttccaccttatcttgagccaaattaagcctatttaacctgcaaccttccatagtcaataaggttacataattgattaatttgtcaccaaggccccatactcaagtatatttatttatttttggaaatggagataacctcagggaagttcctaaggccatctacagtgtttgtcatatgaccttttaccagccctactcttatacacatttttctcaccaagaaaaatggagaatttaaggtttataacaactcccagatattgaaccaaattaccattgaaatcaatatgccctcctacatttttcttaatctgcttgatcaacttgagtcagctgtgatttgtatcagctgaaactccaggacaggattagagggtaaggaagaagttggggggaagggtcttatctccctatcaatatcagaaatattttttaagtattcatgaaagactgtgttttcagatccttatgataattttgagtacaattgaccctcgaacatgtttgaactatgaggtccacttatacatggattttttcaataagtttactgaaaattttcttggagatttgtgacaatctgaaaaaaacttgcagatgaaccatgtagcctagaaataagaaaaaataaaaggtatgtcatgagtaaattcagtataaaatgtatttagatattagtctctttatgtgttaattgactatgatattgataacagtaagatattagtagtcaagtttctgtggagtcaaaatttatgtgtggattttctatttcctgggggttttgtgctcttaccccatgcatatttccaaagatcaattgtgtttggtaataggtttgaataaatgttaacatatttatgtaactctgaaaaatacacttttaagcattacaaatgattggaaaaaagaagaattatttaataaataatctttctttggtagatgggaaccagtaaatatcaaaggccttagaaacatgtataac

SEQ ID NO: 668189 - DNA, 396 bp, Homo sapiens
tatctgctgaccttccctccactattgtcctatgaccctgccaaatccccctctccgagaaacacccaagaatgatcaataaatactaaaataaataaataaataaataaaatattttaggaaaaaaaaatttggaattatatatatcactgtagtaacagcagttacctctgggaagtaaagtaggagaaaagcgggcaggactrtatatacttgtgatatatacttatggtatcttttactataatatattatttgtataacttttttttttatttgagacagagtcttgctctgtcgcccaggctggagtgcggtggtgccgtctttagctcactgcaagctctgcctcccaggttcacgccattctcctgcctcagcctcccgagtagctgg

SEQ ID NO: 668190 - DNA, 613 bp, Homo sapiens
tagaggaaaatagactagactaacattctgtaaagaagtrtttaagtctgtaatatcatgagttgttaattgagggaagataagaaagagcctgactttcaaatgcttccttcattacatttgcctttatggaagacagctcgatttttttcacatgaatacttgcataaacgtgaataaatgaaaattttcctagtacagtatcatatatgtttggctactgatattacaataccaatcgttgcacaaagtggttatcatgattcatgttttgttttgctgtcagacatgttccactgattctaaaagggaaatagcctggaaacaactgcagaatatcctatatattatatgaatgccactaacaatggtgagaatgcaaaagtaattgagttgtgaagacatggttcttgccttttatggtcaatgtgtaaaactttgtagggctttgccaggtgaacattaagcccattattgcacaaattaaaaataagaattttctttctgccagaacatgagcacctgcaaaggctcgaaaaaggctttgtgttggttatcagcatgagaccctctcttcatggaacagctgcctgacacgcagcccaaacgtggc

SEQ ID NO: 668191 - DNA, 654 bp, Homo sapiens
tgtgatttttatttataattatgtttatctaatttttgtttttaattctgtttatgttaattctgttttaattcacattaaacaatacattaaaaagatcacttgtgtttgttaaaccatccctgtttccygggtatgaaacccacttgaccatggtggatcatatttttgatatgctgttggatttggttagctagtattttgttgaggatttgtgcatctatgttcatcagggatattggtctgtagttttgtttttttgttatgtcctttcctggttttggtattaagatgatactggcttcataaaatgatagtatttacctcataggatgtgtttgaaaagtgagtatatgggtatagtaatataattttaactacctaataaattttagcttttataatcattgtctccttctgcccattctgcttttccttcttctccttcttcatttcatagattaagaaattaggcctgagagcataactgtcttttccaagtacacataaacagtacaaaaaatatacatataggccactggaacagaatagggagcccagaaagaaatccatccatttacggtcaatcaatttttgacaaagatgccaagaaaatacaatagggaaacaagcatcttttcaatacgtgatgct

SEQ ID NO: 668192 - DNA, 627 bp, Homo sapiens
tcaacttgtacgatggaagccgtgattaagctgatttcaaattttctgtaacagagatggtcagtcttgaaatgcaagaggagagcaccasgacgtgagagcaggtccaggcgacagctgctcctaaatggagattttcttgtattattgttttacagatttccacctgcatctcttaaacagtcatgtcctcattacaatttttcctgggcaccagccatgggacaggctctgtactaggaggctggttagttccattgttcagtgcatgggcttggtttgggtcatcatgcctgtgagttctcagcaggcacctccttcttcaaagccttgacagggatgtcagtaggcagagaataagagtccgtgcaatgttagctacaaccatggcaatactaatgccaaatcaatgtgagctctgactcccagcagcctgtaaagtcaataaaccatctccacttggaagatggacaaatgggggctcaggaacattaagtaatgtgctgtattagattcctactgctgctataacaaatgatcacaaacagtggcataaaagcaacacacatttattcatttgaagttctatagttctgaaatggggttcacttggccaaaatcgaggtg

SEQ ID NO: 668193 - DNA, 540 bp, Homo sapiens
tttgtcaattcctgggaataccgcagtaaacaagagaccttgattctacactctctaagcaagaaaacaaagatatacataagatgactatctacatgacatctattacacatctaatacatgtggtttaagagaagaaacctagatgtccaataaaaagatttagatttaagatcagttaaattacrgaaggttcatgttgtagaatataatacacccactgaaatgattatataggttatacagaaaaatttatggccatggaaagacgtccacactgtataaactgaaaatagttaatattaatagtgtagagtatgatagcattttgggtaaaaatataacaagacatagatcagcactaacaacaacaaaaaacaaactagaaggatatatcagtacatcaacagtagtaaacagagttgtagaattatgagtgactatgctcttctgtattttctgaactctctgcaacaagcatacatcttataattagaaaaacattacaggtttctattttggaagaaaacaaaacattcc

SEQ ID NO: 668194 - DNA, 585 bp, Homo sapiens
tgaagagcagtacttttttttcagagtagcataattttttttttttaaagatcaaatctcaaaattatagttcacttagaagaactttatcctgtagaattctgttcggaggcacaatggtgatacagacagcttttgctttcatttgtattttatgacagtggaaatcaggagtattttcagggagaaactgtgagagaaatgacttggctgaacatctgctatgaagcttttatctgaatctgaggctgcagtggatgaccccgaaggatctccactcccaacttttagattatacaagtctaatccaaattctttcttgccaggctttacgttaacaagaaagatcactgtttgctgccttcttcatctgtttcttacatagcaaattacttcctagaatgtctgaagatttgacagctgtatttgatctttattttgtcattggccatgatatctctttaaggggagatggtttcattttatagatatggaagcagaggccatctgaggttaaatggtttgtcaaaatcataygtgaactatgtaacaccaaaggctaaatacggcactagggatatttct

SEQ ID NO: 668195 - DNA, 1805 bp, Homo sapiens
gactgccttgctgcagcaattggtatcctgttttgtctctgtagtctatctccaccccctgctccatttcagccagatgtgtatttagagtcttcccaagtcctctatagccttgtctctgctatttgtctctatatattcagtaaatttctatgtcccaagtggctgtgtatgtgtgcatcaatgtggggttcttagagcagagtgaggcttagatcatctgaaccaactataaaaacaaggcttggaaattacacatggcccaaaaccaggtaaaatgtaggcaattgtgatgtctggaggtttagtctggtgtgtgaaaactggcaatgaattttttcagtttttatctccattgtgacacagaaagattagtaggccatgtagaaccacttaatctggttccaccaataaagaaaaggaaagtagtctttagtgaataagagcgaatgtaagttagatagtacagcagggtctccagctaccttagaggttcagagaagggcaatgtttgggaaaggatcttagagaagagtaatcaggtgaaactacagagttacagagtcaaggcaagtggacaagagcaattctggagtctaatacaatataggatgcattactcatatggggcaacaagaatggaggggataatatatgagaaatagatgctttgtaaagaagggatatgagatcacgcctgtaatcccagcactttgggaggccgaggtgggtggatcacgaggtcaggaaatcgagaccatcctggctaacacggtgaaaccccgtctctactaacaataaraaaattagccaggcctgttggcgggcgcctgtagtcccagctactcgggggcctgaggcaggagaatggcgtgaacccgggaggcggagcttgcagtgagccgagatcgcgccactgcactccagcctgggcgacagagtgagactccgtctcaaaaaaaaaaaaagaagaggtatgagaagaagagtcatccaggaatccataggaagtctccttttaatggatcctaggtctagaatacatggcaatctcatgtttcttaaaagagtggggttatgaaaatacttacataattcctgcttctgagagggtgaataactcctcattcagatgggatcaccagtgatgtagctttgagaatgtgaggtacacaaattcaaaagaaagtagcatgacagcccacgtgggaaaatccaacttgagctccaaaaacatcttgcaacctctaacatagcttttattagaggtaaacttggctttcttttcaggtatttatttttattttcatgaatcaagctgataaaatcgtgaacaattgtttattaaatatttccagctacaaaatgcagctttggaaaaactgcatatctgtattctgccatatcctatgcccattattaaataagataatgaactagattacagatttgtccaaaagactggacacatgaccgatagatagattcaaaatattttgaagggattgaaataattatcaaatcaattttaacttcacgattctattatcacagcattgaaaaggtgaagattctgatttgatatcccagtcctgcaagccatcaccctcctcaccacaccaagcacaagcctgataggcccttccacttgttacttcatttccacaggatctataactcccacctattctttctctctttcttctgagacaaatggtagatctttgacttagtttaagagtcactttggccaaatcgtacaaaatcttttactttcatttaaaatctttgtatctcattgtggc

SEQ ID NO: 668196 - DNA, 1315 bp, Homo sapiens
agagaaccgctrtgcatgctggatcctcaactaattttctgtatgaataaatgtgctacacactttccatgtccatacatttcctccatcacttgtaatgactgtatcatattctactgtatgtttgtttcatgtgttaacctttctcttaatgtttccaagttttcaatattattgaaactgcctttgcaaaattataactgaggaaattaagacagcgaaagaaatcagacctaaccaactccatcttgcttctaacctttaagatgtccttgtttattcctggacataggctgagctaactttgggaaggaattcatttcatggtttgactattggtatcacccctttcccaaaaagaccccctttttgcctggggaccattctgcctttgcaggactaacaaattagctataagattggaaattacagtttaggggtcatgcagcctctggctccaggagtctaaacctccccacattgttcctggggataacatcacattgtaaaacctaagatcagtgcttgagttattttgcagaccctgcactctgatggaccatctgaaaccacccagaccggtcatctggctcaaccagttctgccatccctcccaagaacagaaaacagcaagaaaaactcacttcgagcccctgtgattccatctccaacctgatcaatcagcactccccacttcccaagctcctacccaccaaattatctttaaaaactctaattcccgaatgctcagggagaccgatttgagtgataataaaactccggtctcgagcttgcagtgagctgagatcgcgccactgcactccagcctgggcgatagagcaagactccgtctaaaaaaaaaaaaaaaaaacctccagtctcttgcacagcagattctgcatgaattactctttctccattgcaattcccctgtcttgataaatcgtctctgtctaggcagtgggcaaggtgaacccattgagtggttacattataacaagtgctttgataaaaattatgcactcttgtgctattatttcatcagaaaaaattcctagaggggtattattaatcaaagggtatatttatttatatttcattatactttaaagaactagattgtaatacttacagtacaaaattcaaaagataaaacgcaataatccaaatccttatgaaacaaatataaatctcttttctctcagcctccaaattctcttccccagaggcaaccactgctgtcagttttgtgtgtgtgcacgagttgtatactttcagacagcatttgccaaataaatatttgtatgttttatac

SEQ ID NO: 668197 - DNA, 1315 bp, Homo sapiens
agagaaccgctatgcatgctggatcctcaactaattttctgtatgaataaatgtgctacacactttccatgtccatacatttcctccatcacttgtaatgactgtatcatattctactgtatgtttgtttcatgtgttaacctttctcttaatgtttccaagttttcratattattgaaactgcctttgcaaaattataactgaggaaattaagacagcgaaagaaatcagacctaaccaactccatcttgcttctaacctttaagatgtccttgtttattcctggacataggctgagctaactttgggaaggaattcatttcatggtttgactattggtatcacccctttcccaaaaagaccccctttttgcctggggaccattctgcctttgcaggactaacaaattagctataagattggaaattacagtttaggggtcatgcagcctctggctccaggagtctaaacctccccacattgttcctggggataacatcacattgtaaaacctaagatcagtgcttgagttattttgcagaccctgcactctgatggaccatctgaaaccacccagaccggtcatctggctcaaccagttctgccatccctcccaagaacagaaaacagcaagaaaaactcacttcgagcccctgtgattccatctccaacctgatcaatcagcactccccacttcccaagctcctacccaccaaattatctttaaaaactctaattcccgaatgctcagggagaccgatttgagtgataataaaactccggtctcgagcttgcagtgagctgagatcgcgccactgcactccagcctgggcgatagagcaagactccgtctaaaaaaaaaaaaaaaaaacctccagtctcttgcacagcagattctgcatgaattactctttctccattgcaattcccctgtcttgataaatcgtctctgtctaggcagtgggcaaggtgaacccattgagtggttacattataacaagtgctttgataaaaattatgcactcttgtgctattatttcatcagaaaaaattcctagaggggtattattaatcaaagggtatatttatttatatttcattatactttaaagaactagattgtaatacttacagtacaaaattcaaaagataaaacgcaataatccaaatccttatgaaacaaatataaatctcttttctctcagcctccaaattctcttccccagaggcaaccactgctgtcagttttgtgtgtgtgcacgagttgtatactttcagacagcatttgccaaataaatatttgtatgttttatac

SEQ ID NO: 668198 - DNA, 674 bp, Homo sapiens
taggatcatgttaccttgatctagtaagaatggggcttggacattattcctgagttatcatttcacttataagataaatatacccatataaaagcacactgaattactttattagaatctatgaagaaaaaggctatccctcaagaagaacatgagagagactgtcatgtacttgaacccccatggatacagatgagcaggtggcaggtgctctctagctgctgctcactgctaatggggttatgcggttacaagggcgtgcatcatttcgcacacccagcatttgatgcataccccttattcctctcccataatcatctaagttgacactgtgatgtttttgaaacttctaactgtattaaaatattattttcatttctctgcttttcctcctgcttcacactctctgtaaaaacttcaaatatcataagaatatataactttgtgaaattctgccacagtggaacctacaacaaagaaccagtgttagcagcttggaatgttttwcttcttgtattatttctttggatattgcatatactaatacataatctcttcttccaaaaatgggatgatgctccatctgttgctttaaatctgctctttaacacttggtatatacttttgtccctctgtatagatgaactttattatctgttaatggttacagagta

SEQ ID NO: 668199 - DNA, 658 bp, Homo sapiens
tttgcatttttctgatgatgagtgatgttgagctggaagagaagttcaatgaccttggccaacccatctccttctctacacctctgcccacaccaggtaaattatgtagaaattagaccagataatgtctaaaatcccttccagccctgaatattcatatggtaaattcttccccaacattttgttatattctgagttttattctcttccttacgaaggcaactaaagagcattaggggagaaaagggaaaagcaaatgctatagaagtgtgtttattaaccaacatagasaaataaaaaggcaacagaggggattctatttatatctccctcaaggattatgccataatctgtattatttgattttttaatgcattcattcagagctggagccctgtagggtgctctttaagcctgacactgaatgaaataattcaattaaaataagcttgaagccttttcaaggcattaaactccctgaagagaagatttaggactggctcgagttggttttagcatcagcattggtgagaccataggaaagcatcggaagggtttggcaatgagtgattctggaggcattagaagatgtgagttccaggctgcttggaaagggactatcaatattggaactgtgcttcagggaaaacagactctt

SEQ ID NO: 668200 - DNA, 631 bp, Homo sapiens
ttttttgagacggagtctcactctgttgcccaggctggagtgcaatggcacaatctcggctcactgcaaccacggcctgccgggttcaagcaattctgctgtctcatcctccagagtggctgggattacaggtgtatgccacgatgcccggctaatttttgcatttttagtggagatggggtttcaccatgttggccrggctggtcttgaactcctgacctcaggtgatctgcccgccttggcctcccacagtgctgggattacaggtgtgagccactgcgcccagacggtcatctattttttaccgaggaagaacccaagggtcagaaaggttaagtaacttgctcaagattacacagttaataaggagaagagcctggcttcacaccttggcagtttcactccagaaatcactgccttaagccttaagcctcctctagtcacttagagatggggttcacccagtccttgccaatgtgttagcagacaaacttaaaatggaacctctctaagtacagaatttgcacttagctcctccaaagggtcccttcttgaggacccttctgtaagacctaactcatctttactgtctcagtgaaacttgaccccattcatcccattttccttctac

SEQ ID NO: 668201 - DNA, 631 bp, Homo sapiens
ttttttgagacggagtctcactctgttgcccaggctggagtgcaatggcacaatctcggctcactgcaaccacggcctgccgggttcaagcaattctgctgtctcatcctccagagtggctgggattacaggtgtatgccacgatgcccggctaatttttgcatttttagtggagatggggtttcaccatgttggccaggctggtcttgaactcctgacctcaggtgatcygcccgccttggcctcccacagtgctgggattacaggtgtgagccactgcgcccagacggtcatctattttttaccgaggaagaacccaagggtcagaaaggttaagtaacttgctcaagattacacagttaataaggagaagagcctggcttcacaccttggcagtttcactccagaaatcactgccttaagccttaagcctcctctagtcacttagagatggggttcacccagtccttgccaatgtgttagcagacaaacttaaaatggaacctctctaagtacagaatttgcacttagctcctccaaagggtcccttcttgaggacccttctgtaagacctaactcatctttactgtctcagtgaaacttgaccccattcatcccattttccttctac

SEQ ID NO: 668202 - DNA, 631 bp, Homo sapiens
ttttttgagacggagtctcactctgttgcccaggctggagtgcaatggcacaatctcggctcactgcaaccacggcctgccgggttcaagcaattctgctgtctcatcctccagagtggctgggattacaggtgtatgccacgatgcccggctaatttttgcatttttagtggagatggggtttcaccatgttggccaggctggtcttgaactcctgacctcaggtgatctgcccgccttggcctcccacagtgctgggattacaggtgtgagccactgcgcccagmcggtcatctattttttaccgaggaagaacccaagggtcagaaaggttaagtaacttgctcaagattacacagttaataaggagaagagcctggcttcacaccttggcagtttcactccagaaatcactgccttaagccttaagcctcctctagtcacttagagatggggttcacccagtccttgccaatgtgttagcagacaaacttaaaatggaacctctctaagtacagaatttgcacttagctcctccaaagggtcccttcttgaggacccttctgtaagacctaactcatctttactgtctcagtgaaacttgaccccattcatcccattttccttctac

SEQ ID NO: 668203 - DNA, 610 bp, Homo sapiens
ttaatatattcaaatttaaaatcttttcagtatcctaaaagaaggaagaatcaaagcttgttgacctatttatcaaagtttgttgatctacctcttaagatatgatcaagaactgtgatcaataccttaggcatgatctagtaggggtagacaaagaaaattaccttatatattctggaaattcaattcaaacatgtatttatttaaaaatatgtattgggacactattatgrgccaatcagtgtacacagcacacaaatattagtctttctctaaagaaagtaatctaaaaatattagaaaggctgtctgcataaatgtatttctcaccatattgtttgtcttaggaaaagcaaaaataattttagtggacaacaactgaacaacagataggtaaattatgtcctatttgcagccaacaattaaaataatatttctaagtgctttataataatgtgcatttattcatgtcaacatgtaaaaaagaaggcagaggtatatataatataatcataattatgtgagggattaaaaaactctaaccaatatggattaaagtacttctaagagaacacatttaaaattgaattagcactaatagtctgccaaca

SEQ ID NO: 668204 - DNA, 1207 bp, Homo sapiens
tgataatcctgttaagagcagtttgacataggctggagtgcagtggcacaatctccgctaactgcaacctctgcctcccaggttcaagcgattctcctgcctcagcctcttgaatagctgggattacaggcgctcaccacggtgcccggctaatttttgtatttttagtagagatggggtctcaccgtgttgaccaggatggtctcgatttcctggcctcgtgatcctcctgcctcggcctcccaaagtgctggcatcacaggcgtgagccaccgtgcccagcctgtarggataaacattcaagtcttgctctacctttaggaagggtccagagtagagtcaaggaatagactacttaccgcagaatctaacctctcattgggaaagtatatgctattgtgctgtggatacaaggttcagacagtaaaggaggagacgaaagcactagtgatggggaagatggaattatgcaggtttataatcacaatttccacagtcttgacatgccttcaaggtttctacttgatttaaacactagatcactctagatggaaaatattaaattttttgtcaaacttgctatgatttattttagtatgtagatacagtcatgcttctgcaagctcatgttaaagatttatcttgtttaaaacataacaaaatgaacaaaagaggggttaaactatacccatccgatcaatgctgaacaaaaactacaaccacaaacattcttatcagatcattttttcctaagaaaagacttatttatttacattaccttttaagctagaatagccgtcataattctcgaccaaatatgttggtctttttttcttaacctcttctcactgctattgtcaaaactggctgtaatctcgtgcagatgagatattgatctgttgccgatgttcactgagcagccaaaggggaatcacattaccagctacaaactccatcaatcatagtctccttaataaccgcacttaaacgatctctcttggcattagcttatattgcacccatggctggcatccagacttgagaaagaaaaaggctcattttgaagggcagatttgaggccactatagatgatttaaataaaaggtcttagactttccctagaacaacaggggttattacattagttaatttaatccaattaatttttttcgggtctacagaaatggagtaaaagatgtgtggattt

SEQ ID NO: 668205 - DNA, 1207 bp, Homo sapiens
tgataatcctgttaagagcagtttgacataggctggagtgcagtggcacaatctccgctaactgcaacctctgcctcccaggttcaagcgattctcctgcctcagcctcttgaatagctgggattacaggcgctcaccacggtgcccggctaatttttgtatttttagtagagatggggtctcaccgtgttgaccaggatggtctcgatttcctggcctcgtgatcctcctgcctcggcctcccaaagtgctggcatcacaggcgtgagccaccgtgcccagcctgtaaggataaacattcaagtcttgctctacctttaggaagggtccagagtagagtcaaggaatagactacttacygcagaatctaacctctcattgggaaagtatatgctattgtgctgtggatacaaggttcagacagtaaaggaggagacgaaagcactagtgatggggaagatggaattatgcaggtttataatcacaatttccacagtcttgacatgccttcaaggtttctacttgatttaaacactagatcactctagatggaaaatattaaattttttgtcaaacttgctatgatttattttagtatgtagatacagtcatgcttctgcaagctcatgttaaagatttatcttgtttaaaacataacaaaatgaacaaaagaggggttaaactatacccatccgatcaatgctgaacaaaaactacaaccacaaacattcttatcagatcattttttcctaagaaaagacttatttatttacattaccttttaagctagaatagccgtcataattctcgaccaaatatgttggtctttttttcttaacctcttctcactgctattgtcaaaactggctgtaatctcgtgcagatgagatattgatctgttgccgatgttcactgagcagccaaaggggaatcacattaccagctacaaactccatcaatcatagtctccttaataaccgcacttaaacgatctctcttggcattagcttatattgcacccatggctggcatccagacttgagaaagaaaaaggctcattttgaagggcagatttgaggccactatagatgatttaaataaaaggtcttagactttccctagaacaacaggggttattacattagttaatttaatccaattaatttttttcgggtctacagaaatggagtaaaagatgtgtggattt

SEQ ID NO: 668206 - DNA, 1258 bp, Homo sapiens
ggtcttgtaagcactgtcaagggcagagacagcagtgtgaagagatgggtattgagttttaaagatctcaagttttggaatccagagtaccctataggaaactaaaattcagtggctaccttagaacaacatcttttcattctcatgagtctcatttgggtgaggcttgactctagagttgagtccctgagctacaggctgcattttggattcaggcctgtagcatgtgtctcattctggggcctaggctcgagggcagtggcttactgaggcatgttctycccaaggtaaaagtgctcccagagctcaaagtgctagcccaatggcacaagcacatttcaagcttatgcctgagtcatgtccactagcatctgtggtcaaaggaagacatggcagagcccagtgcgaaggggcggggaagttcacttagtcctcctctctgcaaggctgtggcaagagtgtggatatataattctattacagaggagcaggtgattatatccaacaattcaatcttcttttctggaccactgcagaacttgctagttctctattctctcttgcatctagtcttgtaccataatccccattatttataactgatattgtcactcccttgcttaaatctatacttctgttatgggaaaaatttaagcattttagggagaccactgagttcacactggttagttttaaagcatttaaaatttctaggctgggcacagtggatcacacttgtaagttagcactttgggaggccacgacaggcagatcagttgaggtcaggagtttgagaccagcctggccaaaatgttgaaatcctatctctatgaaaaatacaaaaattagctgggtgtgggggtgtgtgcctgtaatctcagctactcgggaggctgaggcaggagaatcacttgaacctgggaggcagaggttgcagtgagccgagatggaaccactgcactccagcctgggcaacagagtgagaccctgtctcaaaaaaaaaatctattatttttgcatgcattctttctctcccttcatcctttaaagctgtgcttccatctacttgttacttctctgaacacttaaatatttttaaggctcataattttgtccatgctatttcttcttacaggaatttatttcatttatccaacgaaaatgtattatatgcctacaatgtaccaggcactcagcaagactacagataaaacattggagaacgaatgaatttttcttttccttcagagagatttct

SEQ ID NO: 668207 - DNA, 1932 bp, Homo sapiens
atcatcagttcctcactcaggtctttttgttattatttgttgttattacagcttggcaactgggtaacttgattttcatgactgtaataatatattaatagcaagatatactcttaagaatttcagaattcttactggatgctacccagtaagatgctacccacctgcccacacgcatgctaacaaaatgtgaaacaaatagctacttttatgcactgtttcttacaaagggagagttggaactaagaaattgtcacatttggggctacagagaggaaatgaaggaggtgggaggaggacctgaaattcttgcttttcacagtgctatgataagcattattagatcctgttctttgctctgaatgtcttattgctttttgtaatacatattttatcaaargtgcccagagagatggtttaacatttcattttgttaagaaaaataaaacccagaaaattataggctcttagattttggagcacagtatgttgtgttccaacgtagaaattaaaacaaccaccaccaaaaaaccccagttaaataaacaggcccccaaattgattaaaacataaaacctgacattagatcttttcagtctgaaattctacagagaagtttcatttaatatgctgtttttgcaccatacagaacacattccctgactactggtaattttcagtcctttacaaattttgattttgtttatgaaggtctcagttttttaaagtctgggtgtgaacccatctaaacaataacaaaagcttctttaattggcttttcatttccatttcttttcttttttgtttttagagacagagtcttgctttgtcatcctggctggagtgcagtgactacatcatagttcactgtaactttcaacttctgcactcaagtgcctcttccacctcaccctcccaaatagctgagattgctagcgtgcacctccatgcctggctaatttttaaacttctttttgtagagatagagtctcttgctgttgccaggctggtctggaactcctgggatcaagtgatcctcctgccctggctttccaaaatgctgggattacaggtatgaaccacagcacccagcccagattctcatttctgaatcaaataatccaatttcacttacaagcaaatgtgaaatatacaatgaacttgacaagtttttttgataaacattgttgaattgtaatgaaatatcttcacgatttgttttatgccattcctaggtctttcttgtgaataaatataccatattagtcagtattgagaaggcattcattcattagctgggaatagtaattgaatgtaggtgctttaattttagaaaatcgttttgctaaaattttcttaacttttataacctccttcatattacatttattcttaatttttttattatactttaagttttagagtacatgtggacaacgtgcaggttagttacatatgtatacatgtgccatgttggtgtgctgcacccattaactcgtcatttaacattaggtatatctcctaatgctatccctcctccctcccctctcccctcctaaactttaatggtgtagtaatgaaaatgcctttagagaccattaacccacccatatctcttatggactgaattgtgcgccccctcccctcatccaaattcatatgttgaaaccccccaatagctcagaatgtgaccattttagagatagggtctctagaaactaattaaggtagaacccattagggtgggtgctaactcaacatgactggtctctttataagagattaggacacagataggcacagcgggaacaccatgtgaggacatagtgagaagacagacatctacaaaacaaggagagtggcctcagaggaaatgaagcctgctgataccttgatctcagacatctagcttccagaattttgagaaaataa

SEQ ID NO: 668208 - DNA, 2344 bp, Homo sapiens
aagtgtgtgtagagagggtggtaaagagtgttagaaggtaaatttgtgacttagcaatgttgcctaggacaggccctttttatgaagattctgattgtagttattttatgtgttaggataaatattcttgtgtcttagagaaactatgaggcttataaagtaactccttcccttcttccattccttccaaaaatatttcatacaacattttattattattgttattgttattttgagacagsgtcttgctctattgcccattctggagtgcagtggtgcaatcatggctgactgcagcctcagactcctgggcttaagtggtcctcctgcctcagcctcctgaatagttgggacaggtgcacaccaccgtgcccaactaattttttaatgttttgtagagacagggtctcatgttgcccaggctggtcttgaacttctgggctcaagtaatcctactgcctcagcctcccaaagtgttgggattacagacatgagtcacggcacctggctgatacaacatattaaataactgccctcatcttccagtaggatttgctctaagaattcgggtgacagtgacacaaaatagcatcttccaatttagagaaaatttctgtttgctcttttctaatcgtggtacttagaaaagtttctatagttttgaaccatcaacctaattctatacttgtttgacctttaataggagcctaaggcaagtacagaagtcagagtttgcctaatatactctcccagagggattgtcaagtatatttcatttattggattgtgaatttttagagtgtccagattcactctttaccacaaaatttagagtgtccagattcactctttaccacaaaaattcaagagtaattattttaaacagaactgcattcccacaataagtgctgatttgtattattttccagttcatactttgaagtattaacagactgaaaactgagcattttattgttgcctgcttttttttgtctccatttgtcaaagaaatatatggaatatatcctgttaaccaagctcaaatgctttaaattttattcactggctattcaaaaaaacagagattttaaaaatacttgaattgtttgaataatttattggaaggccactataccgccaacactgaataacttagtttaaataggtatagcctcgggaaatgtcattacaaatatttgtctgaaagtcagttgcctagattagttcaattttttatttttccctttagctttgcttttaatgtttgcaaataaatacagtatttattgtttgtgaaaatattattaaagtagaatatttctcagatgatgtttccttttaaccacttcattaactaaactctgaatcaatgtgtaatcactacatttttttctttagatactttttttctttagtgtctgaagaaagcagctgtggcttattctcacagccagaactcagccataataacatgaaaaaatattattcaatgtatcataataatggctaacacttctttaggttttaatttttgctttcttaacatataactatttgattattataaataatatttgagtgtttgaaaatcattactcccttaaaaagaaacttataagatacagaaactgtagaaaatatttcggtagaggatatggttagaaaccataagaaaaaaatcaattaatgctaagacattgtcaaccatggccttgtttcaatatatgtttctttccaagtaaaataaattccattatatcaccacatctgtatgtatgtacaaaattcaataaaacaaaactggtcatgctcaggaaaaagcacggtttagggagacattgttacaataattacttttttcaaagttcagtaaatttttaagaagccatcaaataaacttctattctcaaatgagaagttgtcacaactactcagtttggatcatactgaaatcggggttttttaatgaacgaggaagatacagacagtattttaaattttctatccattatattttacattttcttttgataaacaaatgcgtgccctgatcaaaagtctaaattattaaaaaaaagtgatataatgaaaataactttttttctcccttgattgcttgtctcataggttcctccccggatataactgacattaatttcagatgtgtcttccagaaacattctatgcattcacagtaaaataagccaaatttaatgatccattatgtataaaaaaccatttacctttacatatccttagattaataaattatacttagtttgacaacttacttttaaacttagtatttcttagacatttgataacaataaattataattctaat

SEQ ID NO: 668209 - DNA, 2344 bp, Homo sapiens
aagtgtgtgtagagagggtggtaaagagtgttagaaggtaaatttgtgacttagcaatgttgcctaggacaggccctttttatgaagattctgattgtagttattttatgtgttaggataaatattcttgtgtcttagagaaactatgaggcttataaagtaactccttcccttcttccattccttccaaaaatatttcatacaacattttattattattgttattgttattttgagacagggtcttgctctattgcccatkctggagtgcagtggtgcaatcatggctgactgcagcctcagactcctgggcttaagtggtcctcctgcctcagcctcctgaatagttgggacaggtgcacaccaccgtgcccaactaattttttaatgttttgtagagacagggtctcatgttgcccaggctggtcttgaacttctgggctcaagtaatcctactgcctcagcctcccaaagtgttgggattacagacatgagtcacggcacctggctgatacaacatattaaataactgccctcatcttccagtaggatttgctctaagaattcgggtgacagtgacacaaaatagcatcttccaatttagagaaaatttctgtttgctcttttctaatcgtggtacttagaaaagtttctatagttttgaaccatcaacctaattctatacttgtttgacctttaataggagcctaaggcaagtacagaagtcagagtttgcctaatatactctcccagagggattgtcaagtatatttcatttattggattgtgaatttttagagtgtccagattcactctttaccacaaaatttagagtgtccagattcactctttaccacaaaaattcaagagtaattattttaaacagaactgcattcccacaataagtgctgatttgtattattttccagttcatactttgaagtattaacagactgaaaactgagcattttattgttgcctgcttttttttgtctccatttgtcaaagaaatatatggaatatatcctgttaaccaagctcaaatgctttaaattttattcactggctattcaaaaaaacagagattttaaaaatacttgaattgtttgaataatttattggaaggccactataccgccaacactgaataacttagtttaaataggtatagcctcgggaaatgtcattacaaatatttgtctgaaagtcagttgcctagattagttcaattttttatttttccctttagctttgcttttaatgtttgcaaataaatacagtatttattgtttgtgaaaatattattaaagtagaatatttctcagatgatgtttccttttaaccacttcattaactaaactctgaatcaatgtgtaatcactacatttttttctttagatactttttttctttagtgtctgaagaaagcagctgtggcttattctcacagccagaactcagccataataacatgaaaaaatattattcaatgtatcataataatggctaacacttctttaggttttaatttttgctttcttaacatataactatttgattattataaataatatttgagtgtttgaaaatcattactcccttaaaaagaaacttataagatacagaaactgtagaaaatatttcggtagaggatatggttagaaaccataagaaaaaaatcaattaatgctaagacattgtcaaccatggccttgtttcaatatatgtttctttccaagtaaaataaattccattatatcaccacatctgtatgtatgtacaaaattcaataaaacaaaactggtcatgctcaggaaaaagcacggtttagggagacattgttacaataattacttttttcaaagttcagtaaatttttaagaagccatcaaataaacttctattctcaaatgagaagttgtcacaactactcagtttggatcatactgaaatcggggttttttaatgaacgaggaagatacagacagtattttaaattttctatccattatattttacattttcttttgataaacaaatgcgtgccctgatcaaaagtctaaattattaaaaaaaagtgatataatgaaaataactttttttctcccttgattgcttgtctcataggttcctccccggatataactgacattaatttcagatgtgtcttccagaaacattctatgcattcacagtaaaataagccaaatttaatgatccattatgtataaaaaaccatttacctttacatatccttagattaataaattatacttagtttgacaacttacttttaaacttagtatttcttagacatttgataacaataaattataattctaat

SEQ ID NO: 668210 - DNA, 2344 bp, Homo sapiens
aagtgtgtgtagagagggtggtaaagagtgttagaaggtaaatttgtgacttagcaatgttgcctaggacaggccctttttatgaagattctgattgtagttattttatgtgttaggataaatattcttgtgtcttagagaaactatgaggcttataaagtaactccttcccttcttccattccttccaaaaatatttcatacaacattttattattattgttattgttattttgagacagggtcttgctctattgcccattctggagtgcagtggtgcaatcatggctgactgcagcctcaractcctgggcttaagtggtcctcctgcctcagcctcctgaatagttgggacaggtgcacaccaccgtgcccaactaattttttaatgttttgtagagacagggtctcatgttgcccaggctggtcttgaacttctgggctcaagtaatcctactgcctcagcctcccaaagtgttgggattacagacatgagtcacggcacctggctgatacaacatattaaataactgccctcatcttccagtaggatttgctctaagaattcgggtgacagtgacacaaaatagcatcttccaatttagagaaaatttctgtttgctcttttctaatcgtggtacttagaaaagtttctatagttttgaaccatcaacctaattctatacttgtttgacctttaataggagcctaaggcaagtacagaagtcagagtttgcctaatatactctcccagagggattgtcaagtatatttcatttattggattgtgaatttttagagtgtccagattcactctttaccacaaaatttagagtgtccagattcactctttaccacaaaaattcaagagtaattattttaaacagaactgcattcccacaataagtgctgatttgtattattttccagttcatactttgaagtattaacagactgaaaactgagcattttattgttgcctgcttttttttgtctccatttgtcaaagaaatatatggaatatatcctgttaaccaagctcaaatgctttaaattttattcactggctattcaaaaaaacagagattttaaaaatacttgaattgtttgaataatttattggaaggccactataccgccaacactgaataacttagtttaaataggtatagcctcgggaaatgtcattacaaatatttgtctgaaagtcagttgcctagattagttcaattttttatttttccctttagctttgcttttaatgtttgcaaataaatacagtatttattgtttgtgaaaatattattaaagtagaatatttctcagatgatgtttccttttaaccacttcattaactaaactctgaatcaatgtgtaatcactacatttttttctttagatactttttttctttagtgtctgaagaaagcagctgtggcttattctcacagccagaactcagccataataacatgaaaaaatattattcaatgtatcataataatggctaacacttctttaggttttaatttttgctttcttaacatataactatttgattattataaataatatttgagtgtttgaaaatcattactcccttaaaaagaaacttataagatacagaaactgtagaaaatatttcggtagaggatatggttagaaaccataagaaaaaaatcaattaatgctaagacattgtcaaccatggccttgtttcaatatatgtttctttccaagtaaaataaattccattatatcaccacatctgtatgtatgtacaaaattcaataaaacaaaactggtcatgctcaggaaaaagcacggtttagggagacattgttacaataattacttttttcaaagttcagtaaatttttaagaagccatcaaataaacttctattctcaaatgagaagttgtcacaactactcagtttggatcatactgaaatcggggttttttaatgaacgaggaagatacagacagtattttaaattttctatccattatattttacattttcttttgataaacaaatgcgtgccctgatcaaaagtctaaattattaaaaaaaagtgatataatgaaaataactttttttctcccttgattgcttgtctcataggttcctccccggatataactgacattaatttcagatgtgtcttccagaaacattctatgcattcacagtaaaataagccaaatttaatgatccattatgtataaaaaaccatttacctttacatatccttagattaataaattatacttagtttgacaacttacttttaaacttagtatttcttagacatttgataacaataaattataattctaat

SEQ ID NO: 668211 - DNA, 1439 bp, Homo sapiens
tcacatggtcagtgagtgctccatttaagtattctccagaaagtaaattcattgtccaggaggcctaagggcttttgattaaattctagcactcctgttttgcaaaaacttaaacccttacttggctacttttctcagtcagaatttttgttgttgttattgttcccaaatcagtgacagattttattaacatcaattaggagctattgtgaggctttaaaatatgaagtactgaaaccattagttactattgcactgtcaaaagtatttcccttaaaactgatagagcacaaggggccattggtaatttaaaattatttttaataaaagaattaaaccaatcttatatcttctttcacttttattatagcccccctgcctctgtgttccaggggtatatagaaattacatttctacaatctgtatttatttttaaaatgtaattcttcagtatacacctgtctttagtaaaatgtgggaaatgctttgcctgaatcccttcataattattgtwgtattgtcattccttttatatcttgatgggataggatgatttctaaggtgactttcaatgtggcaaatttgaaactcgtggaatctatattgtaatatttaatttaataacgccatttaattctatggcatctttcctttttatgttacaatatttaagattgagcatattgtaaataaaaaagatttgactttttgaggggaagcagctttattgagacataattcacatactacacaattcatccatttaaagtgcacagatagatgttcttagtatattcatagagttacacaatctaaatcacgataaattgtagaacatttttatctcttgcccccagaatcctacatgatacccattagaagtcacttccatttgcccgcaatacccccagtcctaggcaaccaatattccactatttatctccagaaattggcttgttctggacattttataacagtggaatcatacaatatgtggtctcttgttaccagctcctttcattgagcataatattttcgagattctttcatggtgtgccatgtatcagcacttttcttattttcaaataatattcccttgcatagatataatatggccctttttaatacatgccttctcaaagtgatttaaatatactataatattaggataacaaaattcaagtttgaaataaaaattgaacattatgaaacaatttctgcaatctagatcgacatcctcctgcccctgtataacccatctcatttaataaaatgggactggaaaaaatatgctggaaattggggacatctggatgtaacaaaattattacgtactttattgaaattattaatattgcccatttttctccattacttgctgtctgctcataagtgacacttagcacaggcatttcaaacagaatatattttactttgca

SEQ ID NO: 668212 - DNA, 1439 bp, Homo sapiens
tcacatggtcagtgagtgctccatttaagtattctccagaaagtaaattcattgtccaggaggcctaagggcttttgattaaattctagcactcctgttttgcaaaaacttaaacccttacttggctacttttctcagtcagaatttttgttgttgttattgttcccaaatcagtgacagattttattaacatcaattaggagctattgtgaggctttaaaatatgaagtactgaaaccattagttactattgcactgtcaaaagtatttcccttaaaactgatagagcacaaggggccattggtaatttaaaattatttttaataaaagaattaaaccaatcttatatcttctttcacttttattatagcccccctgcctctgtgttccaggggtatatagaaattacatttctacaatctgtatttatttttaaaatgtaattcttcagtatacacctgtctttagtaaaatgtgggaaatgctttgcctgaatcccttcataattattgttgtrttgtcattccttttatatcttgatgggataggatgatttctaaggtgactttcaatgtggcaaatttgaaactcgtggaatctatattgtaatatttaatttaataacgccatttaattctatggcatctttcctttttatgttacaatatttaagattgagcatattgtaaataaaaaagatttgactttttgaggggaagcagctttattgagacataattcacatactacacaattcatccatttaaagtgcacagatagatgttcttagtatattcatagagttacacaatctaaatcacgataaattgtagaacatttttatctcttgcccccagaatcctacatgatacccattagaagtcacttccatttgcccgcaatacccccagtcctaggcaaccaatattccactatttatctccagaaattggcttgttctggacattttataacagtggaatcatacaatatgtggtctcttgttaccagctcctttcattgagcataatattttcgagattctttcatggtgtgccatgtatcagcacttttcttattttcaaataatattcccttgcatagatataatatggccctttttaatacatgccttctcaaagtgatttaaatatactataatattaggataacaaaattcaagtttgaaataaaaattgaacattatgaaacaatttctgcaatctagatcgacatcctcctgcccctgtataacccatctcatttaataaaatgggactggaaaaaatatgctggaaattggggacatctggatgtaacaaaattattacgtactttattgaaattattaatattgcccatttttctccattacttgctgtctgctcataagtgacacttagcacaggcatttcaaacagaatatattttactttgca

SEQ ID NO: 668213 - DNA, 1439 bp, Homo sapiens
tcacatggtcagtgagtgctccatttaagtattctccagaaagtaaattcattgtccaggaggcctaagggcttttgattaaattctagcactcctgttttgcaaaaacttaaacccttacttggctacttttctcagtcagaatttttgttgttgttattgttcccaaatcagtgacagattttattaacatcaattaggagctattgtgaggctttaaaatatgaagtactgaaaccattagttactattgcactgtcaaaagtatttcccttaaaactgatagagcacaaggggccattggtaatttaaaattatttttaataaaagaattaaaccaatcttatatcttctttcacttttattatagcccccctgcctctgtgttccaggggtatatagaaattacatttctacaatctgtatttatttttaaaatgtaattcttcagtatacacctgtctttagtaaaatgtgggaaatgctttgcctgaatcccttcataattattgttgtattgtcattccttttatatcttgatgggatrggatgatttctaaggtgactttcaatgtggcaaatttgaaactcgtggaatctatattgtaatatttaatttaataacgccatttaattctatggcatctttcctttttatgttacaatatttaagattgagcatattgtaaataaaaaagatttgactttttgaggggaagcagctttattgagacataattcacatactacacaattcatccatttaaagtgcacagatagatgttcttagtatattcatagagttacacaatctaaatcacgataaattgtagaacatttttatctcttgcccccagaatcctacatgatacccattagaagtcacttccatttgcccgcaatacccccagtcctaggcaaccaatattccactatttatctccagaaattggcttgttctggacattttataacagtggaatcatacaatatgtggtctcttgttaccagctcctttcattgagcataatattttcgagattctttcatggtgtgccatgtatcagcacttttcttattttcaaataatattcccttgcatagatataatatggccctttttaatacatgccttctcaaagtgatttaaatatactataatattaggataacaaaattcaagtttgaaataaaaattgaacattatgaaacaatttctgcaatctagatcgacatcctcctgcccctgtataacccatctcatttaataaaatgggactggaaaaaatatgctggaaattggggacatctggatgtaacaaaattattacgtactttattgaaattattaatattgcccatttttctccattacttgctgtctgctcataagtgacacttagcacaggcatttcaaacagaatatattttactttgca

SEQ ID NO: 668214 - DNA, 1439 bp, Homo sapiens
tcacatggtcagtgagtgctccatttaagtattctccagaaagtaaattcattgtccaggaggcctaagggcttttgattaaattctagcactcctgttttgcaaaaacttaaacccttacttggctacttttctcagtcagaatttttgttgttgttattgttcccaaatcagtgacagattttattaacatcaattaggagctattgtgaggctttaaaatatgaagtactgaaaccattagttactattgcactgtcaaaagtatttcccttaaaactgatagagcacaaggggccattggtaatttaaaattatttttaataaaagaattaaaccaatcttatatcttctttcacttttattatagcccccctgcctctgtgttccaggggtatatagaaattacatttctacaatctgtatttatttttaaaatgtaattcttcagtatacacctgtctttagtaaaatgtgggaaatgctttgcctgaatcccttcataattattgttgtattgtcattccttttatatcttgatgggataggatgatttctaaggtgactttcaatgtggcaaatttgaaactcgtggaatctatattgtaatatttaatttaataacgccatttaattctatggcatctttcctttttatgttacaatatttaagattgagcatattgtaaataaaaaagatttgactttttgaggggaagcagctttattgagacataattcacatactacacaattcatccatttaaagtgcacagatagatgttcttagtatattcatagagttacacaatctaaatcacgataaattgtagaacatttttatctcttgcccccagaatcctacatgatacccattagaagtcacttccatttgcccgcaatacccccagtcctrggcaaccaatattccactatttatctccagaaattggcttgttctggacattttataacagtggaatcatacaatatgtggtctcttgttaccagctcctttcattgagcataatattttcgagattctttcatggtgtgccatgtatcagcacttttcttattttcaaataatattcccttgcatagatataatatggccctttttaatacatgccttctcaaagtgatttaaatatactataatattaggataacaaaattcaagtttgaaataaaaattgaacattatgaaacaatttctgcaatctagatcgacatcctcctgcccctgtataacccatctcatttaataaaatgggactggaaaaaatatgctggaaattggggacatctggatgtaacaaaattattacgtactttattgaaattattaatattgcccatttttctccattacttgctgtctgctcataagtgacacttagcacaggcatttcaaacagaatatattttactttgca

SEQ ID NO: 668215 - DNA, 1439 bp, Homo sapiens
tcacatggtcagtgagtgctccatttaagtattctccagaaagtaaattcattgtccaggaggcctaagggcttttgattaaattctagcactcctgttttgcaaaaacttaaacccttacttggctacttttctcagtcagaatttttgttgttgttattgttcccaaatcagtgacagattttattaacatcaattaggagctattgtgaggctttaaaatatgaagtactgaaaccattagttactattgcactgtcaaaagtatttcccttaaaactgatagagcacaaggggccattggtaatttaaaattatttttaataaaagaattaaaccaatcttatatcttctttcacttttattatagcccccctgcctctgtgttccaggggtatatagaaattacatttctacaatctgtatttatttttaaaatgtaattcttcagtatacacctgtctttagtaaaatgtgggaaatgctttgcctgaatcccttcataattattgttgtattgtcattccttttatatcttgatgggataggatgatttctaaggtgactttcaatgtggcaaatttgaaactcgtggaatctatattgtaatatttaatttaataacgccatttaattctatggcatctttcctttttatgttacaatatttaagattgagcatattgtaaataaaaaagatttgactttttgaggggaagcagctttattgagacataattcacatactacacaattcatccatttaaagtgcacagatagatgttcttagtatattcatagagttacacaatctaaatcacgataaattgtagaacatttttatctcttgcccccagaatcctacatgatacccattagaagtcacttccatttgcccgcaatacccccagtcctaggcaaccaatattccactatttatctccagaaattggcttgttctggacawtttataacagtggaatcatacaatatgtggtctcttgttaccagctcctttcattgagcataatattttcgagattctttcatggtgtgccatgtatcagcacttttcttattttcaaataatattcccttgcatagatataatatggccctttttaatacatgccttctcaaagtgatttaaatatactataatattaggataacaaaattcaagtttgaaataaaaattgaacattatgaaacaatttctgcaatctagatcgacatcctcctgcccctgtataacccatctcatttaataaaatgggactggaaaaaatatgctggaaattggggacatctggatgtaacaaaattattacgtactttattgaaattattaatattgcccatttttctccattacttgctgtctgctcataagtgacacttagcacaggcatttcaaacagaatatattttactttgca

SEQ ID NO: 668216 - DNA, 1439 bp, Homo sapiens
tcacatggtcagtgagtgctccatttaagtattctccagaaagtaaattcattgtccaggaggcctaagggcttttgattaaattctagcactcctgttttgcaaaaacttaaacccttacttggctacttttctcagtcagaatttttgttgttgttattgttcccaaatcagtgacagattttattaacatcaattaggagctattgtgaggctttaaaatatgaagtactgaaaccattagttactattgcactgtcaaaagtatttcccttaaaactgatagagcacaaggggccattggtaatttaaaattatttttaataaaagaattaaaccaatcttatatcttctttcacttttattatagcccccctgcctctgtgttccaggggtatatagaaattacatttctacaatctgtatttatttttaaaatgtaattcttcagtatacacctgtctttagtaaaatgtgggaaatgctttgcctgaatcccttcataattattgttgtattgtcattccttttatatcttgatgggataggatgatttctaaggtgactttcaatgtggcaaatttgaaactcgtggaatctatattgtaatatttaatttaataacgccatttaattctatggcatctttcctttttatgttacaatatttaagattgagcatattgtaaataaaaaagatttgactttttgaggggaagcagctttattgagacataattcacatactacacaattcatccatttaaagtgcacagatagatgttcttagtatattcatagagttacacaatctaaatcacgataaattgtagaacatttttatctcttgcccccagaatcctacatgatacccattagaagtcacttccatttgcccgcaatacccccagtcctaggcaaccaatattccactatttatctccagaaattggcttgttctggacattttataacagtggaatcatacaatatgtggtctcttgttaccagctcctttcattgagcataatattttcgagattctttcatggtgtgccatgtatcagcacttttcttattttcaaataatattcccttgcatagatataatatggccctttttaatacatgccttctcaaagtgatttaaatatactataatattaggataacaaaattcaagtttgaaataaaaattgracattatgaaacaatttctgcaatctagatcgacatcctcctgcccctgtataacccatctcatttaataaaatgggactggaaaaaatatgctggaaattggggacatctggatgtaacaaaattattacgtactttattgaaattattaatattgcccatttttctccattacttgctgtctgctcataagtgacacttagcacaggcatttcaaacagaatatattttactttgca

SEQ ID NO: 668217 - DNA, 619 bp, Homo sapiens
tgtaaaaactgacaaatgtaagctaagttttctaaatgccaaatgtaggcaattctgtgcagatacagaatgggtgtttttattcagagagattaatgacattgtgcaataaatgtcagctataaggcaagcactgtgctaagttactgggccataacttgtaacatgtaaagtctccgccatttcaaagctagtagatctagtgaggagaaatgtaaagaactcactgacaatcacaatacagtgtgatattatagtggtagttactgagtggggaatacaagaaataatatgaggacagaagagtagcaacttattctacacttaaaggatcaagaaaggcttcctggaggaagtgatcactgagctgaaagacaaagagaaggtaatcctggaaaaagggtaataaagaatgttccaagcagaagaaacagcatgtgtatagctcacaggttggagaacacatgtctcaacttcattggattatactayagtagtgaaaactgaaagtttgttgtaagtcaaacttagttttactctgacatagggccaactctcaacagtaatacctccatattttaagtctttatctttgttaaagttgcagagatataaaaag

SEQ ID NO: 668218 - DNA, 2183 bp, Homo sapiens
tggtatttacctgaggcctgggcgttcacctggggcctgatgtctagctggggcctcatatccacctggggcctccatgccaaactgcgacctgatgtccagcggaggcctgatgtccatgcaggaactggagtccctctgggacctgttgtccacccggggcctggtgtccaacgtccaccttgagtccagtgtgcacttggggcccgacgttttcctggggcctttgtgtccgctggggccttatgcccacctggagggggtgtgtcccacgcacccgcccttgtcctggggagagtgtgtagagagttgctctggccctgccccttgtcatctgggaattgcccctcctgccaacgcggtggggaaggtgtcatcttgactcaggtgggtgctgggtttcaaactggggccttatatttacctggggactgctgtccatgtggggcctggtgtccacgtaggtgctgggtattcacctggagcctcacgtccacctggggtcaaaagtgttcacctggggcccgatgttacctagcacaggcgttgcacagaatacacacagactggaaaggaagaaggaatggaaacgtgggacctacgtattcagtataagaaaagtgaaaatagcaaccaggaaagaacaaaaagaaagtacgagaaggatggtatgaagaagacacaaaccaacctaggcccagtttcctaagaaacactggaaaccacactgaaatgaaatgtcagacggaatcaagccatctctggattttcccctgtgggccgctcagtgtcagcggggatgggagcaactgtgggccgctcagtgtcagcggggatgggagcaactgggactctcctacatcactcttagggctagaaattgctaaggccgccccgaaaacatcctactcacttttcagaaaatcacaacttgcaaagtacagcaaaaccaaggaaggccaagagcttaccttggagaaagttctcgcagccctgggcgccaccggctggctggttctggggctgctttgccagcaggcagccttttctcagctgcctttcttcgcatcaggtggcggcggctgatggcccgtgtggcctttgcccttgaggattagcccagcaggttgacttaggcctggagcagcggtaagggcagcgttctctggcgctgcccttttcctgttggcagcaggatggggcgaagctccagggccccaattccagcacctgatttggaagcatccagcggcctgtggcacgacggcggtggaggcgagcctgagcgactgcagctgcatctctgttcccagtgccatctccagatcttcatgccctgagcagtgacctgggccaagaagtcactttcctggatggtgtcttcaggagggcatgttcctgaaccgtgaggggtgggtgttcagcaactctccacaaacttttcccaggaattgggcgaggtgcattgtgccacagccctttttgggtaggcataaggccccacgtggacacccaggcctcagtcaatattcaggagcaaagtggagacctaggctccaggcaaacatcaggcctcaagtggacagtcccaggtgaacattggacatccaacaccagattgacgctatgtcttaggtgtatgccagttcccaggtggactccagyttccaaatggacatcaggcaccaggcggacatcaggttcccagttgacaaataggttccagatggacaacaggccccaggtgatgcctaggccccacgttgacacctgggccccaggtagacatgaggccccacgtggatagttatgttcctggtgaacattaggccccaaatggacactctggttccaggtggatatatggcctcagggggccatcgggtcccgggtgcgcactggacttgacgtatacatcaggcacgaggtttacacccaggccccaggtgcactgaatgtcacagatggacttcaggcccaaggaggataccaaggcttcaggcggacacccaggcctcacgtggatatcaggtcttaggtgaaactcaggctctagttggataccgagtcttcaagtggacataacaatgccccaggtggaacccaggctttagatggataccaggctccaggtggacattaggccccagggtgacaccaaggctccacgtggacagtaagcc

SEQ ID NO: 668219 - DNA, 654 bp, Homo sapiens
tattctaaacagttgttttttactttgatggagacctttccatatcagcacatgtatatacatgaaggtctcattctttttttaaatgtctgcataatattttatttggaggaccatatgaaggaagactggtttatttaaccggttccccattattggatgcttaggacattttgagttttacaagtaaggctgtaataaatatccctgtgtatatatcttggcatactttttcaaatgggataaaatcttagcagtaaaattattgggacacaggatacacacaattcaaattttaatagatagtatcaaataaagaaaaaaatcagagcattctatgtcttgaatactttaagaaggcagtcgggaaagttaaatctttgattttaggatgtttataagatattacatgatgtttaaatgaatttatatgaagtaaatgaaatgagaagacyttagattaaaacagtaggaaatggggcaatctgtcataatttgttaatattcatcagagattcagacaaattgagctcatggataacttggtgcaaattaacaaaggccacagaatcttaaacatatgagtttcagtttattataaaactgagcatatcattttatttcctaaaatcttttttgtattctataatgtag

SEQ ID NO: 668220 - DNA, 1447 bp, Homo sapiens
atgtgaagattcttctggagtgggcttccttcccagaaaagactctcattctggcctttctcttccaggaaaaagatgtaactccagataaaaacctactgaccaaggttcgagatgctgccctgtggttggagaccttgtcagacagcagacctgccaaggcttccctctccaccacctcctccattgctgatttcttccttgccttaaccatctgcaactctgtcatggtgtccacaaccaccgagcccaggcagagggtaaggaccagcgatggctgggggaggagggtaaaggaggtagagragtagaaggcagggtaggggcgaggggagaagttctgatcagggagacatgaaatttgggtcctagcaacagtgtcatttcatcacagtgaaacctagaataggtctcttaccctccctgggtctgtttcctcatttttaaataaaatggaaaaagatacatatgagctttctgtgtagctttcaaactttgtctatgtgtctgcaggtagacattaagagttagtgattactgagcacttggctttatgccaggctccatacccagcactttacctgtattatcatttaatcctctcaacccagcaactctatgaggcaggaccttagatttaacaagcgaagaaatagtagctcagaaaactcaaggtaatgaaggacatatggctcataaatggcagaaccatctatgcaattccataatggtttctagtaatattgtgctatattgctctctgtttttatatacgggttaaaaataatactgtgtgtaatgttcttcccatggaaaaaaatgcagctgaatggtcatgtatgtgaagttatactctgaaatctactgaaggtggatttgccttcaatcttccacagactcttagccaatcacccctgtgagctgtgagtcactgagagaataattaggtggtacaacttgcaactatgaaaccaagacaagaagtttcacccaggcactaaaccacaacctcccttcattatgcccagattccaaaccaccctgaaaatcacttcagcactgaaaagtcagcatgttatcagaagtcttcaggaagtttttggaggcagaaagctttatcttaaaaattaattcatttttaagaggggaagaagtaccatttggggaaagacagtaggcacctcccaattttcaagttaatgtgggagcttcagctggctgggagcttcagctggcaggtagctcaagagcccagcctctggagtcgaggagacctgggtttgagttccaactctactccctacacactgggtgatcatggccaatttatgtagactttttgtacctcaatgtcctcagccataagttgggttgatgatagcatcccacagaattattgggaggatgaaatgagataccgcactcaaagataaagcagaagcattta

SEQ ID NO: 668221 - DNA, 1447 bp, Homo sapiens
atgtgaagattcttctggagtgggcttccttcccagaaaagactctcattctggcctttctcttccaggaaaaagatgtaactccagataaaaacctactgaccaaggttcgagatgctgccctgtggttggagaccttgtcagacagcagacctgccaaggcttccctctccaccacctcctccattgctgatttcttccttgccttaaccatctgcaactctgtcatggtgtccacaaccaccgagcccaggcagagggtaaggaccagcgatggctgggggaggagggtaaaggaggtagaggagtagaaggcagggtaggggcgaggggagaagttctgatcagggagacatgaaatttgggtcctagcaacagtgtcatttcatcacagtgaaacctagaataggtctcttaccctccctgggtctgtttcctcatttttaaataaaatggaaaaagatacatatgagctttctgtgtagctttcaaactttgtctatgtgtctgcaggtagacattaagagttagtgattactgagcacttggctttatgccaggctccatacccagcactttacctgtattatcatttaatcctctcaacccagcaactctatgaggcaggaccttagatttaacaagcgaagaaatagtagctcagaaaactcaaggtaatgaaggacatatggctcataaatggcagaaccatctatgcaattccataatggtttctagtaatattgtgctatattgctctctgtttttatatacgggttaaaaataatactgtgtgtaatgttcttcccatggaaaaaaatgcagctgaatggtcatgtatgtgaagttatactctgaaatctactgaaggtggatttgccttcaatcttccacagactcttagccaatcacccctgtgagctgtgagtcactgagagaataattaggtggtacaacttgcaactatgaaaccaagacaagaagtttcacccaggcactaaaccacaacctcccttcattatgcccagattccaaaccaccctgaaaatcacttcagcactgaaaagtcagcatgttatcagaagtcttcaggaagtttttggaggcagaaagctttatcttaaaaattaattcatttttaagaggggaagaagtaccatttggggaaagacagtakgcacctcccaattttcaagttaatgtgggagcttcagctggctgggagcttcagctggcaggtagctcaagagcccagcctctggagtcgaggagacctgggtttgagttccaactctactccctacacactgggtgatcatggccaatttatgtagactttttgtacctcaatgtcctcagccataagttgggttgatgatagcatcccacagaattattgggaggatgaaatgagataccgcactcaaagataaagcagaagcattta

SEQ ID NO: 668222 - DNA, 1447 bp, Homo sapiens
atgtgaagattcttctggagtgggcttccttcccagaaaagactctcattctggcctttctcttccaggaaaaagatgtaactccagataaaaacctactgaccaaggttcgagatgctgccctgtggttggagaccttgtcagacagcagacctgccaaggcttccctctccaccacctcctccattgctgatttcttccttgccttaaccatctgcaactctgtcatggtgtccacaaccaccgagcccaggcagagggtaaggaccagcgatggctgggggaggagggtaaaggaggtagaggagtagaaggcagggtaggggcgaggggagaagttctgatcagggagacatgaaatttgggtcctagcaacagtgtcatttcatcacagtgaaacctagaataggtctcttaccctccctgggtctgtttcctcatttttaaataaaatggaaaaagatacatatgagctttctgtgtagctttcaaactttgtctatgtgtctgcaggtagacattaagagttagtgattactgagcacttggctttatgccaggctccatacccagcactttacctgtattatcatttaatcctctcaacccagcaactctatgaggcaggaccttagatttaacaagcgaagaaatagtagctcagaaaactcaaggtaatgaaggacatatggctcataaatggcagaaccatctatgcaattccataatggtttctagtaatattgtgctatattgctctctgtttttatatacgggttaaaaataatactgtgtgtaatgttcttcccatggaaaaaaatgcagctgaatggtcatgtatgtgaagttatactctgaaatctactgaaggtggatttgccttcaatcttccacagactcttagccaatcacccctgtgagctgtgagtcactgagagaataattaggtggtacaacttgcaactatgaaaccaagacaagaagtttcacccaggcactaaaccacaacctcccttcattatgcccagattccaaaccaccctgaaaatcacttcagcactgaaaagtcagcatgttatcagaagtcttcaggaagtttttggaggcagaaagctttatcttaaaaattaattcatttttaagaggggaagaagtaccatttggggaaagacagtaggcacctcccaattttcaagttaatgtgggagcttcagctggctgggagcttcagctggcaggtagctcaagagcccagcctctggagtcgaggagacctgggtttgagttccaactctactccctacacactgggtratcatggccaatttatgtagactttttgtacctcaatgtcctcagccataagttgggttgatgatagcatcccacagaattattgggaggatgaaatgagataccgcactcaaagataaagcagaagcattta

SEQ ID NO: 668223 - DNA, 621 bp, Homo sapiens
actaagtttagttactataaataaaatttttcaaattttgtactggccaaactactgaactatgtttcccctaaactttttttttttaatgaatgcycccaaagtcatatggatctcatagctttattattcctagatgcctaccagggtatcctggaggtatgtgtgcttctgtttgagaagctcaaccctggaactgggctatctctgtcttggggaaggcaaacccacaacagtcactgagaatatttcttcaccactgcatgcgatcctaaggaagagaggattatgtctaaagaaaagacaggcaattataaccagtagagcagtgacctccttgggatccagcaagtaatgtaaagaagagagagactagtctgacttaccacttgtgggtggctcctttgatacttagatcatgacaggacttgacaggacaatactccagcccagctcacagaagtgacagctcagaaaaacacatatgccacaagctcctctccatagcactccatcttccagcacctttataatccacattctagaataagcagtgcagtcctttattacaaagggggagaatgagattcagtgttcatgggtggaggtgcattggccttg

SEQ ID NO: 668224 - DNA, 621 bp, Homo sapiens
actaagtttagttactataaataaaatttttcaaattttgtactggccaaactactgaactatgtttcccctaaactttttttttttaatgaatgctcccaaagtcatatggatctcatagctttattattcctagatgcctaccagggtatcctggaggtatgtgtgcttctgtttgagaagctcaaccctggaactgggctatctctgtcttggggaaggcaaacccacaacagtcactgagaatatttcttcaccactgcatgcgatcctaaggaagagaggattatgtctaaagaaaagacaggcwattataaccagtagagcagtgacctccttgggatccagcaagtaatgtaaagaagagagagactagtctgacttaccacttgtgggtggctcctttgatacttagatcatgacaggacttgacaggacaatactccagcccagctcacagaagtgacagctcagaaaaacacatatgccacaagctcctctccatagcactccatcttccagcacctttataatccacattctagaataagcagtgcagtcctttattacaaagggggagaatgagattcagtgttcatgggtggaggtgcattggccttg

SEQ ID NO: 668225 - DNA, 621 bp, Homo sapiens
actaagtttagttactataaataaaatttttcaaattttgtactggccaaactactgaactatgtttcccctaaactttttttttttaatgaatgctcccaaagtcatatggatctcatagctttattattcctagatgcctaccagggtatcctggaggtatgtgtgcttctgtttgagaagctcaaccctggaactgggctatctctgtcttggggaaggcaaacccacaacagtcactgagaatatttcttcaccactgcatgcgatcctaaggaagagaggattatgtctaaagaaaagacaggcaattataaccagtasagcagtgacctccttgggatccagcaagtaatgtaaagaagagagagactagtctgacttaccacttgtgggtggctcctttgatacttagatcatgacaggacttgacaggacaatactccagcccagctcacagaagtgacagctcagaaaaacacatatgccacaagctcctctccatagcactccatcttccagcacctttataatccacattctagaataagcagtgcagtcctttattacaaagggggagaatgagattcagtgttcatgggtggaggtgcattggccttg

SEQ ID NO: 668226 - DNA, 619 bp, Homo sapiens
ctgtcctggccatttttgagagcttcttttccttgatgcttgaagctttctgtttaccattcctgctggaataactttccccacctcctgacagcctccactgtgagatctgtgccccacctgaagaacacagtctcttctgctcttttcactcctatagtcttcaacatacacctggctgcgagtcgtggtgactttggagctagactagtaaatcccttgctgttggtagggttctggcagtagatgttctaaggggagggttggcataggtagtagcagcagtagcttgagtgaacatgtcttcagctattatggagtccatagaaatataccatttgcaccagaaaaaattagttcaacatacagtctatcagtaatgcttctgttgaatatttttatttttatttattttttgagacaggttagtttctgttgcccaggttagagtgcagtggcacaattacagctcactgaatcctcgaaytcgcaggctccatctgtcctcccatcttagcctcccaaatagctgggactacaggcacacaccaccatgcctggctgatttttgtattttttgtagagatggggttttgccatgttgcccaggctggtctca

SEQ ID NO: 668227 - DNA, 577 bp, Homo sapiens
attccgccacctcagcctcccaagtagctgggactacaggtgcatgccatcatgtccggcaaattttgtatttttgctagagatagaatttcaccatgttgcccaggctggtctcgaacttctgcgttcaagtgatccacccacctcagcctctgaaagtgctgggattgtaggcatgagccaccatgcccagcygcatttaatagtaaggacacttttctccctagaacccctgagcaaataagtctcccttcagtttctttctcattagccctagttgatttttcaacacagaattgcagaggaattccagtgccaatttgctgaggccagggttatcttaaccaaccatcatggcaaggagggtaggttaaccagatggagttaaaataggaggcatctctggaactgggaatgggttagtccattcctgtcaccaaacccctcaggcatcacagtgggagaagggcagcaggatgtcaggaagaccacaattccacgccatgtccttcagtcatccattaccagcatgtacaatgaaggaggccattgtgtaacaaggacgtagctggcacag

SEQ ID NO: 668228 - DNA, 966 bp, Homo sapiens
gcagggtttcgtcaattataaaacaaaaggtttggccgggcacagtggctcacacctgtaatcccagcactttgggaggctgaggagggaggtcgaggcaggtggatcatgatgtcaagagattgagaccatcctggccaacatggtgaaaccccttctctactaaaaatacaaaaattagctgggcatggtggcatgcacctttggtcccagttactcgggagagtgaggcaggagaatccgttgaacctgggaggcggaggtttcagtgacccaagattgtgccactgcactccagcgtggtgacagagcgagactctgtctcaaaaaataaaataaaataaaataaaataaaataaaataaaataaaataaaataaaggtttgactatgtactctattttgtgaagaaattgactggagaaacaaattttgtaatttcacccctgtattttctttttataaattattggtaaaataaaataaggacataaagaagagtatatagaatgtgtaatatgaattaaaataaaaggcctagcagatgatatgattgtcaatgtagaaaacctgaaagaattgacaaaaagctccaggaamtaataagcaattatagcagggttgcaggatacaaagttaatacaaaacctcagcatgctagaagctgtctacagtaagtgcaagtgaactcactggattgaggggatatgggctaggaaagcagccatgtctagtacatctaggatgactgaagtaatgggagaataactcagagaaagggaaatcatcagatcctttatattttaagaatcacaaatagctggccatgtggtggtgcacgttggaacaatatcaactaaactgcaatcctattaaaattttgttccagctattctggtggctgagacaggaagattgcttgagcccaggagttcaaggacagcctggacaacatagtgagactctg

SEQ ID NO: 668229 - DNA, 966 bp, Homo sapiens
gcagggtttcgtcaattataaaacaaaaggtttggccgggcacagtggctcacacctgtaatcccagcactttgggaggctgaggagggaggtcgaggcaggtggatcatgatgtcaagagattgagaccatcctggccaacatggtgaaaccccttctctactaaaaatacaaaaattagctgggcatggtggcatgcacctttggtcccagttactcgggagagtgaggcaggagaatccgttgaacctgggaggcggaggtttcagtgacccaagattgtgccactgcactccagcgtggtgacagagcgagactctgtctcaaaaaataaaataaaataaaataaaataaaataaaataaaataaaataaaataaaggtttgactatgtactctattttgtgaagaaattgactggagaaacaaattttgtaatttcacccctgtattttctttttataaattattggtaaaataaaataaggacataaagaagagtatatagaatgtgtaatatgaattaaaataaaaggcctagcagatgatatgattgtcaatgtagaaaacctgaaagaattgacaaaaagctccaggaactaataagcaattatagcagggttgcaggatacaaagttaatacaaaacctcagcatgctagaagctgtctacagtaagtgcaagtgaactcactggattgaggggatatgggctrggaaagcagccatgtctagtacatctaggatgactgaagtaatgggagaataactcagagaaagggaaatcatcagatcctttatattttaagaatcacaaatagctggccatgtggtggtgcacgttggaacaatatcaactaaactgcaatcctattaaaattttgttccagctattctggtggctgagacaggaagattgcttgagcccaggagttcaaggacagcctggacaacatagtgagactctg

SEQ ID NO: 668230 - DNA, 468 bp, Homo sapiens
ggggccaaaagtttgagaccagcctgggcaaaatagtgagatcctaacactataaactagcaaacaattagccagacatggtagtgcatgtctgtagtcctagctactcaaaaaactgaggtgaaaggatcacttgagcccaggaggctgaggctacagtgagccacaattatgccactgcattggagcctgggtgacagtaagatcttgtctcaaaacaacaaccaatcactttaaaaacactaaaattatacactgtgtgttttctaacaaaaacttwatgaaactaggaattaaaagcaaaagtcaaactggcagattcacaaatatgtgaatatgaaacacactcttcaacatattcttgctcagggggcaacaaattttatttttcaaagatgtcaatacaacctacagttaaaagctatggaacttaaacaatgtgatacacaaagacaaacagataaaaga

SEQ ID NO: 668231 - DNA, 1298 bp, Homo sapiens
tctgtgatctgaagcaacaatcagtgctcagagcacagatccctgatatttggagaatagggccctctttacctcctctggctcctgcaagctgttttcagggtttcagaaacaggtgcacatcaggtttgccaggtagtgaggggtgggggatgagtagctgctacgccgcgaaaagctgaaatcgatggaaattaaccatacttcgctgtccaagccttcccgtggaagttgcaagccttcaatacactccagagttccaaaatagttagagattccaccgacgcaattgttgtctaggtcgggagacagattctcggagcttccaactctgccgtcttcccagtatcctccaataattcctttagttttttcaaggtaagcatttcaaattttttgcaagattaattttatcaaaattatatttattatacttcaaggattgaaaccttgaaatatattttcatgaaatgggaatataactaaaataatttaaatagagactccaaggaaaatgtgagattcttgttgcatattgttctaagatctttttaaattgtccaaaccaaccaaccaaccagagaaaaggacgtaaaggcaaaaataaataaccatttcccctcattttctgcttttgagtactagtaaaggaaaagagtgttgtagactaatggaaatgtttacttcaagaaatagccactttttccttgcttctctttatctcactattttatcaactagggtgtggaaaaagtttttattgacattgtttctaaagaacatcaggatttctaaaaacagatgcacaaacaaaccaaaaacaaatgtgtatttgtatatttaagttacttttgattaatggatttgagagaaaggccaacaccaccaaagtgtaaatcagtttaaaccatacagaatgcacacttactaggacttacagtattatttgttatcactatgtgttacgggaggcagggaggtaacattgctaaaaagggaattttacttaactatttacatgttgctgagataccctaatattttttagaatatttcttagctagattrtcagtttttaagggcgcagtgttacctatttatcatagtgttttgcaattcaggaggatgaatagggttcaacacaagaactgcaagccagttatggaaactagtgtcaagacaggcattagaaaagtttaagtaggccggcgcggtggctcacgcctgtaatcccagcactttgggaggctgaggcaggaggatcatgaagtcaggagatcgagaccatcctggccagc

SEQ ID NO: 668232 - DNA, 1298 bp, Homo sapiens
tctgtgatctgaagcaacaatcagtgctcagagcacagatccctgatatttggagaatagggccctctttacctcctctggctcctgcaagctgttttcagggtttcagaaacaggtgcacatcaggtttgccaggtagtgaggggtgggggatgagtagctgctacgccgcgaaaagctgaaatcgatggaaattaaccatacttcgctgtccaagccttcccgtggaagttgcaagccttcaatacactccagagttccaaaatagttagagattccaccgacgcaattgttgtctaggtcgggagacagattctcggagcttccaactctgccgtcttcccagtatcctccaataattcctttagttttttcaaggtaagcatttcaaattttttgcaagattaattttatcaaaattatatttattatacttcaaggattgaaaccttgaaatatattttcatgaaatgggaatataactaaaataatttaaatagagactccaaggaaaatgtgagattcttgttgcatattgttctaagatctttttaaattgtccaaaccaaccaaccaaccagagaaaaggacgtaaaggcaaaaataaataaccatttcccctcattttctgcttttgagtactagtaaaggaaaagagtgttgtagactaatggaaatgtttacttcaagaaatagccactttttccttgcttctctttatctcactattttatcaactagggtgtggaaaaagtttttattgacattgtttctaaagaacatcaggatttctaaaaacagatgcacaaacaaaccaaaaacaaatgtgtatttgtatatttaagttacttttgattaatggatttgagagaaaggccaacaccaccaaagtgtaaatcagtttaaaccatacagaatgcacacttactaggacttacagtattatttgttatcactatgtgttacgggaggcagggaggtaacattgctaaaaagggaattttacttaactatttacatgttgctgagataccctaatattttttagaatatttcttagctagattgtcagtttttaagggcgcagtgttacctatttatcatagtgttttgcaattcaggaggatgaatagggttcarcacaagaactgcaagccagttatggaaactagtgtcaagacaggcattagaaaagtttaagtaggccggcgcggtggctcacgcctgtaatcccagcactttgggaggctgaggcaggaggatcatgaagtcaggagatcgagaccatcctggccagc

SEQ ID NO: 668233 - DNA, 644 bp, Homo sapiens
aatatacttttagtaaaaatgtgtctcagaggaacactattacagtttttccacttttattaagtggttctctgctcactccctttttccccaccagaattgcggaggactcaggtattcctattaacagataagttattccttwcctaacctcttttaagatatacaagcacatatattccaagtacaaacctttcaaagtaggaaaatgtccttctcaatatattcccgtgttctcacggcttcgatacccagggaatcttatttaaattggttcactggaggcagtacctacagggtatttataacaaacatgaaaaatatgtcgctagttatcagggatgcaatttttcaacaagttctttgatttgcttcatgtcctttcacttacacctaacttgatgaaaaaatccaagaacatctaaaacgaatcatgcccaaattgaaaggccgtatttgtcctatctgaactaacatttatgttgcagtagttctgttgcactttcatactgtaataggatgttaaaatcaaattcttcctctcacttttgactgaggcttttagatagattccaaccacttccaataggtgctaaccactcccaaattccaagcttgtggtataaactttaaaagtacattta

SEQ ID NO: 668234 - DNA, 601 bp, Homo sapiens
ggatatattaagataaaatatatcattaaaattaattgcaccctatttctttctttttttttttttttttttgagacagagtctcgctctgtcgcccaggctggagtgcagtggcgggatctcggctcactgcaagctccacctcctgggttcacgccattctcctgcctcagcctcccaagtagctgggactacaggcgcccgccactacgcccggctaattttttgtatttttagtagagacggggtttcaccgttttagccgggatggtctcgatctcctgacctcgtgatccgcccgcctcggcctcccaaagtgctgggattacaggcgtgagccaccrcacccggccccctatttcttttttaatgtgctactagaaaatttaaaatgacattgtgtatttctatgtaatatatacataattgtatttctcacatgtgacagtaagacccttgaaacagagtagagcctggaaacaggctaaacatacgtgggatcttggagtgtgacagccgtagcattatcaacctgtgtgaaatggatagaatattcaaaaaatgatgatgggacgattggcttactatatggagaaatata

SEQ ID NO: 668235 - DNA, 606 bp, Homo sapiens
cacacacaaagtcaccttgttgtctaccctgtcaaatccttgctgggttccccatcttagtatcaggcagattcatgactaagaatacaggagggactgctgtccttcagccttcacccgtaatccatggtggtcttcttgactagtgtttgtagtgaccaccacacacatgcagtttatgcaaaaaatcaagtatgagctctataaaggctctaacacagcgttcagatggaaggagaaagaaagaaagtggtaggccgggcgcagtggctcatggctgtaattccagcactttaggaggccgaggcgrgtggatcacctgaggtcgggagtttgagaccagcatgaccaacatggagaaaccccgtctccactaaaaatacaaaattaatcaggcgtggcggcacatgtctgtaatcccagctactagggaggctgaggcaggagaatcgctcgaacctgggaggcagaggttgccgtgagccgagatcgcgccattgcactccagcctgggcaacaagagtgaaactccgtctcaaaaacagaaaaaaggaaagaaagtggtagacagagaaagagagagagagatctcgacagaataaggca

SEQ ID NO: 668236 - DNA, 627 bp, Homo sapiens
tatcctgtttggcctctgatctctttatcctcatgtattctctcctgtacactagggtaaaataaaagaatttttattctgccaaaagtgtaacttttagataaaggtcctaattaaaaagaaatctccctattatacacagtcatgtataaataccattaagcacccctcaggcggcaattattggatttttattgttyaaacaactggaaagatatgcttgtggatggtctagtttttagaaaacatgataattatctattaatcaaaaagatgtcttctgttttcattgcactgtttacatatatacatatacttatttatatattagaaaaagaaaagacagtatacgttcagcaaatttgattcctgctttaacttctaaattatccaattctcgttcccttttattgccactggcatacattaaataatgggcacatggcaatccaggcctatactttgttaacaccagccagcgctttaattccaaggatctatcgagcaggcaactgccattttatgtggttaaaaaagagtaagcaagaagattggtttttctgacactgagaagcagaacgtttccacaacatggcagctaatgctataccatatgttaggatagca

SEQ ID NO: 668237 - DNA, 2140 bp, Homo sapiens
ttattaaagacaatgtttattagcataagagaaaaaatagtggcagagctaagattgaaatgtaatattcttcagtgtcatttctgtcaagcaataagctataattcctttttcaataaacacaaaatggtccttatgataaaggaaagtaaaggtcagtcacgcaagctcatggggagatttttttctctccttcaaggagagaagtggaaagaactagcatggaaacttttttgaatgtgatcttaattataatcagtatccttaacaaataacttttaaaaacaaatccataaactgagattagaattgtctttaaaatatcagttatttaataaactgcatgtctgaaagtggatttcaagtgataatttcataagcatatatcataaggcaaaggaatctaagggsaagtctgaatgctacatcacaggggacaaccacaccttgagacaatattttacacttctttacctcctcaggattatttgttaataaaatttctactagatacctaccttcagtaccaaaatgacagaatcccacttttatactaattgtaaggaattaactcagtatttggacatgctgaaaagactaatgatgaataccacttttttaaaaaaagcaatgaaggtaccctcaggaaactgcatggggtatgagaccagatgtcaaatgatctgggttatagtttgaactcagccacatattaaatggtgagaccttagctaaaccacaacctcagagcttctgttttcctcttctgtaaaatggggttaatcatacatatcctgtctgtttcactgagttgtcttgaggatcaaatgagaccatatatgtgaaactgatttttaaactgcagaaagttcaataaaaggcattatttggattattagtaaattgagttttcagcccacgttaaaacaccaatctgtcagataacgcagggtcctgagattaaaagtacatatcaaaaagctgaatcaccattggaaaaatgcttttataacaacattgctgtatttattgatagtaccatccaaaggcctttacaaaagtaatcccttcccccgcatctgtttttccctcctctgttagttgtgggtgaagagaactgttctctaaaaggtttctaaatgatgttgatgttaaaaaatatagtatcaccatttaacagccttttaaagagcagtccccagtatggtctttgttaacaactgagggaggaagggactattttttcaaaggcttttagaggatgttgttaaaagaatatatagtgacatcatttaaaagccttttaaataatagtcctctttccctcccaattgtaatgtccttggctttcatttattttgtactacaagccgaaaatggacaagccaacatattattggctatggcagcatttgttggatggagaatgatgcattgcttttaaaaaggtcggtgtccagaaataaatccaactcttctagaacatagtttcatttctatacaggatattgcccacccaccttatcatcaacttgtagtactttttgtttgttttccttaggagtttactgaaaaagacaccatgccaacaggaaagaagtcacggctaagtcattccgagatttcccacggcatgaatctagttccacaatcaactgaggtttgcttcagtgaactctccatccaatttatggcaaattctaacttttagctcctcttctgtagtctttattaatctatttcttcccactgttcctctcattttagtttaatccactaggagacagcagtggacacttagggttcctttccatacttagttcccagggaggggaaaaatgaagtcgcccgtttggtttaagacacaaagtctgatagacagtaatctttgaaaaaaagaactagccagggagataatcatatgatatgaaacaatttcccgtctcttcttgagctgggtattttcagaaaagtgtcccttcattttaagaacaggatttcatagatccataacactttgatgaaaaaataagcctttaaaacatctaaatgtacagccctctaaacacactgtattttaatcctaaattttagtgctccccttactttttgccaatcttgcacacagaactcacttgtt

SEQ ID NO: 668238 - DNA, 641 bp, Homo sapiens
catgcccttctgatcctaccatctgctgttgaaattagagaaggcaacttctagaataaaattatattattatctaatttgcaatggagtatttttgttgtgtttagcatggttctatattgtacctttatttgtagatgactgtcataagttgcagcaagagatgttttacaatttccatgatctcttggaaaaataataggtcattaaaaacaaacattatttattcatcagagatcaaagcatcagtgtggtcattcagtaaaatatgcttttagacttaaaaatgactcaaatggttttytcaagtaataaaacaatctcaaatgcaataagagcacactttaaaaaagaaaaaattatggcatttagaagcagtagaaaaaataatatatagcctatttgtaattgattaaaacaggacctctgacatatctgtgtactaaggggcttgttcatggagccattgctaagcaggaaagtgtcactaattatttatgaaacatttaaaaaatcatggctcatacttggcataaattctaaattaattccttgaggacttgtattgtatgtagcattagcagcctgatttgctgacccacacagatcagagaccattgtagaaacttgtgagcagaact

SEQ ID NO: 668239 - DNA, 649 bp, Homo sapiens
acatcaattgcctgcagcttcttctcctcttaaaaacttgctccctttgctctctgaaggcagttacttcactttcctgtgtatactccccttttcgtcttgagacagctctcttctctctacacccaaagaaaaatgagtgttcagtctctagagagactagttaatgttttcccttccccttttaaaagactgtgattctgctttaaataataagcatagcccaatttacaaagtaaaaattttataagggagatgatatgaaacacattttatacagaagtgtcaggctctgttctaaacgcctccgtgttcacttatttacattaatacacaacatttttacgagaaaatgggagcacagagagggcaaataactttctcaagcttacacatttgttaagtgcatactggaatcaaattcccagcgatttggtttcagaatctgtactcttaactactatgctatgctgcctctcaaatgctctttgcagggtaatacagcaactagagtgaatgcgattactgaataaaactgaatctaaatttcctggtggtgctagcaaatgatgaaatgcactgtcacttaattttcgttgtgcttgaagaatgattttatgaaatgggcaatgaatcaacctccayatta

SEQ ID NO: 668240 - DNA, 634 bp, Homo sapiens
tcccaaataatgtgggtaacttctcaaactcttttagtcaaagtgcaaccaggagagaaaatgtagtggttttccctttatcagtctcaaatttatcggtttaagaagtccacctatttctcacatgttttatttaatgagtagtctatgctcaaccactctgtatatattctttgctatttcatgagcttcagctatatcatctcagcctttkcctctctagtctgaggagacacactaatttagtctttcctcatttctttgttctttattttaattataaaaagtagcctgaattggacatttgatagtttttaggttctcatgttggatatattttcttagtagattctaactaatgttgggagtaccaagaaatctagattgaactgagttccttctttaaaactacaactcaatcagagcaattgcaatggtcccaactctcagttccttaactcctctccagaacctttttttttaaaggccatcttacctctgtgcttatcacaggaccactgggcttcatgcaaatagcagaaacagtcttatggacactaaagttttcaggactacttggtgattttaaattgcagtctgtgaattttctcttgtccagatatgcaacttccag

SEQ ID NO: 668241 - DNA, 654 bp, Homo sapiens
tctggctcttgccttctgcatcatcttgaatcttctcttggtgaccttcctatgatgtaaaagaggagatactatcgctagcagttctttgtacattacaagcgttgagccaaaattgtgggaggccattgttttgggctgagctcctgtactaggccccagcagagcagaccaaataaaaatggagtcattcatggtaaatgccacataaccaaactgaaactttaaggaagcaggtaaatcccaaaatagaacaggttttttgtttgtttgttttttgtttttttctgaaaacaggagattcctgtcttcccaagtcagcataataaagaagtcccctctgctttagcccttcctaaaaagtraactgaagtagcctgatgttaacccatcatcagttttttgttgttgttgttgtttcttttttttagagacagggtctctgttgcccagtctggagtgcagtggcacagtcatggctcattgcagcctcaacctcttgggctcgagtgatcctcgcaactcagcctcccaagtagctaggacttacaggtatatgtgaccatacccagctaatttttttaatttttatttttgtagagacaggattttgtccaggcttgtctcagactccaggcctcaagcgatcctctt

SEQ ID NO: 668242 - DNA, 654 bp, Homo sapiens
tctggctcttgccttctgcatcatcttgaatcttctcttggtgaccttcctatgatgtaaaagaggagatactatcgctagcagttctttgtacattacaagcgttgagccaaaattgtgggaggccattgttttgggctgagctcctgtactaggccccagcagagcagaccaaataaaaatggagtcattcatggtaaatgccacataaccaaactgaaactttaaggaagcaggtaaatcccaaaatagaacaggttttttgtttgtttgttttttgtttttttctgaaaacaggagattcctgtcttcccaagtcagcataataaagaagtcccctctgctttagcccttcctaaaaagtgaactgaagtagcctgatgttaacccatcatcagttttttkttgttgttgttgtttcttttttttagagacagggtctctgttgcccagtctggagtgcagtggcacagtcatggctcattgcagcctcaacctcttgggctcgagtgatcctcgcaactcagcctcccaagtagctaggacttacaggtatatgtgaccatacccagctaatttttttaatttttatttttgtagagacaggattttgtccaggcttgtctcagactccaggcctcaagcgatcctctt

SEQ ID NO: 668243 - DNA, 610 bp, Homo sapiens
gcagccaacaaacatgaaaaaaagcttaacatcactgatcattagagaaatgcaaatcaaaaccccagtgtgataccatctcacaccagtcaggatggtgatattaaaatgttcaagaaaacaacagatgctggcaaggctgtggaraaataggaacacctttacactgccttctatttttctatacagaagcttgtcacttcttaaaactaacattgacagtagtatgtcagacttatcacagttggtagcatttttttaataatcatagaggacatttctttccactgaaggaaaactcagtgagtctttgaaagaaatttgaaaccttgatacaatcaagaatatactgaagtaactgactagataacactgttttgatcatgcacccctgatgtctaatgttttttgcttttgttgtttttttctttacattgccaaaaggtacaaaaattaccagaaccaaaaattttaaagggggatttcttgctgccccagggctaggctagaccttaggactatggattccaacatgcctatactgaccaatgatggcaaatacactaccccaattaaaatcaacttgcagggagtccagagtcctagtgag

SEQ ID NO: 668244 - DNA, 673 bp, Homo sapiens
taaaaaagacagaaactaacaagtgctggcaaggatgtggagaaattgcaatcctcatacatggctgacacggatgtcaaatggtacagcgactttggaaaacatttttttacagtttctcaaaaagttaaacatagagttaccatataacccaacaattccactcccaactatacatccaagataactgaatacatacatttacacaaaaatttgtacataatagaataaaagtggaaagaacccaaatttgcatcatttggtaagtggataaacagatatartatatatatacaatggaatattatttagccacacaaaagaattacgtacaagttccaacgtgaactttaaaaacattatgctaagtgaaagaaaacagacacaaaggtcacatcttgtgtaatttcttttatataaaatgtccagaacaggcaaatccagagacaaagtagattagcggttgtcaggggctaaaggaagggattgctggagagtggctgctaatggtctgaagattttcttcagggtgataaaatttttctggagataaatagtggtgatggttgtatgactttgttaatatattaaaaaccactaaattgtactctactttttattttttaattgacagataaaattgtattaaattgtacactttaaaagtgtactt

SEQ ID NO: 668245 - DNA, 648 bp, Homo sapiens
tagagacaagtgctacccctaagcacatatgcagtaaaatttaggctgtgtggtgagatttgaggggaaggaagtactcccaggcatctagttttgcttaaagggtgctgtgaagagcaagaaggaatccacatcgtctctgagtttgctcacgtgaaaagacgaattacactggctgatttcagggctgccgggagtgttcactgatccagaatatttccttttcctgactacccttgttcttgaaattccatcaatcaacattgtttttagaagtaaagctttgtcttttctaggaataacctttggaaatctatttatygcagtgagtggtagttcttttatattaattggttttttttttaacagaaaacgtaggaacctgaaggaaagacagtctgatgtgaggatggaagaacagatgggctcatttgtccatttttatttatttacttattcattcattcaacaacaaaaaatgaatcgaagaaacttttttccttttatttttagttggcccataattgcttttatttatgggattcagagtgatatttctgcatatgtatacaatgtgtaatgctaaaatcagtgttaattagcacatccaccacctcaaacatttatcattgctttatgttgtgaaca

SEQ ID NO: 668246 - DNA, 796 bp, Homo sapiens
cgaggtcaggagtttgagaccagcctggccaatatggtgaaaccgcatctctaccaataatacaaaaattagctgggcatagtggcgcacacctgtagtcccagctactagggaggctgaggcagaagacttgcttgaacccaggaggcggaggtggcaatgagccgagatcatgccactgaactccagcctgggcgacagcgcgagactctgtctcaaaaaaaaaaaaaaaagtaagatccatgtaagtgatgtcatatgtcataatccatggtttactcatgacccacagtttggaaaacaccaggaagaaggaagggacaatgaataatcggggaaagcgaaagaggrgggaaagtgaaagagggaggaaagctgaggagttcccaatgttgcaaatggggagatttcacgtgagatatagattacctgcatctcttgggggagctaagagtgtgtacttggaggcagtcaagtttgagaagtctgacatccttactcagccagccccacactaggcactggaaggtgagtcactctggtgaggcgattgcgattgggtgagacccagtaaggatggaaagtgtagaggagacaggaatccacggctttggaaaaaggaaggacaaaactcaccaaaccagagcagggcaggaagtaacaatgagaaactgaaaaagaaacggaatggaaagctatgagacaggatgaaatttggcatggggtctgcccaggcatgtccatgccaggtgcccagggctgcttccacgacgtgggtcccctgccagatttgtgg

SEQ ID NO: 668247 - DNA, 528 bp, Homo sapiens
tgcccaccatccaccttactaggtgattgctagctttctcaccaggtggcacccacagcagtgtgacagtggtgggttttgtaacttacaccaatccgatgtgccccctttgccaccatctcctggccccaagagttgctagggagtgttgaggaggctgggctggtaccaggcgactcactaccaggtagcatgaggacgatgaggatcatttaaccttctgtaaagtgagtttctccttcccctgcacctgaagggaaggaggttaggtggtccccacttagcacagagcctgcctgtggagctacagggagtggcagaggattgcagctctctgtacacttaaaaaaaattttttttttgacacggagtcttgctctgttgcccaggctggagtgcagtggtgcaatctcggctcactgcaacctccgcctcccgggttcaagcgattctcctgccttggcctccctagtagctgggaatacaggtgygtgccaccaggcccagctaatttttgttgttttagta

SEQ ID NO: 668248 - DNA, 626 bp, Homo sapiens
ccggcccacacaaacattattcatcagacttgttgcaaactgcttttaggacacataagaaaaacaaatactttctcattgtgaatgctgagaacatctccccaaaagcccagctgcctcctccttaggaagatcagctatagtatctgtgcaaattatttctcacactcgcacaggcttggttcacaatccacaacaaaatgcttcccgaccactgggcaaacagacaaaatcctccttagccaaagccaaaaaacaagttataggtgaatgaaaactttcaacacaggaaagaatgggggatgaggtaaaacctaaagttgctgatctttaaatactgctatttatcggctcttccagaaccttctccttcttggttatggaagttggtccccatgaygatgatgcaatgagggctttgctttaagtctgactgaatcgggggacaaagtcaaacttgaggttaacaatgccactgggttaagaaggtggtggtgccgggcgcggtggctcacacctgtaatctcagcactttgggaggctgaggtgggtgaatcatgaggtcaggagttcaagaccagccaggccaacatggtgaaaccccacctctactaaaattacaaaaa

SEQ ID NO: 668249 - DNA, 638 bp, Homo sapiens
gcaaaggctgcagtgagccgagatggtgccactgcactccagaatgggtgacagagcgagaatccgtctcaaaaaaaaaaagtcctgtgctgtggcacaaaaaaggagaggccccatggccctgatctgtctggttcctgctatgcagtccccatcaaagccctgagagccccgaggtgtcctcactgccaacacccacctgccgctcgtgctcaaggccacagcgcacccgctcgaagtcggggcccccccagttgcggccgtgccggcggctstcctcccggcggtcccgctcagactcctccaggggcccgctgcgtcgccgggggtcgtccaggaagttccgcactgggttgggttcaagaaccccttcctgcaggcagcagagcagggggttggcgcgggctccccgcagcccaggcagctcggccctgcctcggggacacccgcaccactgacccgctggttgcgctcatactcggcgatcttctccatctcctcattcatcttctcaatgttctgcctgcgccgctcctcccactcctggggggataaagatagggacacccagcttcagggagaactattaagctgccggtgcaggagacgggctgcccagcaggcctgaggctcctctc

SEQ ID NO: 668250 - DNA, 584 bp, Homo sapiens
tttaaagaatcagcaagagagggcccatttccagacccaacaaaaatcagctaaacctaagtaccagctgcctccttttaaagaaagtccctgtacccacagggcacaaatttgtaacccctgcttaggctgcaagtcctggacctccacaaaatacaattccacgaaaacaaatgtattgttcaataaagacaattgtctaagcacacagctatctattataataacacaaatgaggtgtggtttctacctttggatgatttatgaacaagcacagaacaatgaggtaacaaaataccagaatggcccctccggggttgacggctcagatggtcgtacttcagtcacccgtaaagaaccgatgagttgggctctatagagttttctgcctaagattttctgaagaaggtgggcttcgattttctgaagacatttctgaagactttkttttaaagaaaggtgctatgttttccagacctctcaccctaaaatccagaccaaagcttgcaaaattctcaccttggcagccccgatctgttcctttcgaaacttctccaagggagtgatgagcacctcgctggcat

SEQ ID NO: 668251 - DNA, 627 bp, Homo sapiens
ccatactaacattcctgccactgtccattctctggaacacaggagagtcctttctaatgcatccatccttgctgaccaagtctttgtgatttagatttgtaggctgaattcaatgtaagaatataaattgtttcaaggatgacagattacaactggtttctctcccccgccctacctacccacaaccctcgtgttcacctttataacaatttttttttcccaaaagtaatgtggtttaaaaatcattttaagttgcccaacataaatgataaaatcaaatattggattcacaaacaatagcctttattggtttgtgacaagtgatccatctttttacattactgcagctttctgaaccagattatttttcataattgataatttgtgagtcatatatttgttatctgttcttttatggctttgaaaatagtgaacaatgccaaagatcacgaagcttttataaagaaaattattttagtgtggtttattgcctggcattttytgaaagtatgttaccaataagttttgcagagaatgtaacaaagataaaagtaacatcccttgctagaaagagacctgataggtctagaattcatactgataataggaatttagttttaggaattg

SEQ ID NO: 668252 - DNA, 601 bp, Homo sapiens
gaaagtatcgaccagaaaatgtatctatgttatcctattatttaaaaataaacaaacaaataaaacactatagctaaaagtagtttgactctctaattcagtctaaaaccaaaacagtaaccctggcctaactttcttttttgagacggagtctggctctgtcacccaggctggagtgcagtggcacgatcttggcttacctcaacctccgcctcctgggttcaagcgatttttctgcctcagcctcctgagtaagtagctgggactacaggcacccaccaccatgcctggctaatttttgtatttttagtagagatgggatttcactatgttggccaggctagtctygaactcccgaccttgtgatctgcccacctcagcctcccaaagtgctgggattacaggtgtgagccaccacgcccggcctaacgctggcctaagtttcttgccaaatatacgtgtttagacaaaggagagcagatggaagcatcatgtttagctaattaaataaagcaactgagagacaggcacactctatgtacagctgatacctgaataacaggttttaactgcatgggtccacttacacatgaattttttt

SEQ ID NO: 668253 - DNA, 1261 bp, Homo sapiens
ttaacattttcttaaatatgatatgagggtttctaactctggtctccattcaaatttaagatgcaagatatatatttggggctagtgatttagtaatatcaggtaagagatcagagtctrtgaagaaggagaggaaataagagaaatgaagtgagacagtaaaaagagggaagggagagagaaggctagcatacagaaaagagtagcagtcaagaaacttgaaaagaacaaaatgtaaaattctggtttttgaatgatgaatgacaaataataatgaatgaatttgcaagtaatacggtttaactggttgaataaggagaacccctcagaatttctgatacatgtgataattggcatacgtgtgctaaacattatcaatagagcatgatggagtcctttcatacctcagtttatcagctttcataattatagttgtaaattatactaaggaaactactcctgtataaatacatatggtcatatttgctaagcctcttttatcatctctaaaggtgtatctgcagatggtttgagtccaggcttttaacagccatgattccccctatgaattactgagaattggctaggaaatttctgagacttatttggtaaataacttccacaacattcttgtacattccggtaagaaaatatacaagtctaaaagaccagtctcaagggcaaagaaaaggggaaaactaggacctgaaatagaaaacagctttgaatgtttttatcaagcaggatcactcattattcagagaaatcactttctctgtgccaagactgaactgggcatttggatccataggagctaggtaatgtctttgcaacatttggagcctgtaatgtgtcactgacatgagaatattgaacttgggcaaattagaccctatttaaaatcaggttgtttctattcactatgcaacctgcaggatcagcaatagaagtagcaaccccagtgctttcacataaactatgtcacatcacagagttgtgaggtagaaatgctgatctgcactagctgtggccacagtaccattgaccacttgcttaatcatgactgacactgagtgtatttttctagcttcctatctctttttcatgttttctgtcaccattaaatgagtcaatatttgaaactgttagtggttctttggatcagttgtctttaaagtgacaaggatggtggaggtgatggtaatggtagaggtgatattcactccagggggtgcacgagataatacattagcatgaaatg

SEQ ID NO: 668254 - DNA, 1261 bp, Homo sapiens
ttaacattttcttaaatatgatatgagggtttctaactctggtctccattcaaatttaagatgcaagatatatatttggggctagtgatttagtaatatcaggtaagagatcagagtctgtgaagaaggagaggaaataagagaaatgaagtgagacagtaaaaagagggaagggagagagaaggcyagcatacagaaaagagtagcagtcaagaaacttgaaaagaacaaaatgtaaaattctggtttttgaatgatgaatgacaaataataatgaatgaatttgcaagtaatacggtttaactggttgaataaggagaacccctcagaatttctgatacatgtgataattggcatacgtgtgctaaacattatcaatagagcatgatggagtcctttcatacctcagtttatcagctttcataattatagttgtaaattatactaaggaaactactcctgtataaatacatatggtcatatttgctaagcctcttttatcatctctaaaggtgtatctgcagatggtttgagtccaggcttttaacagccatgattccccctatgaattactgagaattggctaggaaatttctgagacttatttggtaaataacttccacaacattcttgtacattccggtaagaaaatatacaagtctaaaagaccagtctcaagggcaaagaaaaggggaaaactaggacctgaaatagaaaacagctttgaatgtttttatcaagcaggatcactcattattcagagaaatcactttctctgtgccaagactgaactgggcatttggatccataggagctaggtaatgtctttgcaacatttggagcctgtaatgtgtcactgacatgagaatattgaacttgggcaaattagaccctatttaaaatcaggttgtttctattcactatgcaacctgcaggatcagcaatagaagtagcaaccccagtgctttcacataaactatgtcacatcacagagttgtgaggtagaaatgctgatctgcactagctgtggccacagtaccattgaccacttgcttaatcatgactgacactgagtgtatttttctagcttcctatctctttttcatgttttctgtcaccattaaatgagtcaatatttgaaactgttagtggttctttggatcagttgtctttaaagtgacaaggatggtggaggtgatggtaatggtagaggtgatattcactccagggggtgcacgagataatacattagcatgaaatg

SEQ ID NO: 668255 - DNA, 631 bp, Homo sapiens
tctactataaagatgaaatcattattgcatgaactgtacagatcagaagtattattatatctacagcttagagcaggttgaccagaggcatgctattattccaccagggatataacaggagagatgcagataattatacattgcacttgcagtttcaaacctctggtactggtacatacacatatacacatctatatatttagatgtttaggggtttttatcttgataaaggaaaaaaaaaaaacaagagaaaagatgaaataaatgtgttgatgacagtttgttaattctgtgccagtaccttggctttaattactgtagctttataatagtttcagtatttggaaggatactatttctctccatattgtttattgctagaaattttcctctattacttttccagataaactttagaaaaattcgataacttycaaaataaaaatctgttgggttttttaaaaatcacgttgaatttgcacgcaatttagggaaaaaaaagctatttttgtattattatactttaacttctaggatacaagtgcagaatgtgcaggtttgttacataggtatacatgtgccatggtggtttgcagcacccatcaacccgtcatctactaatgtagatgtt

SEQ ID NO: 668256 - DNA, 600 bp, Homo sapiens
atggagtcctaaaaaagaatgagttcgtgtcctttgcaggaatatggatgaagctggaaaccatcattctcagcagaaaatctctattttcacaatattgtgatgaggtgttggtaagacatttatttggtgatggccactgaagcacatgagagatacaggaactagtaacaaagatctggacatcattagtcttgagctgatagttgaagtcatagaaagatacattttatctcaacttaaaaacaattatcatcaagttttgtgcatcctaattcccacaatcttctattcacatgtaatctacttatggtgcccattattcatatcataccagcagccttaagaatatacaaagtgttttacrttaaataaccccagaactgaatcccaaaactataaaactttatattttctgactttctgactaatttaatgttttctgcattttctttttcttcatcatcaccttgctggcctaatttcttcaggtggcactttttgttagatgagctggcttagtctaagcatttgattttaaagcttagagcaatctaagggtttctaaagcattcttaggtccactactggactataata

SEQ ID NO: 668257 - DNA, 1326 bp, Homo sapiens
tgctatttccttaaatagtcttcagcattccttccactctgcttacattgcacttgatatatcactttttttggccgtaattttcacagtacactttaactgcttacatatttatgttatcaatggtctgtgagtatcccaggaagagcaattattgcatcttatatctctatatcccaactcccaattagagtttggcatgtaacataagctcagtaaatgttttatgaatgactaaattatgagaaaatttaataaatgaataaattataatttaagtaattgtatggaaaggaatatataaatgttgtacataaatgttgtatgggagggcttattttcatatgggtgggccagggaagttattgtggagatgggatgagacatgtttgaaacttcaccaatgggttttcttaaaatttttgttttttaaaaaggatcagagaaacatgctagtctaaaaggagggcatatgcaaagtccagagtaacatgcaagcctaatcagaacatrgggtgcaaactagaatggctggatcttagatatgatattggaaatatgtgggagatgaagaggtaagttaggaacaaaccagtgggatttacacactcaaacaaggaaattatgctttatttggttaaaaaaaaagaaatcactaacagaattgaacagaagaatcatgatattgggattatgattattatcagaatattattctggtgacaaagtgtcaaatggattagagtggcagaatgttgaattagtaatacaaattttgaagaggtacaagctttaactataggagttaaaatgaaaaggagaagatggatgaaatatataggatggaagaaagaatgtaaccttcctcaaaactcaatgaaaagcagatcttgaaaatatctcattccaaccgatttggtagaagagtaacatgcaactacttctgtctaagctcttagacaaaaaccttggataagagcttggtgactattaataatcaggcttccctaaaataaagatataatattttaagttgcccttagctcttagaaatctatttttctttcattagctattttattagattgacatctttttcatatcttatgttcacacatttgcccctctagattcctgggcttaaacatgtgactccagtatatgccctgcacacagttcttctggtgagttactagtgcccttgctgagtatttgtatttattcctactaaagccttaaagatcaggacttttaccaaatactcttgaagccctcttatttgcctcatgcccctgcctttttcccttaaactagaattaacgtagt

SEQ ID NO: 668258 - DNA, 1330 bp, Homo sapiens
gccttttctatttgtgctgatgttgtctgtggctccttttgtgttacaacggcagagctgtctctgggacagagactgtctagccctcagagccggaagcatttcatctgaggtcctttatcgaagaggtttttggacccctgagctggaacagcgcctgacacacactgtgctcaaaaagcagcctgcgcgggtctcccctgcgttcacccactgtcgcccgccgctgctaagactggccaccaggtggcgccatggctccccagcctggcaggcgccgggcagcagagcgctcagctcgctctccggagtacccacctccctgccgcttcctttctgcctgttccgagaaatggaagtcagccccaaatcaataattgaattcccatcatgtgataactaatcattacatatatggctattgctttttcatgcacaaagggcttggtaaagaccaactggggcggcaggggcggactcggggctttgcagggctccctgaggtctgatgggttacaagcaggtcctgaggtcaagtgtggggcttacctggcttcaatctggggtgtggttgagtgccccggccagggttcaaatcccaactctgccacttgctgactgattctggggaggagggttcctttccctttcggtgcctcagtttccctctctgtcaaatggggaaaacaatagcacccatctctggggctcttacaaagattaagttcactgcattattacatagaaagcatttagaacagtgcagccacatagtaagtacttggtaatagttttctgtttctgtagcgggtatgccattaagcattttgaggcctcagtttacacagttaaaaaaaaaaaaaagaggctgggcacggtggctcacgcctgtaatcccagcactttgggaggctgaggtgggaggatcgattgagccccggaattcaaggtcagcctgtgcaacatarggagacctcgtctctacgaaaaatgctcacgtaattaaaaaaaaaaaaaaaattagccaggtgtagtggtgcccaactgtagtcccagctactcgggagggtgagatgggaggattgcttgagcccaggagttcaaggctgcagtgagtgatgatcacaccactgcactccagcctgggtgacagagtgagaccctgtcttggaaaaaaaaaaaaaaaaagaaagaaaagcaggttgttttgtttagacatcacaattaaactgcaacctaacctttaaaaaagaacctacttagaaatcagagctctctttctcttcttcttctttttatttacttatttttttgagcaggagtcttgctc

SEQ ID NO: 668259 - DNA, 655 bp, Homo sapiens
gatccgcccactttggtctctcaaagtgctgggactacagacatgagccaccacacccggcagagcttctatttcttgagtgtgttctcagccatgctaagacattttctcttctcagcctgatgatgcttttggcttgtgtttctttgtttttaattaccccttcccagtcgctgtcatgggatcatgagggtcttctgtccatctagatgacacctttcttgtgccacgtgtctccaacattccctggtttttaaacccttattgctttcaagatactatccaagctccttaatgtggcacattgtccttcgctgctatctgcctgctttttttttgagacagagcctcgctctattgcctaggctggagtgcagtggcgcaatcacagcttactctgyagcctcgacttcttgggctcaagcaatcctcctgcctcagccttctgagtagctgggaccacaggcatgcaccatcatgcttggctaatttatttttatttatttttatagagaaggagtctccctatgttgcccaggctggtctcaaactcccggactcaaagttcattgcagtttcaattttttccttggctcaaggatcctcccacttcagcctcctgagtagctgggactacagacgggcaccaacacac

SEQ ID NO: 668260 - DNA, 676 bp, Homo sapiens
tttaaatcatggttttattttttctatttattttattttattaattgtatagaaaagctattttctccttgaccttcctttgccttttaaaaatatgctttataatgtggtttttctggcttagcttttggctatcttttttttcttgaagtacttctttatatatatttctttaatatatatgtgtatttatatggaatatataatacattccattaaatatattatatatgtagtacattccatgctttatacatttcatgcttgttcatttctagttactattcatcttaraattaaggcttttgggaaaaaaagtgaggtaggagaagatggaccatttagcaaaataaaagaaaatatagtcctttgatgtaagagcattgagaagagatgaaaaagccataagaaaaaaaatgatacagcagcaaaaagagataaatagtgaaatggtagagctcaaaaagaaatgagagagaaaaataaaagcccaacagaaatcaagacattagatgctgcaaagaatagaatagatggcacagaaacacagtcaatgatgaagagaataggcttgaaaagttattttttagtcgactggttatttcttttaaaaataaagtataacagaagggctgcaagagtgagctgtgttaattaattgtctttgtaggcttta

SEQ ID NO: 668261 - DNA, 1190 bp, Homo sapiens
tctaatgaataagatctagtatttggtagcacaatgtggctatagtcaacaataatttattacatattttaaaacaactaagaatgaaattggaatgttcctgacacaaatgacaaatgcttgaagtgctggataacttaattaccctgatgtcattattacacattgtatgcctgtatcaaaacatcacatgtgccccatatagatacctatcatgtacttgtaataactaaaaacaaaaacaaaaaaactttaaacccagaaattctgtaaattctttatatgcctaaaatctaatcttccaggaaatagagaaagcaaaaattgaagctactattctgtaccacaaaaatgaccagcaagaggaatttgttgataaagcagaagggtcaggcaccttgagagaatgtgagcatctcatcttaaggtctatgataccttgtgaaaagaactcaagactctgatttcatttctgcaatgaaaagtgatcctaaaaagcaaaaacgtttgagaaaagagtctcctaacaagctcagcttttaaaagggtataggaaataaacgtaaaaaaaaaaggtaacatctttaaggtttcatattagctcgagattctttttaatgctaaagccaacaaaaaaagagctctataatctstatgtggagccatatgtaaaggaaaggctgagggatgaggaagagaatgtaaggctcagctttttaaaatcaagaataatctttagcctgaaaagttaagtggggaaaaaggcaagaaggaaataaaatccaaaactcatgtcaaactcaatccaattccttttttgatggcataatgagaatgagtgggcatggaaacagaccaaatggtttacctggatttcagcaaagcttctgataaatagctaatagtaattaagtggtgttgaaggactcatacattacagagaacatttagacatgttattggttcaatgaatactgaccttaacatggactacagctgcttcagacaggactgatattgaccttaacatggactgcagctgcttcagacaggattttgcctggtcctctcctgttgtcatttttatcaataaattaaagatttcgaatttgttgatgtcactaagtgaggcagaatggtaactgtacaatgtgatagaattagggcccaatatttttaaacacatagaa

SEQ ID NO: 668262 - DNA, 1190 bp, Homo sapiens
tctaatgaataagatctagtatttggtagcacaatgtggctatagtcaacaataatttattacatattttaaaacaactaagaatgaaattggaatgttcctgacacaaatgacaaatgcttgaagtgctggataacttaattaccctgatgtcattattacacattgtatgcctgtatcaaaacatcacatgtgccccatatagatacctatcatgtacttgtaataactaaaaacaaaaacaaaaaaactttaaacccagaaattctgtaaattctttatatgcctaaaatctaatcttccaggaaatagagaaagcaaaaattgaagctactattctgtaccacaaaaatgaccagcaagaggaatttgttgataaagcagaagggtcaggcaccttgagagaatgtgagcatctcatcttaaggtctatgataccttgtgaaaagaactcaagactctgatttcatttctgcaatgaaaagtgatcctaaaaagcaaaaacgtttgagaaaagagtctcctaacaagctcagcttttaaaagggtataggaaataaacgtaaaaaaaaaaggtaacatctttaaggtttcatattagctcgagattctttttaatgctaaagccaacaaaaaaagagctctataatctgtatgtggagccatatgtaaaggaaaggctgagggatgaggaagagaatgtaaggctcagctttttaaaatcaagaataatctttagcctgaaaagttaagtggggaaaaaggcaagaaggaaataaaatccaaaactcatgtcaaactcaatccaattccttttttgatggcataatgagaatgagtgggcatggaaacagaccaaatggtttacctggatttcagcaaagcttctgataaatagctaatagtaattaagtggtgttgaaggactcatacattacagagaacatttagacatgttattggttcaatgratactgaccttaacatggactacagctgcttcagacaggactgatattgaccttaacatggactgcagctgcttcagacaggattttgcctggtcctctcctgttgtcatttttatcaataaattaaagatttcgaatttgttgatgtcactaagtgaggcagaatggtaactgtacaatgtgatagaattagggcccaatatttttaaacacatagaa

SEQ ID NO: 668263 - DNA, 1263 bp, Homo sapiens
agtaacggaagaagcgatctcgggcagcggagtggaacctgataaacagattccagacaggccttgagaggactagcttcctccctgcgctgtgacctgaccccctcccaggggacatttgcatttaggcagtatgtcctgaccttcctcctttttcctcttggacagggacccacaagtctgtgcaggaaattccagactcactgtccagtggagctatcccctgatttgagagcaggaagggagcccaggccacactgcagcagaagggaggggctgatgtcctccaggaatcaggagttttggatgaggctgttggctgcacaggccaagcctttctcccaccttatgtctcaatctactaattttcagtgcagaatataaaaacaccccaacaaagccgggcgtggtggctcacacctgtaatcccagcactttgggaggctgaggcaggtggatcacctgaggtcagaaattcgagaccagtctggccaacatggtgaaatcccgtctctaaaatacaaagattagccggatgtggtggcgcacgcctgtagtcccagctactcaggaggctgagacagaggaatcacttgaacctggaaggcagaggctgcagtgagagagtgggcgagacagagggagactccgtctcaaaaaaaaaaaaaaagaaaaaagaaaaaagaaataaataaaattgttaaatgtgtggaaaaactggaattatatggcggcaatattttataaagcaaaaacttgaactagctcagataagcagcctgctgcatccacacacagttcacaagtcaaccactttcaggaggccaaacatattccaaagcttggaggccagacgataattcctgaaatggagccctagggtggatcagaacctggggatgagtcaggggcactaatggatttaactctgggagttcaatttgccctcctgtctcctaaacacagcgtggaaatgctccttccatcaagcctataaatgttattgaattaaatgcttcaatcaaaggctgagacattagactttgaatttgaaaacattcatcttcatatttttatgaagaataccagatataaaagcattatgaggccaggcaccgtggctcatgcctgcaatcccaccactttgggaggctgaggtgggtggattgcttgagctcaggagctcaagaccggcctgggcaatgtggtgaaacccccatctctatttaaaaacaaacaaaaaaaaagcrttattaactggga

SEQ ID NO: 668264 - DNA, 656 bp, Homo sapiens
gaaagatatgtctttggaataattcttaaagtgacaggaaatttttcacacctataattccagcactttgaaagggtgggggggtggggcgcagttcaggaggtcgggaattcgagaccagtctggccaacatagtgaaaccctgtctctactaaagatacaaaaaattagccaggcgtggtggtgtgaacctgtagtcccagctacttaggaggctgaggcaggagaatcgcatgtacccgggaggaggacgttgcagtcagtcgagatcatgccattgcactccagctcaggcgaaagtgcaagactccgtctaaaaaaaaagacaggaaaattttaaaacaagcaaaataaataaataaataaataaataaaaaagaataatcctggcttaaatttattcactcttagaaaattttcttcaaaaacatacttaaatgggacatagctgttaagtgtgtctgcaaaataatttccttggaaaacagtactaagaattcccaygtgaatattactgttccgatgatagccacagttgagttatcttgcacagcattcagtccgttcatgttcaaacagggcatgacacctaagctttgcatgataatgtcaacaatgtaaatttaagacctattaatatatataaaaaacactta

SEQ ID NO: 668265 - DNA, 656 bp, Homo sapiens
gaaagatatgtctttggaataattcttaaagtgacaggaaatttttcacacctataattccagcactttgaaagggtgggggggtggggcgcagttcaggaggtcgggaattcgagaccagtctggccaacatagtgaaaccctgtctctactaaagatacaaaaaattagccaggcgtggtggtgtgaacctgtagtcccagctacttaggaggctgaggcaggagaatcgcatgtacccgggaggaggacgttgcagtcagtcgagatcatgccattgcactccagctcaggcgaaagtgcaagactccgtctaaaaaaaaagacaggaaaattttaaaacaagcaaaataaataaataaataaataaataaaaaagaataatcctggcttaaatttattcactcttagaaaattttcttcaaaaacatacttaaatgggacatagctgttaagtgtgtctgcaaaataatttccttggaaaacagtactaagaattcccacgtgaatattactgttccgatgatagccacagttgagttatcttgcacagcattcagtccgttcatgttcaaacagggcatgacacctaagcttygcatgataatgtcaacaatgtaaatttaagacctattaatatatataaaaaacactta

SEQ ID NO: 668266 - DNA, 656 bp, Homo sapiens
gaaagatatgtctttggaataattcttaaagtgacaggaaatttttcacacctataattccagcactttgaaagggtgggggggtggggcgcagttcaggaggtcgggaattcgagaccagtctggccaacatagtgaaaccctgtctctactaaagatacaaaaaattagccaggcgtggtggtgtgaacctgtagtcccagctacttaggaggctgaggcaggagaatcgcatgtacccgggaggaggacgttgcagtcagtcgagatcatgccattgcactccagctcaggcgaaagtgcaagactccgtctaaaaaaaaagacaggaaaattttaaaacaagcaaaataaataaataaataaataaataaaaaagaataatcctggcttaaatttattcactcttagaaaattttcttcaaaaacatacttaaatgggacatagctgttaagtgtgtctgcaaaataatttccttggaaaacagtactaagaattcccacgtgaatattactgttccgatgatagccacagttgagttatcttgcacagcattcagtccgttcatgttcaaacagggcatgacacctaagctttgcatgataaygtcaacaatgtaaatttaagacctattaatatatataaaaaacactta

SEQ ID NO: 668267 - DNA, 1884 bp, Homo sapiens
gccagaggcttccctgactctgtggctggcgcagccttgacaagtcatctggaattggctcacggcctcctcgcgtctcccggtgtctgatgtggcaatgaagctctatttcagggcctgcgggaggacccagcgtggctcagggtttgtcctcaagggagggcgtggatcagagcctgtagtgcggacctgggtgggggagggagaactggaccctgcactccctcctgtgtgaccatgggcgggttatttcacttctctgcactttcagagtctccaccttgagatggccccgtgaggactgattcaaagaaggcacgggccgtgggygcatcctctgctcctctccccacctgcgctgggtcccatcagattttggcattcccagcaccggcagtcctggggtgactcacgatggctggcaactttttgtcctgtctttaagttaaaaactgtcgtatgtgccttcatataaaacagaatgcagaaataagccaaaaggagaaaatggaaatccctgcagtgccattagctttcaacatttttgtgtgtctcccacgtccatgcacatatgtgtaaacatacttaatgacaaaagggtcgtattgtaccttccctttgtgatctgcctctgcccatgccacacataatggaaatatttctggatcatccagtgttctgccggaacatctttcaatagaggcagcataatctactcaggaaacatggagaggccgggatctccaggcacttgggtctgtgggcctgggggctgagggagaggctgaggaaaagcactccccagcttttgacttgcacagatgggtggtagagaggaagggtagcttggagagagggtttgtcactggggctgtctcttggaaggagtctggcagctggaaatgcaggtcctaggtgcaggggcaaggtctgggtagaattcgggttgggagcgctctgtatggagggctgtggattccacatcctggggtgggtgggcgggcaccaaaggaagagggaggcagaaggggaaggaagtgctccttggccccccaccatgtgcagacaagtggaggaggcagtggggtcttaggagcggggctgcccacctgctaaaggatgagagaggttcaagaggagggggttcagggaattgggatggcagggggcatcaggcccagcagccaagagggggctttgcagggtcgctggggagttggtggaagctagactgaccaggtgaggggccagtgagaggcaagggagtggagggaagctggtgcgcatggcacacatgctgtggtggggcagacatcagctgcggagggtgtgcagtcttagatgtgagtgcagtgtttacgtgtgcgcttgtgtagatgtgtgtgtggccctgcctcgagcacagaggattttaggtggcttgagtttgctcagggaccgaggatgaggatccgggagatggagagtttgaagctatagaagagagagtgtattagtcaggtgttattcctcaagtgttggaaatccaagtaaaagtggcttcagaaaaaagaaaaaaaaacttattggttaatctgcaaaaagaaaaatatctagaactatctagcttcaggtgtggctggatccaggtgcccaaataaattttcagttgttttttttcccacatccccaacccttggctttgctctcctctatgtcgatttcactctcaggcctgctcttctctgaggcagaaaaatggatgcaggcagctgctgcattacctcctcacagggcaacaacccgggggaaacagcttttcctttccaacaattccagcaatagttcctggatttaacttcatggaataccttgtggcaagtcctcatccctgagctatgttca

SEQ ID NO: 668268 - DNA, 621 bp, Homo sapiens
cagagatatgttggttttgtttyaaacatggcacatgtaataaacttcatttttttaccttttaataatacattctaaattttcacccataaagtttttcatcactttcactttggctaaaatcagatgaaatttaagtatattggcatgttgggataatttgtgaaatatttcattatctacatacaggaccagttgcataattcacaaggtctagcacaaaatgaaagtgcaaagctccttgttcaaaatttattaagaataatgttctgatggtattaaagcattaaacaaagcatgaggctcctgtaagcacagagcaccatgttacttcgcaggttgcatacccatgaagcctgtctacaaataatgttttttccctgatcaaagctctcgtattagaaataataggtaattaaattttcaaaacttgatattcatgatgaaaattctgatataacctcagtaatgttaaatatttttctataacctgtttaatcaattatttctctaatattactgacttaatttttttctgataatacagtgttctttgattcattgtactattcttgaattccttattttgaattcccagtggttaagacaaacagctctaaa

SEQ ID NO: 668269 - DNA, 621 bp, Homo sapiens
cagagatatgttggttttgttttaaacatggcacatgtaataaacttcatttttttaccttttaataatacattctaaattttcacccataaagtttttcatcactttcactttggctaaaatcagatgaaatttaagtatattggcatgttgggataatttgtgaaatatttcattatctacatacaggaccagttgcataattcacaaggtctagcacaaaatgaaagtgcaaagctccttgttcaaaatttattaagaataatgttctgatggtattaaagcattaaacaaagcawgaggctcctgtaagcacagagcaccatgttacttcgcaggttgcatacccatgaagcctgtctacaaataatgttttttccctgatcaaagctctcgtattagaaataataggtaattaaattttcaaaacttgatattcatgatgaaaattctgatataacctcagtaatgttaaatatttttctataacctgtttaatcaattatttctctaatattactgacttaatttttttctgataatacagtgttctttgattcattgtactattcttgaattccttattttgaattcccagtggttaagacaaacagctctaaa

SEQ ID NO: 668270 - DNA, 1428 bp, Homo sapiens
ggtgctgcggagcagcccgattccaggggaaaaccatttcccttctggctcccccaactgttgagagctacttccactcaaaaccctgcagtcatcctccaagcccatgtgtgatctgattcttctggtacaccaagacaggaaccccgggatatgaaagccctctgtccttgsgataacgcagggatctaattgaattgactaacataagccgcctgcggacagctaaagagcatcctgtaacacgcccactggggcttcagctataaacattcacccctagacactgccatggggtcagagccccacagcccgcccgtctgtatactcccctggaggtttgagcagcgggacactgaagaagcgagccacacccccatcgcacgccctgccagggggacaagggaacttttctcttatcaacatcaacctaagtagcctcgcatcaaaagcatttgactgtcaatagttaggattttccctaccagcagtagcaagtttttagccttattggaattagtttccagctctgcaaaaatgttcatctgctttgtaactccaggcttttttggtagagcagctgtttgttgaccagtcgctttgcctctgtaagttcaccatataggctattcatgtctaaagtgttcattttcaaaccctctgaaactcattgggtatctattacaatgtctgaagacaaatatttcattaacaaataagaaggtgatagacctggagtgagaatccacccaattcatgtcaatcggagacaaatttgcaatatcctgtgattcctgaactggctgtggtcactgatcacttctgtcctggaggaactagagacattcaagacaaataaggactcatctagtcccctgattaaaggacttttcatagaggctgcattaagggccaaattatgtacaatgtgctctctgagatggggatgtgtaaatagccgtcaaaatgtcatctgggcagaaatttgtttgggaggataaatttatgttcaggggtgaggggtgaatacaatagaaatttgtattttgcagagggaaatgtgggttccatggtgggtagaaataaaatagattagtagaatacttagaatgtcaaagaaatttttaaatcatagggttttttttttgagaaaatttttgaaatgattttgaaatgatttattcaaaaagtgcccctcaaaagtgatcactccatagatgacagctaaggatcgcaatcttactgctatgcccttgtgttttgagtgaagacttgtgtgactatagtgagggtctaggtgtttaatcgtcagaggtaaattggagatttcagatgaggctgtctcatggaagagggaggaaggatactcacaaaccctacagctggaatctgagcatccagtggaaaatgacagtccctgatccctca

SEQ ID NO: 668271 - DNA, 1428 bp, Homo sapiens
ggtgctgcggagcagcccgattccaggggaaaaccatttcccttctggctcccccaactgttgagagctacttccactcaaaaccctgcagtcatcctccaagcccatgtgtgatctgattcttctggtacaccaagacaggaaccccgggatatgaaagccctctgtccttgcgataacgcagggatctaattgaattgactaacataagccgcctgcggacagctaaagagcatcctgtaacacgcccactggggcttcagctataaacattcacccctagacactgccatggggtcagagccccacagcccgcccgtctgtatactcccctggaggtttgagcagcgggacactgaagaagcgagccacacccccatcgcacgccctgccagggggacaagggaacttttctcttatcaacatcaacctaagtagcctcgcatcaaaagcatttgactgtcaatagttaggattttccctaccagcagtagcaagtttttagccttattggaattagtttccagctctgcaaaaatgttcatctgctttgtaactccaggcttttttggtagagcagctgtttgttgaccagtcgctttgcctctgtaagttcaccatataggctattcatgtctaaagtgttcattttcaaaccctctgaaactcattgggtatctattacaatgtctgaagacaaatatttcattaacaaataagaaggtgatagacctggagtgagaatccacccaattcatgtcaatcggagacaaatttgcaatatcctgtgattcctgaactggctgtggtcactgatcacttctgtcctggaggaactagagacattcaagacaaataaggactcatctagtcccctgattaaaggacttttcatagaggctgcattaagggccaaattatgtacaatgtgctctctgagatggggatgtgtaaatagccgtcaaaatgtcatctgggcagaaatttgtttgggaggataaatttatgttcaggggtgaggggtgaatacaatagaaatttgtattttgcagagggaaatgtgggttccatggtgggtagaaataaaatagattagtagaatacttagaatgtcaaagaaatttttaaatcatagggttttttttttgagaaaatttttgaaatgattttgaaatgatttattcaaaaagtgcccctcaaaagtgatcactccatagatgacagctaaggatcgcaatcttactgctatgcccttgtgttttgagtgaagacttgtgtgactatagtgagggtctaggtgtttaatcgtcrgaggtaaattggagatttcagatgaggctgtctcatggaagagggaggaaggatactcacaaaccctacagctggaatctgagcatccagtggaaaatgacagtccctgatccctca

SEQ ID NO: 668272 - DNA, 1489 bp, Homo sapiens
tgagacaatagagtgcctagtacagcacctggttcatagtcaatgctcaacaaaagtaattattattagtaatatatcacttttgattaaattycgaatagaaaaaagacatataagtataacagtaatttctttaaaagttgaactttctaatattgaattactttgaccacccagttcctaaaaatttttccctggccaaatgttattgtggtttattaatgggctcaaggtctatgctatattgctaacttctttattacttaccagttcagttaagtctttcatgctttttttctatctccaagactctttcaatttcaaataaagaaaaatttgattatatctttttccatgtctctaagcactctgttcttaagaactaatattacgtgtatgtctgcatacataatgggcctgtatgtgtgcagtttttatccagctcctcatccttttattatccaatttttttttacaaaattattattattttgtataaactctggacaagaaacttaaacatatagccactgttatcttacccttacaaaaggcatctggatttctgcttgaattaagaaaatttcctaggagcatgaaggtgctagactccttttctagaaagggtgaaatgtgtcaaggtgtggataaaggacatctgcaatatgttcttagtaagaatatgaacacagttatccatggggaagcactgaaatgctcatctagtggccttcatatttttttaaaggacaaaaggctaagagccaaatatgaaaatattgtctctcagtagaaaaaaaatagtaattagtcagataaagtctatctaacaaaaggtgttttacagtgaatttaaatattccaaaaaaatcactcaaaattagaattatttttatgtgttttgataatttttaaaataaaaattttcattattatacaactccgacatgaagaaacctggagatctcatgaaagtcaattaaacacgaaagacaaattaaatttctattcagcttttcctgctactttaaaaaagcaatggaaaatgagaagaataattttacctagatagtatgcagagtaggtaatgatcttgagacacagctaaaccgtgaaccatcacccactggtgaaagacctgctgacttgtcctgactgtgaatctctatgaagctggtggtaaaattctctgaagaatcattacttaaatattttacatatatgctatttttcaaattattaaaacccatttagaataaaaatatagtgaactgcaaaatatgtacttttgttctttcatatttcatattccagtttttactataatttcaatataaaaacccatggcttccttctatatctgattagtaatccaagacaagtccgaaggaattgtcaagtgtactaaaaggtatacattctaaagagttttaaaattgttttagtagatttttagttttaattcacattctactctctaaaatgtaaa

SEQ ID NO: 668273 - DNA, 1489 bp, Homo sapiens
tgagacaatagagtgcctagtacagcacctggttcatagtcaatgctcaacaaaagtaattattattagtaatatatcacttttgattaaattccgaatagaaaaaagacatataagtataacagtaatttctttaaaagttraactttctaatattgaattactttgaccacccagttcctaaaaatttttccctggccaaatgttattgtggtttattaatgggctcaaggtctatgctatattgctaacttctttattacttaccagttcagttaagtctttcatgctttttttctatctccaagactctttcaatttcaaataaagaaaaatttgattatatctttttccatgtctctaagcactctgttcttaagaactaatattacgtgtatgtctgcatacataatgggcctgtatgtgtgcagtttttatccagctcctcatccttttattatccaatttttttttacaaaattattattattttgtataaactctggacaagaaacttaaacatatagccactgttatcttacccttacaaaaggcatctggatttctgcttgaattaagaaaatttcctaggagcatgaaggtgctagactccttttctagaaagggtgaaatgtgtcaaggtgtggataaaggacatctgcaatatgttcttagtaagaatatgaacacagttatccatggggaagcactgaaatgctcatctagtggccttcatatttttttaaaggacaaaaggctaagagccaaatatgaaaatattgtctctcagtagaaaaaaaatagtaattagtcagataaagtctatctaacaaaaggtgttttacagtgaatttaaatattccaaaaaaatcactcaaaattagaattatttttatgtgttttgataatttttaaaataaaaattttcattattatacaactccgacatgaagaaacctggagatctcatgaaagtcaattaaacacgaaagacaaattaaatttctattcagcttttcctgctactttaaaaaagcaatggaaaatgagaagaataattttacctagatagtatgcagagtaggtaatgatcttgagacacagctaaaccgtgaaccatcacccactggtgaaagacctgctgacttgtcctgactgtgaatctctatgaagctggtggtaaaattctctgaagaatcattacttaaatattttacatatatgctatttttcaaattattaaaacccatttagaataaaaatatagtgaactgcaaaatatgtacttttgttctttcatatttcatattccagtttttactataatttcaatataaaaacccatggcttccttctatatctgattagtaatccaagacaagtccgaaggaattgtcaagtgtactaaaaggtatacattctaaagagttttaaaattgttttagtagatttttagttttaattcacattctactctctaaaatgtaaa

SEQ ID NO: 668274 - DNA, 1489 bp, Homo sapiens
tgagacaatagagtgcctagtacagcacctggttcatagtcaatgctcaacaaaagtaattattattagtaatatatcacttttgattaaattccgaatagaaaaaagacatataagtataacagtaatttctttaaaagttgaactttctaatattgaattactttgaccacccagttcctaaaaatttttccctggccaaatgttattgtggtttattaatgggctcaaggtctatgctatattgctaacttctttattacttaccagttcagttaagtctttcatgctttttttctatctccaagactctttcaatttcaaataaagaaaaatttgattatatctttttccatgtctctaagcactctgttcttaagaactaatattaygtgtatgtctgcatacataatgggcctgtatgtgtgcagtttttatccagctcctcatccttttattatccaatttttttttacaaaattattattattttgtataaactctggacaagaaacttaaacatatagccactgttatcttacccttacaaaaggcatctggatttctgcttgaattaagaaaatttcctaggagcatgaaggtgctagactccttttctagaaagggtgaaatgtgtcaaggtgtggataaaggacatctgcaatatgttcttagtaagaatatgaacacagttatccatggggaagcactgaaatgctcatctagtggccttcatatttttttaaaggacaaaaggctaagagccaaatatgaaaatattgtctctcagtagaaaaaaaatagtaattagtcagataaagtctatctaacaaaaggtgttttacagtgaatttaaatattccaaaaaaatcactcaaaattagaattatttttatgtgttttgataatttttaaaataaaaattttcattattatacaactccgacatgaagaaacctggagatctcatgaaagtcaattaaacacgaaagacaaattaaatttctattcagcttttcctgctactttaaaaaagcaatggaaaatgagaagaataattttacctagatagtatgcagagtaggtaatgatcttgagacacagctaaaccgtgaaccatcacccactggtgaaagacctgctgacttgtcctgactgtgaatctctatgaagctggtggtaaaattctctgaagaatcattacttaaatattttacatatatgctatttttcaaattattaaaacccatttagaataaaaatatagtgaactgcaaaatatgtacttttgttctttcatatttcatattccagtttttactataatttcaatataaaaacccatggcttccttctatatctgattagtaatccaagacaagtccgaaggaattgtcaagtgtactaaaaggtatacattctaaagagttttaaaattgttttagtagatttttagttttaattcacattctactctctaaaatgtaaa

SEQ ID NO: 668275 - DNA, 1489 bp, Homo sapiens
tgagacaatagagtgcctagtacagcacctggttcatagtcaatgctcaacaaaagtaattattattagtaatatatcacttttgattaaattccgaatagaaaaaagacatataagtataacagtaatttctttaaaagttgaactttctaatattgaattactttgaccacccagttcctaaaaatttttccctggccaaatgttattgtggtttattaatgggctcaaggtctatgctatattgctaacttctttattacttaccagttcagttaagtctttcatgctttttttctatctccaagactctttcaatttcaaataaagaaaaatttgattatatctttttccatgtctctaagcactctgttcttaagaactaatattacgtgtaygtctgcatacataatgggcctgtatgtgtgcagtttttatccagctcctcatccttttattatccaatttttttttacaaaattattattattttgtataaactctggacaagaaacttaaacatatagccactgttatcttacccttacaaaaggcatctggatttctgcttgaattaagaaaatttcctaggagcatgaaggtgctagactccttttctagaaagggtgaaatgtgtcaaggtgtggataaaggacatctgcaatatgttcttagtaagaatatgaacacagttatccatggggaagcactgaaatgctcatctagtggccttcatatttttttaaaggacaaaaggctaagagccaaatatgaaaatattgtctctcagtagaaaaaaaatagtaattagtcagataaagtctatctaacaaaaggtgttttacagtgaatttaaatattccaaaaaaatcactcaaaattagaattatttttatgtgttttgataatttttaaaataaaaattttcattattatacaactccgacatgaagaaacctggagatctcatgaaagtcaattaaacacgaaagacaaattaaatttctattcagcttttcctgctactttaaaaaagcaatggaaaatgagaagaataattttacctagatagtatgcagagtaggtaatgatcttgagacacagctaaaccgtgaaccatcacccactggtgaaagacctgctgacttgtcctgactgtgaatctctatgaagctggtggtaaaattctctgaagaatcattacttaaatattttacatatatgctatttttcaaattattaaaacccatttagaataaaaatatagtgaactgcaaaatatgtacttttgttctttcatatttcatattccagtttttactataatttcaatataaaaacccatggcttccttctatatctgattagtaatccaagacaagtccgaaggaattgtcaagtgtactaaaaggtatacattctaaagagttttaaaattgttttagtagatttttagttttaattcacattctactctctaaaatgtaaa

SEQ ID NO: 668276 - DNA, 1489 bp, Homo sapiens
tgagacaatagagtgcctagtacagcacctggttcatagtcaatgctcaacaaaagtaattattattagtaatatatcacttttgattaaattccgaatagaaaaaagacatataagtataacagtaatttctttaaaagttgaactttctaatattgaattactttgaccacccagttcctaaaaatttttccctggccaaatgttattgtggtttattaatgggctcaaggtctatgctatattgctaacttctttattacttaccagttcagttaagtctttcatgctttttttctatctccaagactctttcaatttcaaataaagaaaaatttgattatatctttttccatgtctctaagcactctgttcttaagaactaatattacgtgtatgtctgcatacataatgggcctgtatgtgtgcagtttttatccagctcctcatccttttattatccaatttttttttacaaaattattattattttgtataaactctggacaagaaacttaaacatatagccactgttatcttacccttacaaaaggcatctggatttctgcttgaattaagaaaatttcctaggagcatgaaggtgctagactccttttctagaaagggtgaaatgtgtcaaggtgtggataaaggacatctgcaatatgttcttagtaagaatatgaacacagttatccatggggaagcactgaaatgctcatctagtggccttcatatttttttaaaggacaaaaggctaagagccaaatatgaaaatattgtctctcagtagaaaaaaaatagtaattagtcagataaagtctatctaacaaaaggtgttttacagtgaatttaaatattccaaaaaaatcactcaaaattagaattatttttatgtgttttgataatttttaaaataaaaattttcattattatacmactccgacatgaagaaacctggagatctcatgaaagtcaattaaacacgaaagacaaattaaatttctattcagcttttcctgctactttaaaaaagcaatggaaaatgagaagaataattttacctagatagtatgcagagtaggtaatgatcttgagacacagctaaaccgtgaaccatcacccactggtgaaagacctgctgacttgtcctgactgtgaatctctatgaagctggtggtaaaattctctgaagaatcattacttaaatattttacatatatgctatttttcaaattattaaaacccatttagaataaaaatatagtgaactgcaaaatatgtacttttgttctttcatatttcatattccagtttttactataatttcaatataaaaacccatggcttccttctatatctgattagtaatccaagacaagtccgaaggaattgtcaagtgtactaaaaggtatacattctaaagagttttaaaattgttttagtagatttttagttttaattcacattctactctctaaaatgtaaa

SEQ ID NO: 668277 - DNA, 2053 bp, Homo sapiens
tgtcccaatacgttttcctaattaaaattagaaaattaactgagctctagaatagtctgaaaaaccaaaaagaattgtttgatcaagaggcaaggatcatgcaaattcacataagctggttaaaactgtttgagaaaataacacagatgttatagacgatgaggagagaagacatctcacaaatatgccaataagctgtagagaactaagaaacacagcatttctctaaattaggaaacatggattgtcctttcattctatcttgtttaataaaggcactgagatgcaatcaaaatcagaagttgataggacatttaggccaggcgtggtggctcactcctgtaatcccagcactttgggaggcagaggcgggtggatcacctgaggtcaggagttcgaaaccaccctggccaacatggtgaaaccctgtctctactaaaaattagaagaaattagccaggcatgctggcaggtgcctataatcccagctacttgggaggctgaggcagaagaattgcttgaacctgggaggcggaggctgcaatgagccaagatcgtgccattgcactccagcctgggcaacaggagtgaaactctatctcaaaaaaaaaaaaaaaaagaaaagaaaagaaaagaaaaaagcagcagatagggcattcatttactttttccctatcttctttgttttcttctataggttttggtgagtaaacatagtgagtaccctttttccactatgcctactctgaagaaggaaagtccagtaaatttattcttcctcatttctctcttctatgctgtgtcatcctgtcttataattttccactttggaatgcaaatgaaaacaaaatgcaattttttaaaaatagtattatttcaattgaaaacaaaggcaatgcagtggtgatttgcttcattaagayagacattttgaatatattcaaatctctaaattgggtgttggctaccctcacccactcagacttcctcttcaaataacttccttatgattccgtttaacaaaatttaaaatgtaaaaaaataaagagtcatttgcatgaaccccctagtgccaaacttgattgcatttcagatcattcacttaattattatggaaaaatcaaaacaaaatcagtacaactgattagcattgctaaagtgctcctattagaaagggaaacagcccacagagttaacccttgctgtctgtgttttgcagctccacttggaaggcaagctttgcttattctaccacaaaagcctcagtaaataatcaggatgaataaaatccttacaatggatgagtcttagttctgatgataagcagtagtttctttatcattgagttaaagagaaataaataatggggtgttgacttactaatttatttttgaaacaacagaggggaaaattattccagatgattccttttggctccaaaatctattttcttcctagaatcaattaagtgcacacatagaaataacttcggtaccctcaaccagttttttctcaagctcattttctgctactcacatatcgctaagattctctcacatatctctaagttaaattaaaacaaatttattgattaagaatagccacttttcaacaagagccatccatttcacctgaccactccatcgtgttatctataaaggatgtactcactgttcctcaaactactcagaaaggccggcagaggcagtgtgctaagttcttcctggagctttgaggccgtgaacagagaagcaatggtccagcttcagtgcattaaagatgtaggatgagtaatgcttgctggttgccctgagaacaatctcagatgaggacttccatggaaatactagtttgctgatgaaaggaatccttaaggcattagcatgacttctctgttcactgagcaaggctagttattctaataacatattatccaggtatgactattcatttcaaacagtacaagtgctatatttactttgttttgagggcttcatgtcattttgctaacatcaaacccacaacaagcatattctaaatcaaattaaatcac

SEQ ID NO: 668278 - DNA, 610 bp, Homo sapiens
cgcttctccacctttacgcctgaaagaagactcccaaagattgctttcttctgggacgctgcttgracgctaaccgcgttgattggaacagattttgtgtcttggctggctttgggtgaagaccggggagaaaaggttgcgctgcgattctcaagatctctggacctgggtaagagttgggcaaactcaactccggcggctcctggaccttggccggacgccggaaggcttctcatgggcgggggtcacattttccttagccagggtaccggggtgcggcgtgaggtggggcgagatgggctcagtctgcgttgttcatgcgcttcttaagggtttattgttgtttgcatttggttttgttacatgggattgtgtaggaaaatcctggagtatttttgatggagagacatcctcattacgcattttattttgcataattcctgcccttgtattgccttaccttgtgtttgtttcattttgccgggcgatatagctggatgtagggagatttgtggggaatcggactgagcttgaaaggcagtttcagctgggccctttcttctaggtcagttgaacttcctttctgggatcttcactgttttctaaactt

SEQ ID NO: 668279 - DNA, 672 bp, Homo sapiens
ctttgtaaagcattgtctggcaccaaaggctgtttgttcctcaaacatcttgaatcctttttgggaggatctgagttttgtacaactcatttggtccgttattgaaaccacaattctgtctgatggagacacaggcttggagaggagaggaggggatagatcaggcatcatgaaatgtttctggagcactcactctgagcttcacggtctgggcttgttcactggaggtcagagagtatatgtccttagtcttgttggaagtgactgtccaactggatgagaccagatttagaagccattagttactaccaggactcagggaaaaatggctgcctgtaggggtgggaagactaccaggaggaggagtcttctaaacwggatgaatggagtctgcccaggggaaaaggcagagtgactggcatgagcataggctggacaggatgtggcttgtcctggcactgggcagttgggggaagtgagagcaggagggcagggattagtggccaccataccaagcttcagaaggaggtttaagaagaagaaaacttaaaggtggatgcttgagtccttcgggctggggctgggcgtacaggctcaggttagcgacaggacctggtatttggggcaggaaggagactgctggagggctgcctggtctcagatgtggtcagg

SEQ ID NO: 668280 - DNA, 600 bp, Homo sapiens
gctagcactactgactagtcagtatatctccactttaaatgctaaatactttcttgaaataaaatcgcacctcccggccaggcatgatggataatgcctgtaattccagcactttcagaggccaaagcgggaggattgcttgaagccaggaatttgagcccagcctgggcaacatagcaagcaagatcccatctctacaaaaagttaaaaaaataaattacacctgccttttgttttgaagacttaaagaatctgctcaaatgatttattttctgagtctcttcacattaacttttatatgatttttaaraaattattacctgcttatattttttgagtatctgtttcatataaagagatgctgcatgttcactgtgaagtattgctgaattaaattgaaaatgtcagataaaactgatacatgatgtagttataaaaatgctgttatgaagaaaaaaggaatgcttttttcctcggtggcctttgataaaaatatgaatgattgactctcagagttggaggataaactaatcatcttctagcacagccctgttgtgttgcaggagaggaatcaggctaaagtctgctggtatttcagtg

SEQ ID NO: 668281 - DNA, 1697 bp, Homo sapiens
gcagagtctgtgtgagaaagaaaaactagatttaaccttgcttaacaactttttaagattctttctcttcttaaattcagcttttaatccatggtatttggttagaaaaatgggccctactaaaatggacaattttggtaggtttgttctctaaacataaatggctattcaattttaacataacaatgcacataatatatatgtatattattaatgtctgctctggtttggatctctccaccaaaactcatgttgaaatgtaattgccattcttttttttttgtttttgagttgtagtcttgcactgtcacccaggctggagtgcaatagtgcgatcttggctcactgtaagcttggcctcccagattcatgccattctcctgcctcagcctcccaaatagctgggactacaggtgcccaccaccacactcggctaattttttgtatttttagtagagacagggtttcatcgtgttagccaggatggtctcgatttcctgacctcgtgatctgcccacctcggcctcccaaagtgctgggattacaggcgtgagccaccgtgcctggcctattgccattctaatagtattaggaagtggaggctttaagaagtgattaggtcatgagggctctctcctaatgaatgaattaaagcccttattgtgggaatgagttagttatcataggagtgggctcctgatagaaaggatgagtttggcttagtttatctctttctgtcttgcattcttatttcccttcttgctatgttatgatgtaatataaagatgtatcctctcaatcttggacttcccagcctctggaaccatgagccaaataaatgcccagactatggtattctttttttagacagagtcttgctctgttgcccagcctggagtgcagtggtgcgatcttggctcactgcaacctctgcctccaaagttcaagcaattctcatgccttagcctcctgagtagctgggactacaggtgtgcactgccatatctgactaatttttgtatttttagtggagacggagtttcaccatgttggccaggctggtctcaaactcctgacctcaagtgatccacccatctcagcctcccaaagtgctgggattacyggtgtgagccaccattccaggccccagactatggtattctgttatagcagaagaagatggactcaaatagcttcccacttgtctaaaatgcatatgtaaaatccttctcagaagtcaataatcttcatatatcttttctaatctagggctaataaaagcacagaaattaaaaatgttcaatttcaatctttaaagtggccttatactatagtatatttaatatagatctaaagacataatcctgacatggtggtcagtgatgggggatagtcagtgttgaaggtcatcagacagaaacgctatgtgttgtgcactacacaaccctctggggcactcatggtaacactgtagattttcatatttgttacagtaatttttcaggcatatatcaagaaaatatctcattttaccaaagaaagtcaggataattttctgacatggaagtaaagggttttgagaaagcggcacctatttttaactcacacaaggagtgtacagtgaggcactgtcaatgaccaactgcatatatgatggtggtcccataagattttagtggagtggaaaaattcctatt

SEQ ID NO: 668282 - DNA, 638 bp, Homo sapiens
tgccctggatcagacaactatgcaagagatgaagccacccctcagactcagggtgctcaagaaagggagcatgtaagagccactactggcctacatcaaagacatttacttgccataggtttcctccccatcaagatccaagagatgaggcaccaaggatagagggtgatgacagtaacgatgagtcttgaatttagacctctgacttcccagacagcattctttcaacaaaaatttagtaagcagctactgtgtgccagccactgtgcttggtgcagagcattaaaaacctaagacccactccctgccctcaagtaatttacagtgccataggtgagagacatgtaaaacaaatcataagacatcttatctggtaccaaatctgtagattttcccatccaacctttggatatttgttgtctagaatgggattcctacgtgtggaaaaggtaatccattacaattttgcaaaaaggacctcaggacttaaagagaggcaaagctaatcatttaaaccaatgctggatttaaaaggcagcattaaacaagcatgcaaggayataacctcaatgagggcaaggataaaatctgtcttgtttgccatggtatccctaggcattagcatggtgcttggcata

SEQ ID NO: 668283 - DNA, 360 bp, Homo sapiens
tgcacctgtagtcctgtagtcttagctacttgggaggcagaagcattgcttgaacccaggagttggaggctgcaatgagctataatcctgccattgcactccagcctgggcaatagagtgagactccccatctctaataaaataaagataaaaataaaaataaataatacrtttttttaaaaaagctcactatggagatggagtgaaattccacgaagggcacacaatgagtgatgcatgaacgtgctcagcccatgtctttcctccccagctccccctcatcccctgcatcctattttcttttccttttttagggggggtggggatggagtttctctcttgtcatccgggctggagtgc

SEQ ID NO: 668284 - DNA, 360 bp, Homo sapiens
tgcacctgtagtcctgtagtcttagctacttgggaggcagaagcattgcttgaacccaggagttggaggctgcaatgagctataatcctgccattgcactccagcctgggcaatagagtgagactccccatctctaataaaataaagataaaaataaaaataaataatacgtttttttaaaaaagctcactatggagatggagtgaaattccacgaagggcacacaatgagtgatgcatgaacgtgctcagcccatgtctttcctccccagctccccctcatcccctgcatcctattttcttttccttttttrgggggggtggggatggagtttctctcttgtcatccgggctggagtgc

SEQ ID NO: 668285 - DNA, 1127 bp, Homo sapiens
ctctgaacacatccgaacatcagaaggaacaaactccagacgtgccaccttaagagctgtaacactcaccgcaagggtccgtggcttcattcttgaagtcagtgagaccaagaacccaccaattccggacacacaatctcccaggcttaagcaatcctcctgcctcagcttcccaagtagttcagactacaggtgtgcaccaccatgcctggcttattttttattttttgtagagacagggtctcactatgttgctcaggctggtctcaaactcctgacttcaagcaatcctcccacctcagcctcccaaagtgctgggattacaggcatgagccatcaaccccagcgtgggatttcttatatgatccaggagccacactggcattatctccagctaccctttgaccccagacggcctttcagtagaacctgggcgcatgcgccttgcctggccttactgtacaagcacattatctctgcccagtgggccagtgagttcctcagccaggactgagcctgtgtctctgtggctgccctgctgtctagcacggtgccaggcgcatagtagggcccagtgtctattggatgattctgtttgctgcaagttcatgatttcccatagagaggggatccaggcctaatgggccattagctcatcagacatatgttgagcacttactatgtgccagaygtgggcgaagcctggggacttagtggagagtaaacacgcaaggtttctgcaggaatggagctaaccttgccctggggaagatgcagtgtgtgcagaaaaatgtcagatagggatgactgctggaaacaggagaacacagggtgagggataagactggcgaggccgggcacagtggtatgagcctgtagtatcagccacttgggaggctgaaggaggaggattgcttgagcccaggagttcaagattagcctcggcaacatagcaagaccccatctctaaaatgtttaatttagaaaaagaggaccagtggggattgccagggaaggctggctgggtaggtgacattggggcctttacccttgtgaatactggcaggaaaattcaaggggtcaggtgagggaaaggggatatggctccctggcaagttagagaaata

SEQ ID NO: 668286 - DNA, 1127 bp, Homo sapiens
ctctgaacacatccgaacatcagaaggaacaaactccagacgtgccaccttaagagctgtaacactcaccgcaagggtccgtggcttcattcttgaagtcagtgagaccaagaacccaccaattccggacacacaatctcccaggcttaagcaatcctcctgcctcagcttcccaagtagttcagactacaggtgtgcaccaccatgcctggcttattttttattttttgtagagacagggtctcactatgttgctcaggctggtctcaaactcctgacttcaagcaatcctcccacctcagcctcccaaagtgctgggattacaggcatgagccatcaaccccagcgtgggatttcttatatgatccaggagccacactggcattatctccagctaccctttgaccccagacggcctttcagtagaacctgggcgcatgcgccttgcctggccttactgtacaagcacattatctctgcccagtgggccagtgagttcctcagccaggactgagcctgtgtctctgtggctgccctgctgtctagcacggtgccaggcgcatagtagggcccagtgtctattggatgattctgtttgctgcaagttcatgatttcccatagagaggggatccaggcctaatgggccattagctcatcagacatatgttgagcacttactatgtgccagatgtgggcgaagcctggggacttagtggagagtaaacacgcaaggtttctgcaggaatggagctaaccttgccctggggaagatgcagtgtgtgcagaaaaatgtcagatagggatgactgctggaaacaggagaacacagggtgagggataagactggcgaggccgggcacagtggtatgagcctgtagtatcagccacttgggaggctgaaggaggaggattgcttgagcccaggagttcaagattagcctcggcaacatagcaagaccccatctctaaaawgtttaatttagaaaaagaggaccagtggggattgccagggaaggctggctgggtaggtgacattggggcctttacccttgtgaatactggcaggaaaattcaaggggtcaggtgagggaaaggggatatggctccctggcaagttagagaaata

SEQ ID NO: 668287 - DNA, 1508 bp, Homo sapiens
caattggccaatatcctgcagttaaattgttgtatgcccttcattttggggaaggtaccttaaatcttaagtggacaatgccagaaccactgtggttcattaacaaaaatctgattgttatgaagaagcatatctgtggcaataataaattgctaatttcaaatggtctagtcttagggatacagcatcaacagaatgcagactgtcggagaatctatttacctgccctttctttttcttgtttctcccttcttgaattggaatgcatataaaatgtttattagaaggcatacaaagaagacagcaaaactaaataaaatgacaatttattaggacactataggacaatgaggagtctctgagatgtcatagcctcttctgacggtgaactagtttctatttaaatcatttagtggaagagaattccccagaatgaggatctgactaagcctgacaggctctggggcagggctcttcagttggtgggttgtgatgataacaccagctctgagtacaggagattttcatttgatgagtggtctgaacatctacttagtggttataaaatatttgctgctgaaagccacagagcattgataaacagatcctggacagctgagttattgcaatctacttaacatgaggagaacaaattgtgagtcaaatgttcctgtttaataaccttactcagggcagagagagctgctcaaggttggcgttaactctgcatgcgctgcgccagccagggtcccagaaagggctgtgcagacgttgaagcaattcaggtgggttttccattaggactaaggtacacagagaggaaatttaaaagggtccatctggtaaaggaaataaacaatttgtaaaatggctgtatggtattgaatatactaccaagactccctctgtgacttacatttcatcttccttagaatacatgtgtttgggcttattaaatcttgtcttcaccataatactgtattcttttacgttattgggggaagggaagaaatatttgtctgttctctattagtcatttgaacctaggtcaattatttcagcccaagtactataaatactttcattgaaaactgattccttttctctactttcaagattatgctttactttaacacatgcagaaaaggatggattcatctcattcatgggaaacagatgaggaatacattttctgtgaatgctatttcaaaaagtaagttaattttaaatatttgtttcttagctggctcctagacatgcatttgggagcatgtatggagggcacatgtttgagggtgagttaaagtatttcaactgggcagtgggaaaatgattgttttwttttgatgcttatgacttgaatattgttctaaacatttgcttaatcagggctctagagtgaagttgtatttgaaccttagccaaactggagcatcacatttctgtgctacagcacttcgttcactagcgctctaccccatgctcacctccgcctcccgcagcaacag

SEQ ID NO: 668288 - DNA, 940 bp, Homo sapiens
gactttagccatagaacagaaggcccctcatgctgagcatgttgagcaactgaaaaacactcagaatggccaaccaacgataatgacatatatatatatacttagtgagttatcaataattttcttagacatttgttttctacaagaagaatgcatcgagaacatattacaaccgctttccaaaattgccttgtggtatccttctgtctctattggcacttctcagcctctcatgcttcatgttttttttcctcataaaatatcagcaccagcatattttatctttgcttgtttttctgtgcccaccaataatggcaatatacatactatctattttttatcaggtactatcttaagtgcttaacacacatttatttatttaatctttaaaacaaccttgtgatttaagtatcattaatatccccactgcagagatagagaaactgggagaaagtgagtaggttcagttttgaactcagtgagattgaaacacctgtgagatatttatgtgtggatattcaggagcctattgtacacaatcytggaactcagaagagaaacaacattagaattagatactagaatcttcagttgatggaataaaaccaggtggactggaggagatttcttggaagtgtgcacagagtaagaaagggaccagagccctaaagagcagcaaacacatcatgatctgtcactgaaggcttcaaatgagtatatttgctggatcctttgcagttgaactgtttactgagagtgtctgtccctctataaagaaaaaggagcccagagtccacaatctctggcatgcaaaaagggcaaagaggaactgtgttagaaatgatgtcagtgataaggaaggggtgggggctggaaactatgctcagaaggaacaatgtgtgtctgtggaacaatggggaacaaaaacaacagggcaaat

SEQ ID NO: 668289 - DNA, 663 bp, Homo sapiens
ctgtcaaaggattctgctgccatatggggacctttctgttggggacaagggcagaagcagcgaggaggtgactgcaattttccaggtgagaaatgatcatggctagactagctctgggggttcagactttgtttttgtttttgtttttgtttttgtttttgttttgaggtggagtctcgctgtgtcttgtccaggctggagtgcaatggtgcgatcacggctcactgcagcctccatctcccagsttcaagcgattctcctgtcttagccttccgagtagctgggattacaggcgtgtgccaccacacctggctaattttgtattttttagtagagacggggtttcaccatgttggccaggctgatatcgaactcctgacctcaggtgatccgcctgcctaggcctcccaaagtactgggattacaggcgtgagccacggcgtccagcctttggggggtccgacttcgggtgcattttgaaggtcaacaggatttcccctggatgggatgtggggtgtgaaagcagagaggagtcatgagccctttctaagtttccagacagcatgcttgaacacacgatggtttctctggggctcaaggacattaggctactcctggcccttagcgtgtagctgtacacaggaagtgtcctgctgtgctgta

SEQ ID NO: 668290 - DNA, 637 bp, Homo sapiens
tataaataaaagttgtactttatacactaaaataacrcacaagtgaatttttctaataaattaaaggaaatgcactatacaagctcttaacctccttgtaccctggaccttgcaggaaggtttatttgagttaggactgcagtctgtgactacaaaatgaagacaggctcaatggctcaaaaggttctcagtcccaaatcttggcctcattacaggttgctctaagcaactttgttttctcttgtggcagaggaatgacactgttcacattcagaactgaattctatgggcatacccagggtcacatatgattctcagcacaattataattctatacttttctgatctattaacaaagtgtaattaaactttggggagaatgtcaatataagaatgttcttaaatcaactgtgatttataaaacagcaactcccttaatacttggtacttatgatccagcatagtttgaaatgacggtggtggattagcttagtacagacaattctcccattccaaacacgtggaaaagctagatacatgcacaaaaaaaaattatttaagtaaacggctaagcttgaaaggaaaatccataaatttcaaaaatgaagagggttattcaaagtcagaatagtaagtg

SEQ ID NO: 668291 - DNA, 962 bp, Homo sapiens
ggctgaggtgggccgatcacttgaacccaggagtttgagaccagcctgggcaacatggcaaaaccccatctctacagaaaatacaaaagccagatgtggtggcgcatgcctgtggtcccagctacttgggagactgaggtgggaggattgcttgagcccaggaggtggaggttacagtgaaccaagattgcaccactgcgctccagccagggtgacagggtgagaccctgtctcaaataataataataataataataacaacaacaatataatacctattgttctgattgccaatctttattgtttataatctgtttcatgtttagagacttttagaggaggctgtagagtctcctactgtcttctgccttactgtttaaccaattcatggtgaggaaactattctaacctaatctttcttgctgctaatgaaccagctcttaatctgtttattttaatcaagaatagcatgggagctgggcatggtggcactcacatgtagtcccagctactcaggaggctgaggcaggagcatcacttgagcccaatttgaggccagcctgggcagcatagcaagaccttgtctcaaaaaataaaaataaaaawaaaatagcataggaaggaaccctttgctttccacagtctcattttgaactgtcttttcttccagcacttaacctccgtagaaaccaccccagaatccaccacccaactctcaatctccccaaagtctccgccaaccctggctgtgaccgccagctctgagtacagtggcccagagacggacagggtggtatcctttaaatgcaagaagcagcagacccctccacacttaacccagaagaaaatgttaaaatcttttctgcccacaaaatccaagagcttctgggagagtccgaacacaaactggactttgctaaagagtgacatgaacaagccacatttgatatccgagctactca

SEQ ID NO: 668292 - DNA, 962 bp, Homo sapiens
ggctgaggtgggccgatcacttgaacccaggagtttgagaccagcctgggcaacatggcaaaaccccatctctacagaaaatacaaaagccagatgtggtggcgcatgcctgtggtcccagctacttgggagactgaggtgggaggattgcttgagcccaggaggtggaggttacagtgaaccaagattgcaccactgcgctccagccagggtgacagggtgagaccctgtctcaaataataataataataataataacaacaacaatataatacctattgttctgattgccaatctttattgtttataatctgtttcatgtttagagacttttagaggaggctgtagagtctcctactgtcttctgccttactgtttaaccaattcatggtgaggaaactattctaacctaatctttcttgctgctaatgaaccagctcttaatctgtttattttaatcaagaatagcatgggagctgggcatggtggcactcacatgtagtcccagctactcaggaggctgaggcaggagcatcacttgagcccaatttgaggccagcctgggcagcatagcaagaccttgtctcaaaaaataaaaataaaaaaaaaatagcataggaaggaaccctttgctttccacagtctcattttgaactgtcttttcttccagcacttaacctccgtagaaaccaccccagaatccaccacccaactctcaatctccccaaagtctccgccaaccctggctgtgaccgccagctctgaktacagtggcccagagacggacagggtggtatcctttaaatgcaagaagcagcagacccctccacacttaacccagaagaaaatgttaaaatcttttctgcccacaaaatccaagagcttctgggagagtccgaacacaaactggactttgctaaagagtgacatgaacaagccacatttgatatccgagctactca

SEQ ID NO: 668293 - DNA, 1948 bp, Homo sapiens
ggagatctctctgagcccctggggtttctctctgttcctccctggcccctgcatgcagcctggggtcttaagtgggcatctactcctccttggtggatgctgtcgggagactgtaactttccgaagctgcctctgttttattttagaagtcaggttttaactgtgggcataaaaagagcaagaagtaataactgcagccagcatttatggagtgctttacacgtgccaaaccctgctctgagggttgtgtgtgtgtgaactcactcttcacaccatagccactttgaggacctggactgagtttacatagttagaatgtaatgagaggggctggttttagaacctggttttaactgcctgctctcttgcctgcatctacatccagtgatgagacaaccaaaacaggcctctgtggatcacaagtggggacttgaggggaaatggcacagcttcttctgcaacattaggattagaacaagaatcagggaagagcctcccaggcctctcccgactccagactgtgggaaggcctcccatctgggagggccgagcatgggacagggagacctgatggggtgtctgggcagagaggagaaggtcagcttcaagagacctggagctgagcccatgcccccagggctgtgctgacatctagggatgtcccacggccagggcacccttgaaagctccttgttgtggtcacttcagcatatggcctaatggtcacttgtggatcaccaacagaatggcacccattagaatggcattggagactttgccaagtcccattcagctggtggacacaccctattctctcaaagacyacctggagatagggagtgggggtcttgacatccagagggatggtggctgtgcaccccagcacccacttgggtgggaatagacagggtgaaaacattcctgttagtcaaatgattcctttgactatcatctgctgatagtcgaaggtcaagttctatgtcaccacctttacatgggagatcagagaaaggggtggtcacatggatgaaggctgggaaggcttcttggaggacaaaatatatgccctggctgtagaaggacagaaatgaattcagcgggaggaggaggaaggcaggagcacacatcaggctgaggagaaggggtgagagatggagtggctcaggcccaggcccagggatgtggactgaaaggaccctccagaaggtgggctggggatggcaccaagatcctgcacctctaatgcctgggatggggatgtgatgaaggtcaggcgaagtgtgagtgtgggagtcagacagcctgggcttgaatcctagttctggcacctactagctgtgcaatttctgtcttgtgacatgcagtcacctgatcccagcctctgtttcttcatctgaaaccatgacacctatgtaaggaagccacattcaggactgagataggaattagatagtaaacatacagtaccgagcacagtgcctgcggtgtatgtcatacttgcttaataaatggtattcattactcgtgttcaactgggaaatccattctgtgggtcatggaaatctccacccactgctactttgtttctgtgtctttgtggaatgtctccaagtagcaatgaaatcacattctagactgggcaactaaaagaaattgggaaaatcctagtggatgtccagttagaggaaaattatgcagtttgcataaatgaaacattgggatgcaatttcactgttttatttggttttggtttggctttcatgggaagctatacgcctctgggtgatttttcccagcaatcatgggagatatatatccggtttcttcatacacagcgacaatgtttccctcttccatccacagagacagcagggttcaggcttcgagttgtggtgcaattggcccacatccaccccaccctctcttcacgcagcagatgactgggaca

SEQ ID NO: 668294 - DNA, 1948 bp, Homo sapiens
ggagatctctctgagcccctggggtttctctctgttcctccctggcccctgcatgcagcctggggtcttaagtgggcatctactcctccttggtggatgctgtcgggagactgtaactttccgaagctgcctctgttttattttagaagtcaggttttaactgtgggcataaaaagagcaagaagtaataactgcagccagcatttatggagtgctttacacgtgccaaaccctgctctgagggttgtgtgtgtgtgaactcactcttcacaccatagccactttgaggacctggactgagtttacatagttagaatgtaatgagaggggctggttttagaacctggttttaactgcctgctctcttgcctgcatctacatccagtgatgagacaaccaaaacaggcctctgtggatcacaagtggggacttgaggggaaatggcacagcttcttctgcaacattaggattagaacaagaatcagggaagagcctcccaggcctctcccgactccagactgtgggaaggcctcccatctgggagggccgagcatgggacagggagacctgatggggtgtctgggcagagaggagaaggtcagcttcaagagacctggagctgagcccatgcccccagggctgtgctgacatctagggatgtcccacggccagggcacccttgaaagctccttgttgtggtcacttcagcatatggcctaatggtcacttgtggatcaccaacagaatggcacccattagaatggcattggagactttgccaagtcccattcagctggtggacacaccctattctctcaaagaccacctggagatagggagtgggggtcttgacatccagagggatggtggctgtgcaccccagcacccacttgggtgggaatagacagggtgaaaacattcctgttagtcaaatgattcctttgactatcatctgctgatagtcgaaggtcaagttctatgtcaccacctttacatgggagatcagagaaaggggtggtcacatggatgaaggctgggaaggcttcttggaggacaaaatatatgscctggctgtagaaggacagaaatgaattcagcgggaggaggaggaaggcaggagcacacatcaggctgaggagaaggggtgagagatggagtggctcaggcccaggcccagggatgtggactgaaaggaccctccagaaggtgggctggggatggcaccaagatcctgcacctctaatgcctgggatggggatgtgatgaaggtcaggcgaagtgtgagtgtgggagtcagacagcctgggcttgaatcctagttctggcacctactagctgtgcaatttctgtcttgtgacatgcagtcacctgatcccagcctctgtttcttcatctgaaaccatgacacctatgtaaggaagccacattcaggactgagataggaattagatagtaaacatacagtaccgagcacagtgcctgcggtgtatgtcatacttgcttaataaatggtattcattactcgtgttcaactgggaaatccattctgtgggtcatggaaatctccacccactgctactttgtttctgtgtctttgtggaatgtctccaagtagcaatgaaatcacattctagactgggcaactaaaagaaattgggaaaatcctagtggatgtccagttagaggaaaattatgcagtttgcataaatgaaacattgggatgcaatttcactgttttatttggttttggtttggctttcatgggaagctatacgcctctgggtgatttttcccagcaatcatgggagatatatatccggtttcttcatacacagcgacaatgtttccctcttccatccacagagacagcagggttcaggcttcgagttgtggtgcaattggcccacatccaccccaccctctcttcacgcagcagatgactgggaca

SEQ ID NO: 668295 - DNA, 680 bp, Homo sapiens
tgccatattaaaaagttctcacaagaggttttaaggtccagacctgaagttgcactcatcacctcccctcacattctattggttagaactcatgcacatgaccatatcttactgcaaaggaagctaagaaatgtagtttatatcccaagcacaaggaaagaaggatggatttttctagatagctagaagatgatagttcacctggatttttttaactagacctgccaaataccagttactgtgcatgtctctcactgatatccttttcttttccttttttttttttttttagacagagtctcactctgttgctcaggctggagtgcagtgacatgatctcggctcactgcaacttctgcctcctgggttcaagcaattctcctgcctcagcttcctgagtagctgggattacaggtgcmtgccaccacgcccggctaatttttgtatttttagtagagatgggggttcactatgttggccagactggtctcgaactcttgacttcaggtgatccacccacctcagcctcccaaagtgctaggattacaggcatgagccaccacgcccagccctgatatccttttctaaccttctttttctgtgacttcgcatgtgtatatctagctatgtctccaacctgacataccatatggtttcctaattctggcctctaaatagaa

SEQ ID NO: 668296 - DNA, 680 bp, Homo sapiens
tgccatattaaaaagttctcacaagaggttttaaggtccagacctgaagttgcactcatcacctcccctcacattctattggttagaactcatgcacatgaccatatcttactgcaaaggaagctaagaaatgtagtttatatcccaagcacaaggaaagaaggatggatttttctagatagctagaagatgatagttcacctggatttttttaactagacctgccaaataccagttactgtgcatgtctctcactgatatccttttcttttccttttttttttttttttagacagagtctcactctgttgctcaggctggagtgcagtgacatgatctcggctcactgcaacttctgcctcctgggttcaagcaattctcctgcctcagcttcctgagtagctgggattacaggtgcaygccaccacgcccggctaatttttgtatttttagtagagatgggggttcactatgttggccagactggtctcgaactcttgacttcaggtgatccacccacctcagcctcccaaagtgctaggattacaggcatgagccaccacgcccagccctgatatccttttctaaccttctttttctgtgacttcgcatgtgtatatctagctatgtctccaacctgacataccatatggtttcctaattctggcctctaaatagaa

SEQ ID NO: 668297 - DNA, 615 bp, Homo sapiens
atgaaaaaataaccattctctgtaaactaccagaaactttacctggcctcataggagagataaraagaagctaaagttctgtgcctagaggaagcaaaaactactaaaataggatcctgggcatcagtctcagctgcatttaatggtaccaggaaactgaaataatcctctttcttctttctttgacaagttttagcagccctacacctttctgaaatttgcccttcccacttttttagaaatgtatttatcatgtgcaatataatgttttagagtatatatacattgtggaatagttaaatctaactaattaacaactgcattacttcacatagttatcattttcatgatgagaatgcttaacatccaatatttttgcatttttcgagaatgcaatatatgttcattaactatagtcactatgctgtacaacagatctcttgaatgtattccttctatctaattatattaatatatcctttaacatctccccatcctccactccacttaagcacgacagccttgggtaaccaccattctgctctctagtactatgagtccaacttttttagattctacatatgagtgagatcatgtggtatttgtctttctatg

SEQ ID NO: 668298 - DNA, 839 bp, Homo sapiens
cctgtagtcccagctacttgggagactacagctacaggaggatcacttgagcccaggagttggaggctgcagtgagctataatcatagtgctgcactccagcctgggtaacagagtgagatcctgtctcaaaaaaaacaaaacaaaacaaaacaaaacgccaggcatgaatcacacttctaatcccagcaytttgggagcctgaggtgggtggatcacttgagcccaggagtttaagaccagcctgggcaacacagggaaacccctctctccaaacaatacaaaaaattagccaagcgtggtagcgcatgcctgtagtcccagctactcaggaggctgagatgggggtatcgcttgagcccaggatgtcaaggctgttgtgagctatgattgcaccactacaatctgggctgggcaacagagtgagaccctgtctcataaaaaaaagaataagagagctcatgcattgtgggacagggcgaagaggtgcagagagcactgtcagaatgcactgggaagctgtgaggggccttaatggggagggagcatggtctggtttgtgtagagctcactgggtagagaagtttagggaccaagttggaggcttatgcacttcaggcaaaagatgatggtgtgatggtggcctggaatggactgttagctgtgggaaatgaagtaaaagagacagattctaaatgtatctattggaggtagaagaaaatggcctcggccgggcgtggtggctcacacctgtaatctcagcactttgggaggccgaggtgggcagatcacgaagtcaagagatcgagaccatcctggccaacatggtgaaaccccgtc

SEQ ID NO: 668299 - DNA, 614 bp, Homo sapiens
ccccagtgtgaggattcttcgaaccaagaaacgggaagggctgataaggacccgaatgctgggggcctcagtggcaactggggatgtcatcacattcttggattcacactgtgaagccaatgtcaactggcttccccccttgcttggtaagggagcccctcccacttggagggaggcaaactgcaatgagccagtgccagtggccccctcctgctgcagggagccatccataagccttcccttgcctgttcgagatgcccccagcacaatgccaggtgccatgagggattcagaagttcaggagtgctcaaaattaaaatccagccagtcctgtcccttcatttcacagagaagttaagactcagagaggcgaagtgacttacccaaagtcacacagcacatgagcatctagtgacatgayggctttcctcagatgacttcattttattgcaaagcaagcccgtgctgtttgctgttaatagccaaactgtgggggacatcatcatatcaacttagaagagttaccatagactgtgctgccactgtgagccaggcagttataagcattatctaattctcacaaaaccatgcaggtcaaaagtataccccttatg

SEQ ID NO: 668300 - DNA, 2158 bp, Homo sapiens
  misc_feature 768, 769, 770, 771, 772, 773, 774, 775, 776, 777, 778, 779,780, 781, 782, 783, 784, 785, 786, 787, 788, 789, 790, 791,792, 793, 794, 795, 796, 797, 798, 799, 800, 801, 802, 803,804, 805, 806, 807, 808, 809, 810, 811, 812, 813, 814: n = A,T,C or G
  misc_feature 815, 816, 817, 818, 819, 820, 821, 822, 823, 824, 825, 826,827, 828, 829, 830, 831, 832, 833, 834, 835, 836, 837, 838,839, 840, 841, 842, 843, 844, 845, 846, 847, 848, 849, 850,851, 852, 853, 854, 855, 856, 857, 858, 859, 860, 861: n = A,T,C or G
  misc_feature 862, 863, 864, 865, 866, 867: n = A,T,C or G
attacagagtgctgatctggaggacgtagcagattcaggttcaatttttggcaatagtttttcacacatgatcctgtgttctttcaccaggtacgatataaagttttgcctttgtgatgttagcagctaccgatgatcaatgtctagttgcatcattcattaagagttgcaaaatcatcataatctaattctatagctcatgacctggaattcttatatatgtatgtgtgtgtgtgtgtgtgtgtacacagacacacatatatacatgtatatatatatatgtgtgtgtgtgtatatatatacatatatatgtgtgtatatatacacatatatatgcgtgtgtatatacacgtatatgtgtatacgtatatatatacacatacgtkcacatatatatatatatatatatatatatatatatatatatatataaaacttctccatatttattctactaccagtggtacagtttaaatagcacaggcagaataaatacatgattttccgcctttatttggtagttttcaaaataatagattggtcatgaggatactccaactaaaaatgtttgatgtgattcaatctgttaaaatttgtatccatattgatcctacagtttctgctttgacatgtggaagtttcttcaaggggctcctgacaagctctacattgaaagaaaatctttttttgagacagatatattgtgcggagcgctttttttaaaaaaagacctcctcatgagggcgacatacagagttttgcgctcannnnnnnnnnnnnnnnnnnnnnnnnnnnnnnnnnnnnnnnnnnnnnnnnnnnnnnnnnnnnnnnnnnnnnnnnnnnnnnnnnnnnnnnnnnnnnnnnnnngttgcagatctcatcgccactgtgctctaaagagcaaggggtgagtgggcagagctgcaggtgctttccatcctactgaattccacgtgggcacaggcaaggcaggtctggaagccacgccaaatttcacatgggcatctgcgatgaggcatgtctggtctatctggggcctagctcaaaccctgtcattactgtggattctaacacctgccagtaaaggggtacttgatggcaagaggtaactcaatcactagcttaaagcactctatccaaatagtaagtttggtggattgaatctgtgtgtgactctgttttcagaactaagcaaccacatgatgaattcatttggagtgtttgttgtttactgcataagacaagatgaattctagtagtgccaaagggagggattgaatcatttattaagtacagtcttggacaggtgtctcaaatgtcaattctaggatttaatctaaactaatcttcagaaaagttagatttaatggaaatgagaacccagaggaattcgaagtagaggtagctggatgctaaatctcaaacgctgctgcttgtgacaatcttttaaataaactttctacttggctcttatccttctgtgttctgaggtagaaaacgtttggaaaactgatgctagctcatcggtaggtaggatttatacaaaacaagttgttttctctttatttctgatgctggcatatagtcagttatttgcaaataagctacatggtcatatctgagatcagaccacagagattttggcctctgtaggtgtcactgcagagtttatacatataggatatacttatatcctgctaaagtaggtcatattttctgatcacaaattatgaagccacaggcagagtttgaaattgataaggaaaaactgcctaaatggctaccactcattatatctaaatattggcaggtcaaaaaaaaaaaaaaaaaaaatgggagttatctatcactgaatgcaatttggaaaataagctgtagtagttgtctcatcttcaagccactgtatttctaactaaataataaaaatattttagtcgtggataatatttttgccatatgcgtgtgcatgggtgtgtgtgtgtaaatttaaaaaccttggctttcaataccacagaattaaatgcattttgtgaatgtattaatccaaattaatttctcagagatggtatttgagagtgcttgctggtggctcttataacactggaagtatctatagcatgtttactttttaatattggagagaaaagggctgaaatga

SEQ ID NO: 668301 - DNA, 1306 bp, Homo sapiens
tgcttaaatcacatttgtaactttgaactgtttatctcaagaatgaccctaaaaagtttgctaagcttctgccgggcgcaatggctcacacctgtaatcccagcactttgggaggccgaggtgggtggatcacttgacttgaggtcaggagtttgagaccagcctggccaacatagtgaaaccccgtctctaytaaaaatgcaaaaattcgccgggcgtggttgtggtgcctgtaatcccagctacttgggaggctgaggcatgagaattgcttgaaccctggaggcagaggttgcagtgagcagagactgtgccactgcatgccagcctgggcaacagagcgagactccgtctcaaaaataaaatgaaataaaataaaagtttgccaagcttcagacccaggcagctggaacttacattataaattcaacttcccattaataaaagctcctctctacttattgagccatctccagttttcctcctctgaccaaatggatcccctggaaacaaaggccaatttggccacttctctggggcctgttttcattccatttctcaaagactgcaatctgccagttatatttatttttattccctctccttcatctctattatcaatctatttctctccattacattagtcccatcagcattcaaacatgctctagtttcaccatttaaaaagagagtttaacagaggaaaaacattttaaagctccccatttccattgcagctatgttcatatctttcgaatcactttcctcactagcaaaaaacctattgacttgatctgtctttgctacatttatttcctcatttattcaacaaatacatatttatacctgctaggtgtcagacattgtgctaaaccacaggataaaaacaaagaacaacaccaacttcataggtatcatagcttataaccaaagtttgtgtcgggtgtgtactattatctcaagtgcattcaagaaataatacggatcttagttgtccgattttcatcctagctcttatgaagtatgttcaggttttgggtatttggtgttcccatatgtgagaaaaatcaatcttctaaaaaaattgcaaaatttaaaggaacttttagatgtcaaacctggtatttatttgatctaaatttatcatgctgcattatcatctaagggtattagtctgcttttaatttaagacctgggcttcaccaaaacattttggtttggtgatcaaagtggatacacactgttcttatcatgtgccgaaaacaagagggatgctaacccacataatgggatttttctggcattt

SEQ ID NO: 668302 - DNA, 1517 bp, Homo sapiens
tgtaagaagtccaggcagatgcccagggcagtgctgaatgcttagagcctagtaagtcccaggcacttccaacctcacctgctgcattgtttgcttaccaggagtctgtggattttgaccccaaactggttaaagctagtttggtacctgttgttgtaacaacccagtttattttaaaattacacaactagtaaaacataagaacaaaaagagttgttcctacgaaaacgaaattaattgttttaraaaaactccataaagctgaccttttaaaaaaaaaaaaaaggctttgaagaatttatttaccccactataaagttacagcaattgaaatttatattacaggtgtgccttggtgttacatcaatggttaaggaatgaatttatgaatgtacattttaagttaaaataaaatcttaagtcatgtgtaattcatctttcataatttctttaactttttaaaaagtgcttccagtgatcagcccttatctagttaaatatagtaattaagactttactatttgaatatagtaattaagttccagtttttctacttactacctgcatggcattacataaataacttaatcttctatccctcagttctctcatgtactaaactgggaaataatagtacccgtcacacagaactattatgagaaatatatatgctaatgcatatgaaaagctttgcttggcacataacacttaaagatgttattttgatttttattataatcatcattatatttgggatgagattccagggaacttccattttctactttagtatttctccattgttttaacttttacaacaagaagtatataatttatgcttggcaaaaataaaaatatttatattttagaaataagtgtaaagaaatgtttctttagcacagataaataaaaatgttagggcactttaggaaattgtttcaaaagaagaaacgatagaaaagtgaaacaaatttgttgtttatacaccgttggattgttcagggataatcgatcacagtgggacttactggaagaaaggtttgagagaggtgcttaggtgcaactctaatgctccaaagtcaaaggcatgatgtaagaggcagttctctggtcttcacaaaacatggatcttgccatcaaagcatctcatagtgtggatatgctgtgtctttaaaatacctttgaatatcagaaacccagaaagacagcccaaagtgcagaacaattagtccaataaaggacaacggttggatcctgtctcttagccacaaagaccaacatgatctttagaacatccatcctgaaacactactgcagtttatcacaggtctctactgaagcttcagcaggacagaagtctgaccagtaaagtgagactgaggagtaaatataggcaaagatgtgtgatttaggtctttttattagcctatcagattttgggggcatgaagttttcaaggtttaaatgtactgtcttgttttccatttcgtgtatgcgtgtgcacttctttacatgca

SEQ ID NO: 668303 - DNA, 646 bp, Homo sapiens
ctgcactccagcctggatgacagagtgattaaaaaaaaaagaaagacaaatactgcatgcttccacttatatgaggtatgtaaaacactcaaggtcatagaatcaaggagtggaatggcagttgccagaggctgtgggagggggaaattaaaagttattaaccaatgagcataaagtttcactcaaataagatgaataagccctagagattgtatgcacaacattatacttacagtcaacaacaatgtaaacttaaaatttgttaagagggcagatctcatgttaagtatttttagcatttttttaagggcatgtaagtcaataaaatacagcatatttcaaaaagggaagaagaaggtcttctggttgggtgatcagcttattctcaaatgcaaggaaactgtttcccagataatgcaatragtgttagaatatgcatttgccaggagatcaagaccatcctggcaaacactgtgaaaccccatctctaactaaaaaaacaaaaaaaaaaaattagctgggcttggtggcaggcacctgtagtccccactactcaggaggctgaggcaggagaatggcatgaacccgggggtggagcttccagtgagcggagatcgcgccactgcacgacagcctgggcgacaga

SEQ ID NO: 668304 - DNA, 610 bp, Homo sapiens
tttccccttacatactaaaattgtccaattacccacaatatttggatggcttttaaagccatggatgcctaatgtgagcaatttcctctcatcataggtcctttattcttgaccataactattagctcagaactctttgttttatacttatagtttaaattatttattgctaaatgcattaccttgctttcccatattaaaatttatctaaccagttttctacatgctattatgaattaaatgaccttttcacagggtatccctaccactatwatttgtataatggggagcatatttatagtttttcttttataatgaatatttgcaagttttgataaatatttctctaacttgaatccaaatttctctaaggatttatttatggatatgttttaggccattttgagatgtttgaaaagaaacttctgaggatgtccctttacacagcagcaggagatttgctctctgtgtcagcccttgcatctctgtactggagagactaactggcaatctataagctgaaaaacctgaaaggtacatgccatctcctggaatttcttacatacagagtcatttcttaagaagtaattttttttttttttagtgaaac

SEQ ID NO: 668305 - DNA, 1180 bp, Homo sapiens
gttgtgtaccatgagcaagaaataaatcttttttatacaaagccaaagaaatttgttacagcagcatagttttaacctattctgacaaataccaaaagatacagtttaaatgctgtagggtgtcagaggaaaaagagctgacttcttgctgtaggtatcaggcaatacttcatggaggatggtatatttgaaatggaatgggtagaatttgcacatgtagagttgggaagacaaaaattggattaattaactattacttcatcgaaaaccactccacatgttagtggcagcaaacaaccaccatctactatttcycatgagactaaggacccaataggtggttctgctcttctgggctgcattcaggtaatacagactggcctttctcatgcatctgtgttcagctgctgggatggctgagggctggctggtttaggttggcctcactcacatgtctggaggttggctggctgtcgtcctccagcaggctaacatatgtggtggtggcaggaccctaagagacagaatggaagcatgccaggcctctctaggcttaggcccagaatgagcacattgtgacttgcactacattctattggtcaaagcaagtcataacaccagcctagaatcaaagtgtggggaaagagtctccacttcttgatatcatatttctggtacttgggagatattcaacatttgtgaaataaatacataatgaactaggttccctggatattagctttttggatctcagtccttggacttccgcacttccctgtctacatgacctacctacgtaatctcatcctgtattcccaattgtatgtatctcttccctgaaatatcaatctctttccataaaaccaactgcctactccatatctcactaactctgtaataggcagcttttgcttaacatgtgcaaacctagactcctcatattcctctcccccagatggtttcctcccatagtttcaatttcagttcatggtagctacattgttctagttgctcagaccacaaacctcgaagtcatcttggcctcgtttctttctctcataccccatgaccaatccgttagccaatcttgttaaccctaccttcctttcatggccagggtacaattactttcaccctctctaccactatcatcaggttcaaaccatcctaatctgtttgc

SEQ ID NO: 668306 - DNA, 778 bp, Homo sapiens
cataaataacagacctattggcttagtaaatagttcatttaatatgcatggtgatatctccttttatacactaaatcctgcccatctcagtccagtgtaccccatgaggaataaatgagttaatctattgattatcaccactagactatttttttgtcaatgatcckgccacagatagagtacaagatgattgtactttttactaagttactactacaatctgtagcatgcacatcccaacttacttctttagaaagaagtgtaacattcacactgaccccccgaataactatataatcaggaaatctgtcttgaggggccagctgtgacttgaacccatttgttgggttctatcagccaatgtagcaattatgatcaggactgcttaggaggataattggaccaggccaaacaggtgtgagtaattgcctgccactccagagcatgggttctgaaggtatgagtgctaacacagaactcttcaatgatttgcagggctgccaaatgactgtcatcatggctaaccaaggcctgataaatctcccttaatccccagatttctatgtaataatatttccatggaaaagaagattcagtttcagggatcagtgcctgggagagttctctttgtcttttctagttttataaaatgattatggcaagagataattggtggtaatgttgaggccatgagaacactgtaaggagttgcatgtaacgaatgttttaataaaataatacaaaactgatcacgtctacattctacattgttctttct

SEQ ID NO: 668307 - DNA, 1262 bp, Homo sapiens
tcttagtttaattatttgcatttgagactaacccttggccaataatgatgtacagaagtccttcactcctggaaagctgaggcttacaacaataacattaggttttcccctcctaaaataaaagtaatcatagttcatatcagggcagaaattcaatccaaattctaaaagatgtgtcttcagaactctgtgcttcttaatcaaccaatagtgtgtttgagacaggctagaaagccaactatttttcttttattgggaatattgttgttactatgaaccttaagtggctcaagaaacttagatttaacctttaaaaggatacctttgattttagtattcccttgagactaaactaagtaatgcacaaagaaaggtagtcaagtaagatgacagtctgaaaagagaagctcctttcattccagacagaaacttgctgactccagagattagggcacatcctggctccaatataagcggcaaacaggccagggtacaaatgacaaatactgaaagatatgagaggaaaaaattgaaacatggcgaataattctttcattgagaattttttggttatgcatacattcagaaaacataaatgcattgataatgactttttaacccaatgcttttgtctgattttattttgtggttaataaataattccctgtccaggcagctccctggaatgccttattcctccagatctttcctaattaagatgaagggataggaaataggatcccttcaatgtttccaagcttttagaataaatttatattggatacatgaaggaaatatgttcagacaattagtccaattgtgtagctccactttccatgtcttattaagaaatagcacagtatttatgtggaatgaatgagaaaagcatgggatcagaagtcggaaaatctggaccagaattctgagtccaccactaactgagtgaatttgggggaamtacacaagctctttatttctcttcccttatcaacaaaatgaaaataaaaagctgtggtactgaaaacaatgtaagatgttttatgccaggttctaactgttcttcacaaatgttgttttatttgcttcagtgcctggccccaatttctgtgatcaacaggtaagcaataaacacatgttgaattagtgttatctggaatttttgtttttcagtggtagaactctatgtagtatgtagggaatgattactaatcagtcttaggtgttaccaaagttaaaaatgtattttgggaaaccaaatcaga

SEQ ID NO: 668308 - DNA, 1262 bp, Homo sapiens
tcttagtttaattatttgcatttgagactaacccttggccaataatgatgtacagaagtccttcactcctggaaagctgaggcttacaacaataacattaggttttcccctcctaaaataaaagtaatcatagttcatatcagggcagaaattcaatccaaattctaaaagatgtgtcttcagaactctgtgcttcttaatcaaccaatagtgtgtttgagacaggctagaaagccaactatttttcttttattgggaatattgttgttactatgaaccttaagtggctcaagaaacttagatttaacctttaaaaggatacctttgattttagtattcccttgagactaaactaagtaatgcacaaagaaaggtagtcaagtaagatgacagtctgaaaagagaagctcctttcattccagacagaaacttgctgactccagagattagggcacatcctggctccaatataagcggcaaacaggccagggtacaaatgacaaatactgaaagatatgagaggaaaaaattgaaacatggcgaataattctttcattgagaattttttggttatgcatacattcagaaaacataaatgcattgataatgactttttaacccaatgcttttgtctgattttattttgtggttaataaataattccctgtccaggcagctccctggaatgccttattcctccagatctttcctaattaagatgaagggataggaaataggatcccttcaatgtttccaagcttttagaataaatttatattggatacatgaaggaaatatgttcagacaattagtccaattgtgtagctccactttccatgtcttattaagaaatagcacagtatttatgtggaatgaatgagaaaagcatgggatcagaagtcggaaaatctggaccagaattctgagtccaccactaactgagtgaatttgggggaactacacaagctctttatttctcttcccttatcaacaaaatgaaaataaaaagctgtggtactgaaaacaatgtaagatgttttatgccaggttctaactgttcttcacaaatgttgttttatttgcttcagwgcctggccccaatttctgtgatcaacaggtaagcaataaacacatgttgaattagtgttatctggaatttttgtttttcagtggtagaactctatgtagtatgtagggaatgattactaatcagtcttaggtgttaccaaagttaaaaatgtattttgggaaaccaaatcaga

SEQ ID NO: 668309 - DNA, 649 bp, Homo sapiens
aaaattatttctgcaagatcatatcacttcgtttaattttttaatggaatttaatacaatctgataattttttttattttataaatttgcctagcctatctccatctaagagaatgttagctcctagaaaactgctacacagtctatttagaattctcttataagcatatttcacagtgtttgacacattacaaaagtagacagtgctcaataaatatttttggatgaattttattttcaagagtttgggaagtttgggaaaaagtaatctttgtgttttcagttagttacataggtagtgtaggtttagattttttccaatgcctgcaaattgtgtgtgcctgagtagatagtgaaacactattaccatccccattacctatatatatatgacttttttccttttattgctaaacatgagtgatatttagccatgtttctgcctgtgtatggtgcatcagagacacttgttttgattggctggctcttatgctgtaacagttttaattgttttgrctatgttccctctgtaaattcaatgaattgttcacacagacataggattttagaagaggaatatcctttcctcaacttaaacttatcatctgagcataattttcctaacaattggagtacattgctacttgaa

SEQ ID NO: 668310 - DNA, 805 bp, Homo sapiens
aatacaaaaagcaagacaactccatgtgagtatctkaaagtcccaaggtcacttacaaaggagaaccaggtggtgaggcactcgcgagacaaacatcatagccatattttggcactagcgaccctccgaggggaggcatactaaatattttcaaagacagattttcttctgcctctggattaatgcaaaacttcaagaaatggaatattaagagtaattgttggttagtataacttttttacctgattactttttaggagctttgcatcagaatactattgcatcagaataactcagatttcaagaccctcaataaataccataaagacagaagcttcataatgctaggtctggcctcgagcaggttaaaaaacatttccccaggtgtgttgaatgtgcatctcttttaagactcactcatctactcacataaattttacaaatgagctaaatgaaggcccagaaatttgggagcaaagagaagtgattctttgctctcaaattctttgcctatctatatgctacatggaaagccaaaatggaccagtcactaaaagcacaggttcaaataacactgcaaagaattactcctcttgcagccttgaggaagttgacgctttttcctgcctgaatttccccatctaagcagggtatagtcatgttacttggcacacaaggttataatgaaaattagctaagacccaaaaaatacaaaaaagcctagccaaaagaaactactcaataaacaatagctgactgtattaggtgacaacctgttgctaagattttacaaattattaggttg

SEQ ID NO: 668311 - DNA, 619 bp, Homo sapiens
gattctttctcagttattatatattcccagctctagcctctgtgcatgccaggtctttgctgcctctgagtttattctacagcttttcctcctttatggtccaactcatcagtaagcaacttccagccttttcagagcacagcaaagtctttattctctaaaccacagtgcttcaagtctacgccactcccttgagttccttctttaccatctccttcacgttgttgtctccagttcagtcttctcrtcttctttattttattttattttattttattaattttatttttgttgagactgagttttgctcgtgttgcccaggctggagtgcagtggcacgatctcggctcactgcaatctctgcctcctgggttaaagcaattgtcctgcctcagctttcctgagtagctaggattacaggcatgtgccaccatgccctgctaattttgtatttctagtagagacggggtttctccatgttggtcaggctggtctcgaactcctgatctcagatgatccgttggcctcggcctcccaaagtgctgggattacaggcatgagccaccacgcctggccccagtcttctcttttgagctctatcctattgaatccaagtgcc

SEQ ID NO: 668312 - DNA, 1388 bp, Homo sapiens
tcattaaaagtttgcatgtgaaaagaaatgtataagatataaaattgtgtttttactcctgcctcaatattctctctctctgtctctcttcttaggctctgtctctctctgtctgctaagggacccggcagggctcccaggccatgtatctgatggagtaatccttggggagaggggatggtgatgagtacttgagagtaaagaaccactggagagaaaaacagaacaggtccaggaagtgggcgtggggcatgaaggaatcaaaaaccttattgtaggattttgggagcagttttggtggggagttagtcaaggccaggcatgaggaaagaggctgctgggggctctgtgggtgggaagagaagtggagaatgagaagagtggagaagatggcttgattaggtgttggtatgggctgtgaattagacccccttcggtgttctagcaggggtgctggtaaagactggaattgctcacatttaggaagacctcgcttcctaaagtgttatcagactgtgttagtctgctaggactgccataacaaagtgccacagactggatgccttaaacaacagaaatttattgtcttacagttctggaggctggaagttgaaggtcaaagcatccgtgaggctgtttccttctgagggctgtgagggcaggctctgttccagggctctctccttggtgtgtagatggccatcttcatgttcatgtggagtgctctctgtatgcatgcttgtgtccaaatttctcacaccagacatattgggttaggggcccaccctactctggtatgacttcatctgagttagttacatttggaataaccctattctcaaataaggtcacacctgagattctggggctaggactacaattcaggattttttgttgggcagacataattcagtccacaacacaggtatactctggaccacatggtgccctagcttgtatttgggttattgtatatatatatwtttttaatgtcatgcttcatgaatttttgtgtcatccttgcacaggggtcatgctaattttctctgtattgttccaattttagtatatgtggtgccaaaatgagcactatatatacattttattaaatgaattcatgcatataacagggtaaatgattctatgcatttgttattgctaaagctacagtaaaagcaataatttctggtttaaatgaaggctagctatgctatttgaaaaaccttcgtgatgaaatgtgaatttcctcatgttatttttatgcttcaaaccctcagtgcctttcccttgcacttgaggtaaaatgccagctgcttgtatttaaaaaaaaattaaaaaaatgctaaaaaaatattttctgtagagacaaggtctcgctgtgttgctca

SEQ ID NO: 668313 - DNA, 672 bp, Homo sapiens
cactttctcccccttactagtttcatttctgagagcactttgtggtctactgttgatcagcttgggaaacatctttaacaggatcatgtaaactgaaaaggatcccagagtgcttcacaacaaacacatttagctgttgaaagattgacaacatcactgaagtataatttttctgaggcagaaagactgaagtagaagaasacaagacacctaaactacaggccttcctcatcactaccagatccctggaaaaagtttcctatttctgtaaatctcagctttcacatctgcataaagagataattatgtctaacttcaaataatttccatacatataatttctatacacatttaaactggttccgatttttatttttctattttatcctatttattgacctggaagacttcccgtatatggtacagaaaaaaaaatgccttgacaaatttaaactcatgcttaatttagagtttctcaagctaagcactattgacattgtgggctggataactttttgttatggagggctttccagtacactgtaggatctttagcagcatctctggcctatacccattaattgtcagtagcacccctcaaatcatgaaacaaaaaatatctccaggcattgccaaaagatctctggtatgcaaaaccactcctggttgaga

SEQ ID NO: 668314 - DNA, 608 bp, Homo sapiens
actgcaccacactccagcctgggcaacagaacaagacccttcctcaaaaaagcaataaaataaaataaagaaatgcacatgactaacatagggtttattccaggaatgcaggaatagcccagtagcagagaaagcctattaaataatttatcacattaatatatcaaaagatcaaaccatttgatgctaaaatcacatttgatataatttaccatttattcataataattttcaggattcaattaattaggaataaaatacttcttcagcataatagaaaataccccagcctggtacacagcttcatactttatggtaacacrcggagattctcactgaagaaaagatgaggcaagaaaagatgatgaagaaaagatgaggcaagaaaagatgatgtctgcacactgtcagacatcaccactgtttaacatttcctgaaagctcttcaaacacagtgaaacagaaaaggaaatgcgatctaaataggaaaaattacaacattccttgttaatgacatgattttctatctgagaaaaaagacagcaagaaaatcaacttaaaacaactagaacttttaaaaagctggcaaagtgactggtaataaaata

SEQ ID NO: 668315 - DNA, 1520 bp, Homo sapiens
catgtctgtaaccacaatacctaaaagagtatccaaagatgacaaatttttgttgacaaggaattttttttattttcttgtcttcctaacatttaaaaatttaaatacctagaatgtattcaaaattgtggatgttgcctgttccaaaaaaattttgtcattaatattagtcccagatactataaaattattttcaacttaattattcataactccaacagctctgtgaaatatttttactggaatttcrtggctgagaaaagatggctccaaagaattaatttcaggacataatttctaggaagtgtcatagtcgaggctaaaccacatatattctaactcttgccctagatttctttccccttctaaatatccatatgtgctaattaattacttttaagtcatcaattttctcatcacatctcatttaaatgtctcctatctctcaagacccaattgaagctttaacacctctcaattttgatgtaatttcttcccccaaacacttaaaaaccatatttcttgatcatatgccaagcttacactgaaaaaaaaagaaagatgggttcaagcattccaacatactgctagaaaattcagggaatttcagaatatactacctatagccttttcaaggaaaataaagaaaaagccaaccagaaaaactatgagtttctatatgtcccctcatgtgaaatgaaattgatattggctgttgctgccagctgctgtcacattgcccagcctccatcactctcaaatctggcagtgttgtctgatctatatccctataacatttattagcaaggaaggcaagaacatcagctttccaattagatcagaatcttaagttctgaatccactctttaccaaccatgaaagcattagcaaattacttaaaatttctgagcctcaagtgagattaaattatttcataaagttattatattaaatatttgaaaattcttaggctttcataggtattcagtaagtggtaactattaatagttccttccaaacacgaatcctactttgtgacttctatccacaaaaatcctccagtgactccttcccgccttagaatcaagatctttctattcatctctgcttttcaaagtccagataattttgctattgcttactgtctaaatatttgtaaacctatgtgattctttgtctttgacaccatcttggcttatgaatctgtcttcttattccttcatttaccactttgggaagagtaaagattttaaagttagacagagacaaactgtgtttgaatacagactctaccacttcataccaatgggatcttttcacttaatctagtcccccttttaaaagtgattgtaattccaggattgccataatatctccagtgcttatagctaagggcccagaatatagtaggcactcaggagttggtagtgatggtgataatgaggatgatggtttttctggctaagccacacatattctgataatgaagacacctgaacagaaacacagagagtagagaa

SEQ ID NO: 668316 - DNA, 1520 bp, Homo sapiens
catgtctgtaaccacaatacctaaaagagtatccaaagatgacaaatttttgttgacaaggaattttttttattttcttgtcttcctaacatttaaaaatttaaatacctagaatgtattcaaaattgtggatgttgcctgttccaaaaaaattttgtcattaatattagtcccagatactataaaattattttcaacttaattattcataactccaacagctctgtgaaatatttttactggaatttcgtggctgagaaaagatggctccaaagaattaatttcaggacataatttctaggaagtgtcatagtcgaggctaaaccacatatattctaactcttgccctagatttctttccccttctaaatatccayatgtgctaattaattacttttaagtcatcaattttctcatcacatctcatttaaatgtctcctatctctcaagacccaattgaagctttaacacctctcaattttgatgtaatttcttcccccaaacacttaaaaaccatatttcttgatcatatgccaagcttacactgaaaaaaaaagaaagatgggttcaagcattccaacatactgctagaaaattcagggaatttcagaatatactacctatagccttttcaaggaaaataaagaaaaagccaaccagaaaaactatgagtttctatatgtcccctcatgtgaaatgaaattgatattggctgttgctgccagctgctgtcacattgcccagcctccatcactctcaaatctggcagtgttgtctgatctatatccctataacatttattagcaaggaaggcaagaacatcagctttccaattagatcagaatcttaagttctgaatccactctttaccaaccatgaaagcattagcaaattacttaaaatttctgagcctcaagtgagattaaattatttcataaagttattatattaaatatttgaaaattcttaggctttcataggtattcagtaagtggtaactattaatagttccttccaaacacgaatcctactttgtgacttctatccacaaaaatcctccagtgactccttcccgccttagaatcaagatctttctattcatctctgcttttcaaagtccagataattttgctattgcttactgtctaaatatttgtaaacctatgtgattctttgtctttgacaccatcttggcttatgaatctgtcttcttattccttcatttaccactttgggaagagtaaagattttaaagttagacagagacaaactgtgtttgaatacagactctaccacttcataccaatgggatcttttcacttaatctagtcccccttttaaaagtgattgtaattccaggattgccataatatctccagtgcttatagctaagggcccagaatatagtaggcactcaggagttggtagtgatggtgataatgaggatgatggtttttctggctaagccacacatattctgataatgaagacacctgaacagaaacacagagagtagagaa

SEQ ID NO: 668317 - DNA, 1520 bp, Homo sapiens
catgtctgtaaccacaatacctaaaagagtatccaaagatgacaaatttttgttgacaaggaattttttttattttcttgtcttcctaacatttaaaaatttaaatacctagaatgtattcaaaattgtggatgttgcctgttccaaaaaaattttgtcattaatattagtcccagatactataaaattattttcaacttaattattcataactccaacagctctgtgaaatatttttactggaatttcgtggctgagaaaagatggctccaaagaattaatttcaggacataatttctaggaagtgtcatagtcgaggctaaaccacatatattctaactcttgccctagatttctttccccttctaaatatccatatgtgctaattaattacttttaagtcatcaattttctcatcacatctcatttaaatgtctcctatctytcaagacccaattgaagctttaacacctctcaattttgatgtaatttcttcccccaaacacttaaaaaccatatttcttgatcatatgccaagcttacactgaaaaaaaaagaaagatgggttcaagcattccaacatactgctagaaaattcagggaatttcagaatatactacctatagccttttcaaggaaaataaagaaaaagccaaccagaaaaactatgagtttctatatgtcccctcatgtgaaatgaaattgatattggctgttgctgccagctgctgtcacattgcccagcctccatcactctcaaatctggcagtgttgtctgatctatatccctataacatttattagcaaggaaggcaagaacatcagctttccaattagatcagaatcttaagttctgaatccactctttaccaaccatgaaagcattagcaaattacttaaaatttctgagcctcaagtgagattaaattatttcataaagttattatattaaatatttgaaaattcttaggctttcataggtattcagtaagtggtaactattaatagttccttccaaacacgaatcctactttgtgacttctatccacaaaaatcctccagtgactccttcccgccttagaatcaagatctttctattcatctctgcttttcaaagtccagataattttgctattgcttactgtctaaatatttgtaaacctatgtgattctttgtctttgacaccatcttggcttatgaatctgtcttcttattccttcatttaccactttgggaagagtaaagattttaaagttagacagagacaaactgtgtttgaatacagactctaccacttcataccaatgggatcttttcacttaatctagtcccccttttaaaagtgattgtaattccaggattgccataatatctccagtgcttatagctaagggcccagaatatagtaggcactcaggagttggtagtgatggtgataatgaggatgatggtttttctggctaagccacacatattctgataatgaagacacctgaacagaaacacagagagtagagaa

SEQ ID NO: 668318 - DNA, 1520 bp, Homo sapiens
catgtctgtaaccacaatacctaaaagagtatccaaagatgacaaatttttgttgacaaggaattttttttattttcttgtcttcctaacatttaaaaatttaaatacctagaatgtattcaaaattgtggatgttgcctgttccaaaaaaattttgtcattaatattagtcccagatactataaaattattttcaacttaattattcataactccaacagctctgtgaaatatttttactggaatttcgtggctgagaaaagatggctccaaagaattaatttcaggacataatttctaggaagtgtcatagtcgaggctaaaccacatatattctaactcttgccctagatttctttccccttctaaatatccatatgtgctaattaattacttttaagtcatcaattttctcatcacatctcatttaaatgtctcctatctctcaagacccaattgaagctttaacacctctcaattttgatgtaatttcttcccccaaacacttaaaaaccatatttcttgatcatatgccaagcttacactgaaaaaaaaagaaagatgggttcaagcattccaacatactgctagaaaattcagggaatttcagaatatactacctatagccttttcaaggaaaataaagaaaaagccaaccagaaaaactatgagtttctatatgtcccctcatgtgaaatgaaattgatattggctgttgctgccagctgctgtcacattgcccagcctccatcactctcaaatctggcagtgttgtctgatctatatccctataacatttattagcaaggaaggcaagaacatcagctttccaattagatcagaatcttaagttctgaatccactctttaccaaccatgaaagcattagcaaattacttaaaatttctgagcctcaagtgagattaaattatttcataaagttattatattaaatatttgaaaattcttaggctttcataggtattcagtaagtggtaactattaatagttccttccaaacacgaatcctactttgtgacttctatccwcaaaaatcctccagtgactccttcccgccttagaatcaagatctttctattcatctctgcttttcaaagtccagataattttgctattgcttactgtctaaatatttgtaaacctatgtgattctttgtctttgacaccatcttggcttatgaatctgtcttcttattccttcatttaccactttgggaagagtaaagattttaaagttagacagagacaaactgtgtttgaatacagactctaccacttcataccaatgggatcttttcacttaatctagtcccccttttaaaagtgattgtaattccaggattgccataatatctccagtgcttatagctaagggcccagaatatagtaggcactcaggagttggtagtgatggtgataatgaggatgatggtttttctggctaagccacacatattctgataatgaagacacctgaacagaaacacagagagtagagaa

SEQ ID NO: 668319 - DNA, 1348 bp, Homo sapiens
aaagaatgagttttatacctatgtattagtagggaaagagacccacagcatattattaaataaaaaagcaacaagaagaacaatacacacagtgtgatcctccatttatgctaaaaaacaaaacaaaacaagcaatagccaacatatgagatgaaaatgagatagatgcatggaatggggagaatggtggtgaaggggcctttcactttttacactaggtaagtctatattgattcaactatagtaagagtttattcatgcattactgatgtacataaaagtaagcttaaactcacaaatcacagcaatacaaataaattcctctcaagaaaatcttccgaaaaatcaaatccatacaagaaaggccatttttctaacaattcactttaaaaattcttctagaaaatgtttgtaacttttcataatgacatttgagttttaatttcaaatatttatttgatgatttttatatatttaattacacatactcatacacttcatctgacttacttctttttggaatctctctaatgtaagctttctctgcatttggtcttgcacccaaggatccgctgcatattcagattctagtagagaagtccaacaatttgctgcatctctctttgtctttgtaagaacaatacgaaccatttttctgtcctctaaaaaaaaaacacacacacacacacgcacaaataaattagagttcttcatcaagttgtttttttttttttttgagacagtatcactctcacccaggctggagtgcagcggcttgatctcggctcactgaaacctccgccccccgggttcaagtgattytcctgcctcagcctcccgactagctgggaatacaggcatgcgccaccatgcccggctaacttttgtatttttagtataaacggggttttgccatgttggccagggtggtctcaagaagttcttcattaaattttatatttccaaaaacaactaactaattttttctccccccactaggtaactttgacatacaacggttttcaacacatttctattgctttatctttcaaagctgcaaagacaaaaaagacctaatacaaaagaggaaaagatatcaagacaaaattattttaatttgatgaattatagtaattacccttacccaaagtccatgttccctcatcagctattgtagaatcaaagagtttgccctgaaaaataaacatataaggtgctaaaaatacagaatttaatttttataaagttttcatgattaagatttacctactttcctacctaatccacatcttataccaccacttcaccatgacatttataggtgcacaaccctaaattttctcccagc

SEQ ID NO: 668320 - DNA, 1359 bp, Homo sapiens
ctgggtgagaataacacatagtagactgtaagagtcttcaaggcaaaagctgtgtctgtttaatgtactttggaggcaggagtagtaaagtcattttgcttaggaaactcataaactggcttcgaaggcaattccaaaaccagttttgagcatcatctttgaaataagggtattgcctcccagtgactccattgaaagatgcaattcatttggttgcataagactggggttggaatgttaaagaaaaaaaaaaagtgggggaagcaagtttcatttcttatagtccatacctccagtggggactcagcatgtagaaaggcacttggacaggaaccacgatcatacctattgttatttcatcaatgcagaatgcaacataatggaggcagaatggggaaagaaagcctttccagctgcttcaaagaaaacccagatgcttaacttgtttgctgtgatgtgctatcctttcttccttggtgccagaagagaaattattacaacatataaaaaataggattatggccggaagaaaagttattataacatacaacaaataggattgtgggatcctgaatrtgttattcaggatccatattgtaaaacatattttctttgaaattttaatcattagaaactatatagttcaaatatattctcaaggctaatccatccatattcaggaatctttcttttttaatattataaaatctttctatggacaaactcacgattagtaaagtatttccccataaaatagaaacaatctttttttccaaaaaagagggttgttattattaaggtcttttaaaaatactttttgttctggagcatgctttatcttctacttctctggggtaggttagaaataattatcaccgttttgtaaatcgggaaataaacacagggaagtcatttgtcgaaaagcacaggggaccagtgccagaaatggtttgaaaatttagatcttttactttccatttcaggtgctgcaatcatagtatcacatggctatgtgaatagtaaagtgtcttgtttacgacagaacatactgttctgaaaagtggggaggtatatctcatttttaggggcattcctttttcttaaattctaccctgtgctttgcttagtaatacagttatttataaaaatttatagaactgtaacagaggtaaagaattctcaatcttgctacttctttcctcccaatagtaataaaaaggatttaggcatccttgctagcttctcggaggcaaagtccctgtgaagctatgagaccttcattatcacattcccactgctttgtcagcttatatttgtgaggaatttaatcagttttattgctgtatatgactggaaatg

SEQ ID NO: 668321 - DNA, 643 bp, Homo sapiens
ttgcctctttaccagcttttttgggttgttttgtttttggttatcgaacagttatgctttaaatatttcttccaaaagagaccctgcattttctagaatcaayattgtcttataacttatgtttaatagagattacattttattctgtttctactagttagaagctctacacggggagagaggggaaggagagagaaaaagggaaagagagggagaaggagagagtgagaaaaagagggagaaacatattatagaaaacaaattcttctgatgtgcttcaacacattacgtttaatacttgagtctctgtgaatcttcgtggaggttctccagaaatggacaaaaattcaatatttccaccatgaaaattccaggaatgcctatgactccatccaaaggcagctgattttccttttgctcttgattaatgcatttcttccatctccaactaaacaaaggctactgattttcctcccaaaagttacttcctttggaacataccaaaaataccattgagaacaatgatatgagtcgtttcaggtgaagcgtttttagttaagaagattttaaaagtacagattcaattatttttaccgcagctttggtcaaggcttcctgaagtggctctacggagcacttccca

SEQ ID NO: 668322 - DNA, 636 bp, Homo sapiens
tttattctgctggctaaaatttctagcattatgttgaacagtgctgacagtgaacatctttgacttgtccctaatattagaaaagaaacattcagtatttcaccatggagtaaaatgaacaaaataaatttggtagatattctttaccttgttgagcaaatcccagctatttttgttttcctgagagttttttatgtttatcatcagtgctgatatttgttaaatgattttctcaatgattgataaaatcttttgatttttcttcttcagactgttaayatgttggattacactgattggtattaaaacattacattagtcttgcattcatttggtcatggtaaataattgattttttaaaaattgtgtagttatgtaatttatttaattttaactgatttgttgatatatgattacatataaaagctttacatgtttaatatatacaatttgatgtatttggagataagtatacatccgtaaaaccattaagtcatcatcactatcaatgccataaacttatccataacttccgaaacattcttcctaccacctttgtgtttctcttttcctcttgcattaagagcagttaaaataagatctaccttttagcaatattttaagcatacagtaata

SEQ ID NO: 668323 - DNA, 1520 bp, Homo sapiens
gctggactcagctcccagactcctgggtcctgtcctcaccactccacaataccctctacaacagcacacaggaaggaggactctcacctgttcctcctgcattgtgaagcctaagaaaacagcgatgggatcattgattttgatttggggccagtacctccaaaaatgtggggcagtcctgccttggaaactcgaggggattttaatggtatccagccagcatggtgtccagctagggcctgcytgggcactttctgtcctcccaaagtcagggaaggaggctgtctttggctccagccagcatatcttgaatgtctctgtgacactggctggccaccccttttaatagaaagagaaggacttaggcttcatcaagccttcatactgagctgaaatttaattacatagtttgtttccattatgttctttttaatggttatttcatatttatggtaagtgctattacttttctattcatagtaataatataaaacttcttttaaaaattaaatccatttaagtaaaaaagaatgaatataaattaaataaaaatattaagtaaaagagagtaccaatggctccccgggtgtggtcaagaatgcgagggtgctagaggaaagcttaaggttcaagttgggcagaagttgctttagaggacagagaggagcaggtggaggggacccccacctgctcctctggactcccgggtgggatatgtcttcctcaatgttccaggagctttttacatgaaggtacccattatacataatttacgtgtgttgatcaaatgatgagtgggcgcctctcgctcatttaataactcaccgtggaggctgttggagagacgcccctcgtctccatgcttaacagactctcctgctgctccatgacagctggataggaggcaatattttaagataaaaggattattaaaatagtgcatgtgctgtgttcacactcccatgtgcttcctctttctctgagttgttgtcgagtgccatgtaatttaataaattataacatatttataaataacaccttaggttaatgttgtcatgcatttttcacaacttagcattgtacacagaacgagtgggaaagtcgggggagaaggggtccaaaatgcaaagagaaaggagggtgctcacagcgtcaggtgggagtgggcttcccccctaaagacaacagcttgttcagggtcgctcatgtgcagagggtggcctacgggtccatcaggggctgagggatatgcttggggcctgtggaagagctttggaggctgcggaaatatggggtctggggtgagtctatggggagtccatagggaccactgggggtccttggtggtcagtgtgggtccatatggggagtggtaggagggatcagagtccagatctagactctgcctgaacctcctgcaagcctttcaccccctctctccctctccaacccagggcctcagttttcccacaaggagcttaagcaagaggctcctgtccttattctaggattctagtttc

SEQ ID NO: 668324 - DNA, 1223 bp, Homo sapiens
tgagagaaaacaaggggacagaaaaaaactaggggtggggaaggtggggaatctaatacatgcataattggagtccctgaagaagaaaatgcaagtaacagaatcccaaaatccataattcaagaaacatttcctggggtgggaggaaaaatggagggtgatcttgaaccaacatactgaaaggcatacaatgtaactggaaattttgagctaaaattggcagcaaaaatatatgctgataaaattacagagctttaaaaaaatgctttgggcatcccctccccttttcctgttcccactcccatctgcaattcacttataaaggaaagsaaataattctggcctcaaacttttcaccaccaacacttcatgctgcaagagagtggagcaacatatttaaactactcaaaggaggaaaatgtaagccagattcttatacccagccaaactgaccttgcagaataaagtctacagtcactagtatgaaagaactcaaggcaaatatccttacacgagactttttttttttttttttttgagacggagtgtcactctgtcatccaggctggaatgcagtggcgccatctcagctcactgtaacctccgcctcctgggttcaagcaattctcctgtgtcagccttctaagtagctgggattataggcgcgtgccaccacgcctggctaatttttatatttttagtagagacagggtttcaccatgttggtcaggctggtctcgaactcctgactttgtgatccacccacttcagccttccaaagtgctgggattacaggtgtgagccaccgtgccccgccaattacatgagaccttgaggaatcacccagagaatgagcttcagaaaccaaaaagtcactggcaaaggtgaatatatcaaattatagaactaagattaatgatgagagataaaggggacagaagtgtatgccactattatgcactggcaatatcatacaaaaacatggacgagagaaagcacatggaaaagtatatgccaactgaggaaagtatgccagacaagctgccaataaggaagccactttaaattagatgctgggaggaagagaacacctagctaacttcattattgcttattatacacaatgtctaaaaaaagaagaaactaagggtattatatgctcagttaataatataattcatatctttaaaaggggactaagggcattatacataatatataca

SEQ ID NO: 668325 - DNA, 1716 bp, Homo sapiens
tttcattaaaaagataatatgcatttaggtagtcatctaactcctacttaaagcagcatgtctgttcaaacatcctttattttcttaatttgtctcaaaagaggtttgctttatcttaagggtggttataccagataatgggataacccattgtctagaatgcagagtctttgttatttctgacatgaataaatatttgactgattagaacatgygctaatatcacaatctcaaatactttgttaaacactgtcaaaacaagtaacatgaaccttcatgattatatatatatacatatggttttatttctactgtgagtatgtgacaaacagtaaaatagcatattgcttgcctgggaaaaccacattttgtgttgtatttacatttttatttaattttcaaaatgaactgagcatttcactactaaaagaatgtaaatagataatgtcaagtaatataacacttgagacattccaatgcagataaaagttataggttcgttacaattagattcactggtgtttggcctgatttttcacttttgaagtattgttgcagtattatgagaaaatgaaatgaataaaataatgatacatattatgaattgctgtaaggttctactcctacttaagagtttgcaaagcagtgctcttcatgctggaccaataattcattacactgctgtgaattaaaatagtcatatttattaaatacccagtgtgtcgagttatatctgtgttgtgactttcataaaagaatatgttgccgggcgcagtggctcacgcctgtaatcccaggactttgggaggccgaggtgggagcatcacgaggtcaagagatcaagaccctcctggccaacaaggtgaaacccatctctactaaaaatacaaaaaatcagctgggtgtggtgacgcatggttgtagtcccagctactcaggaggctgagataggagaatcatttgaacctaagaggcggaggttgcagtgagcccagatcgcgccactgcactccagcctggcgagagagtgagactccatctcaaaaaaaaaaaaaaaaaaaaaaaaaaagagagagaaagaatatgtaatagagaagctagtgttgtgatatttgattaggaaaacaagagtttctctgaaagaagaggtctcaaattaaattagaagtgattctttggggaaaaaaagaaaaacaatagaaagaagaaaaatgttggtgactatgagcaagcaaaaacatcaaaacatcaaagatcttttttcttccttttcctttatcctctccttctcttcctgagttaaggctttcagtcctgatgctctgaagctaggcagagcaagttaggcatctaggtggaagcgtggcctggtgtggagtgctgggaaccaagccaagtgaacaaggcatccacatgcagggagtgatcagcttagggtatcaaagcccaagcagaaggagaaagacatcaaagggtgggaatggctcgagtggggagtcagaatctgaacagagttaaaaggaaatagtctatgggatgacctagctcagttttagagtctaagcagggtgaggagggtatctttgcaaatgagcatcttgtcattaggtgtcataaaccaggtggaatgatgaaactgaccacacatgggaaaagttttgatgtgggatagcagagcccaaacaggaaaggatacaaccacatggagagaaaaat

SEQ ID NO: 668326 - DNA, 1716 bp, Homo sapiens
tttcattaaaaagataatatgcatttaggtagtcatctaactcctacttaaagcagcatgtctgttcaaacatcctttattttcttaatttgtctcaaaagaggtttgctttatcttaagggtggttataccagataatgggataacccattgtctagaatgcagagtctttgttatttctgacatgaataaatatttgactgattagaacatgtgctaatatcacaatctcaaatactttgttaaacactgtcaaaacaagtaacatgaaccttcatgattatatatatatacatatggttttatttctactgtgagtatgtgacaaacagtaaaatagcatattgcttgcctgggaaaaccacattttgtgttgtatttacatttttawttaattttcaaaatgaactgagcatttcactactaaaagaatgtaaatagataatgtcaagtaatataacacttgagacattccaatgcagataaaagttataggttcgttacaattagattcactggtgtttggcctgatttttcacttttgaagtattgttgcagtattatgagaaaatgaaatgaataaaataatgatacatattatgaattgctgtaaggttctactcctacttaagagtttgcaaagcagtgctcttcatgctggaccaataattcattacactgctgtgaattaaaatagtcatatttattaaatacccagtgtgtcgagttatatctgtgttgtgactttcataaaagaatatgttgccgggcgcagtggctcacgcctgtaatcccaggactttgggaggccgaggtgggagcatcacgaggtcaagagatcaagaccctcctggccaacaaggtgaaacccatctctactaaaaatacaaaaaatcagctgggtgtggtgacgcatggttgtagtcccagctactcaggaggctgagataggagaatcatttgaacctaagaggcggaggttgcagtgagcccagatcgcgccactgcactccagcctggcgagagagtgagactccatctcaaaaaaaaaaaaaaaaaaaaaaaaaaagagagagaaagaatatgtaatagagaagctagtgttgtgatatttgattaggaaaacaagagtttctctgaaagaagaggtctcaaattaaattagaagtgattctttggggaaaaaaagaaaaacaatagaaagaagaaaaatgttggtgactatgagcaagcaaaaacatcaaaacatcaaagatcttttttcttccttttcctttatcctctccttctcttcctgagttaaggctttcagtcctgatgctctgaagctaggcagagcaagttaggcatctaggtggaagcgtggcctggtgtggagtgctgggaaccaagccaagtgaacaaggcatccacatgcagggagtgatcagcttagggtatcaaagcccaagcagaaggagaaagacatcaaagggtgggaatggctcgagtggggagtcagaatctgaacagagttaaaaggaaatagtctatgggatgacctagctcagttttagagtctaagcagggtgaggagggtatctttgcaaatgagcatcttgtcattaggtgtcataaaccaggtggaatgatgaaactgaccacacatgggaaaagttttgatgtgggatagcagagcccaaacaggaaaggatacaaccacatggagagaaaaat

SEQ ID NO: 668327 - DNA, 620 bp, Homo sapiens
tcccagctactcgggaggctgaggcaggagaatggcatgaacccgggaggcggagcttgcagtgagccgagatcgcgccactgcactccagcctgggcgacagagcgagactccgtctcaaaaaaaaaaaaaaaaaaaaaaaaaaaaaagaaggaaacctatctcagacgcctyctggtttgtgcgttctcaagtctcagtggccagaactgaatcatatatccattcatgaaccaaacagtagcaacggaaatggaactgccatgactgacttcatgaagcacacagcagtatgcaggaaggtttcatgagaacaaggaccaggttcaccttgctccccattgtattctccatatcatcataaacggcacataggaggtattcagtaaatgtttgttgaataaatgaatgaataaaatgatacaaaaataaataagacactaggcatactgcaataggactcctgtccctacagtctcctaatatttacaactagggctgtctaatgaccttcttccacagcctctaatttcagtgctgttgttagcccaggagactaaggaacaccaggtcagttgcttaatgtcaaaaaagcctttctgattgttctgcaattatca

SEQ ID NO: 668328 - DNA, 620 bp, Homo sapiens
tcccagctactcgggaggctgaggcaggagaatggcatgaacccgggaggcggagcttgcagtgagccgagatcgcgccactgcactccagcctgggcgacagagcgagactccgtctcaaaaaaaaaaaaaaaaaaaaaaaaaaaaaagaaggaaacctatctcagacgccttctggtttgtgcgttctcaagtctcagtggccagaactgaatcatatatccattcatgaaccaaacagtagcaacggaaatggaactgccatgactgacttcatgaagcacacagcagtatgcaggaaggtttcatgagaacaaggaccaggttcaccttgctccccattgtattctccatatcatcataaacggcacataggaggtattcagtaaatgtttgttgaataaatgaatgaataaaatgatacaaaaataaataagacactaggcatactgcaataggactcctgtccctacagtcycctaatatttacaactagggctgtctaatgaccttcttccacagcctctaatttcagtgctgttgttagcccaggagactaaggaacaccaggtcagttgcttaatgtcaaaaaagcctttctgattgttctgcaattatca

SEQ ID NO: 668329 - DNA, 619 bp, Homo sapiens
tcacccaggctgtagtgtggtggtgtgatcatagctcactgcagcctcagactcctgggytcaagtgatactcccacctcaacctcctgagtaattggtattacaggtgtgaaccctttatgagctaacagtgatttgttttgagaattttacacataaaatttacaatcttctttataacgagaatttttctgttgcatagctagactgtcgagctctgtaccgtcctatatggttgccaccagccacatggggctgttcaaattaaaactaattaaacttagaatttctgttcttcagctgcactagcaacatttcaagtccttaatagctaatttggctagtggctatcgggctggacagtgcacacatacaatattttcatcactgaagaaagttctattagacagtgctagtgtagattaggtatttggtaaatttttatatattagattacattaaagcaagccccagcttaaacaaaattacattcagacaactttattaacttggatagcatgaaaatacattttagtatgacagcagaattgcctcaagttctgagctagtagagtcaatattaatgaagaaaacataaatatatatgtatccataatat

SEQ ID NO: 668330 - DNA, 649 bp, Homo sapiens
tgagtaggtgagggtccaagtaaatcagagatttctgatggcccattccagaaaggagaggcagagttgactttataaactcagacatggaggggtaagagttctcatagaccataaactggttcccctagcttgccttggttcctgctcgcccccaccactgcagcattgccaccaagtggtgagtcagtctcagcttgagtctctccaagaatgaggacctcactacctccagtggtaaattgttccattttgagagggtccaattattagacctgaggttccttcattgggcagctggttttctttggtgctcatgcttgatttccttctggcctccgctgacttctctgaagtctcaggtgcacactcacatgcaagactgaaataygacaaggttgcagcctttactaccactacatgcactcacttgttttctcagcactattagcctccactgacctcaaagggaagcatgtgtataagctgggcaggaggtaggcatgggccgtgttaaaggcaaagtactttaaaagcctttgatgaaaggcattaaggcttgaaagggttgtttctgaaatactacacctcccttttaagaactcttaagatctggagggtgatactctctcaccccggaagaattcaa

SEQ ID NO: 668331 - DNA, 621 bp, Homo sapiens
tcaagaacatcattagtatgataacacttccactgcccagactgacggggccagagggccacactgctaacccctgaaattaaaaaaaaaaaaacaaggtaggccccctatcttaaatcacatagaatggtagcagtgtttcatgtcctttctaggtgatggagtcacggtctcataatacagcaccaaccattaattccataaacatacagcatgtcatgaagtccagggtctgatgttgtggacaagtgcaagatttctagagaaaatatacattgtcttgcttatgaaataagattatgcatttaaaatttcaaaaatattcgatstcaaagaataaaagagttaagagaaagcctatgattaaaagccaagtgactgatagggaatttcaggagaaaaaaaaacagaataaatcagagtagtcagggatggcataatagaattgggacttaacacaaaacacttatttaacactttctatgaaatatgccttctgagaactcactggtgaaatcaaacccagatcctggcctcttgatacttgtatgctttttgggtgtacagttgctcaatggacatataaagtacagagtgatgagtgtcacagtaacagacaca

SEQ ID NO: 668332 - DNA, 1831 bp, Homo sapiens
tcacaagggagtcacaggccagagatattcattctccctcctgacagtgtggtcatattaggcacagtagagaggggagtgtgaggtgtaggcagtggtgtgctggtaactatttaatttttttttgagacaaagtcttgctctgtcacccaggctggagtgcaatggcgagatcttggctcactacaaccttcgcctacctggttcaagtgattctcctgccccagcctcccgagtagctgagattacaggcacacaccaccatgcctggctaatttttgtattttgagtagagatggggtttcaccatgttgaccaggctggtctcgaactcctgacctcaggtgaatcaccttccttggcctttcaaagtgtactgggattacaggtgtgagccactgtgcctagccaytggtaaatgttttataaccagcttggaggagggaaggaaggaaggaaggaaagacggaaggaaggaaggaaggaaggaaggaaggaaggaaggaaagaaggaaaggagggagggaggctttatgaatggtatttactgatttccgtggtggtagcacaaccaccgtgtcctgttttgagctaccaacgtggtatcactgaatgagggactgggaagaaatgtgcaggattggttcacgtgggctggcgagcactggcttcagcacatcatcaggtatagggccaaaaatagggagataggttcaaatttagtttatagagggtcagtcctcacaatctcttccccagttcatgcaaagaataccacagtgaggtgtttatcatcaatccccaccgcacacatacaagactaggaaaatacagtggtctcagagagggaaccccaaacctctaggaatgaatgaagatcactgaaaggaactatttaggatattcataaaggcttttttttttaaaagaactttgtgtgtctgtgtgtgtttgcataaaattgtaaattgctttaaaagacttttgattgcttaaagcaaaaataagtaatatgctttgtggagggccatactgttgttaagttctacactgttcacgaagcaggacaatactgtttgaaggtagactttaatgacttaacgatacatactgtaatttctggatcatccactataaaattaggaaaagctctataaaagaagtcaatagaaaaaatataatggatactaaaacataatcaattcacctagaagaagtcagcaaagaaaaaatagagaagcaaagaataaatgggataaatagaaaacaaataccaagaggaaatactttaactcaaacatttaaaaaattaaatcaaatgtaaatgaattaaatgttccaattaaagttttaaaaaaatgaaaaatccaatggctacttgtagttgttacatttcaagtacttgatagctacacatggttagtggctatcacaccagacagtacagatacagaaatttccatcatctcagaaaatttgactggaaagcacccgtctaaagagcaactaactcaaaataaacagggatgacagagcactccaggattagaattccataatgagaatgtaaatgcctggtagtgcagtgaacaaatagggcaattagaattttcaggaagaacaaaaagatgatcaagaaagtaaatacggtcatagcatacttgactctgtagtgaaaaatatatacataggcaaaattccggcaacactaatgcttgatttattctaaattggtagataattattttgggaaagtgggagagaggcaaggtggtgaccggagagagagcgtgtatgctaaacctcctctactgtaacgggagatgaaaaa

SEQ ID NO: 668333 - DNA, 1831 bp, Homo sapiens
tcacaagggagtcacaggccagagatattcattctccctcctgacagtgtggtcatattaggcacagtagagaggggagtgtgaggtgtaggcagtggtgtgctggtaactatttaatttttttttgagacaaagtcttgctctgtcacccaggctggagtgcaatggcgagatcttggctcactacaaccttcgcctacctggttcaagtgattctcctgccccagcctcccgagtagctgagattacaggcacacaccaccatgcctggctaatttttgtattttgagtagagatggggtttcaccatgttgaccaggctggtctcgaactcctgacctcaggtgaatcaccttccttggcctttcaaagtgtactgggattacaggtgtgagccactgtgcctagccactggtaaatgttttataaccagcttggaggagggaaggaaggaaggaaggaaagacggaaggaaggaaggaaggaaggaaggaaggaaggaaggaaagaaggaaaggagggagggaggctttatgaatggtatttactgatttccgtggtggtagcacaaccaccgtgtcctgttttgagctaccaacgtggtatcactgaatgagggactgggaagaaatgtgcaggattggttcacgtgggctggcgagcactggcttcagcacatcatcaggtatagggccaaaaatagggagataggttcaaatttagtttatagagggtcagtcctcacaatctcttccccagttcatgcaaagaataccacagtgaggtgtttatcatcaatccccaccgcacacatacaagactaggaaaatacagtggtctcagagagggaaccccaaacctctaggaatgaatgaagatcactgaaaggaactatttaggatattcataaaggcttttttttttaaaagaactttgtgtgtctgtgtgtgtttgcataaaattgtaaattgctttaaaagacttttgattgcttaaagcaaaaataagtaatatgctttgtggagggccatactgttgttaagttctacactgttcacgaagcaggacaatactgtttgaaggtagactttaatgacttaacgatacatactgtaatttctggatcatccactataaaattaggaaaagctctataaaagaagtcaatagaaaaaatataatggatactaaaacataatcaattcacctagaagaagtcagcaaagaaaaaatagagaagcaaagaataaatgggataaatagaaaacaaataccaagaggaaatactttaactcaaacatttaaaaaattaaatcaaatgtaaatgaattaaatgttccaattaaagttttaaaaaaatgaaaaatccaatggctacttgtagttgttacatttcaagtacttgatagctacacatggttagtggctatcacaccagacagtacagatacagaaatttccatcatctcagaaaatttgactggaaagcacccgtctaaagagcaactaactcaaaataaacagggatgacagagcactccaggattagaattccataatgagaatgtaaatgcctggtagtgcagtgaacaaatagggcaattagaattttcaggaagaacaaaaagatgatcaagaaagtaaatacggtcatagcatacttgactctgtagtgaaaaatatatacataggcaaaattccggcaacactaatgcttgatttattctaaattggtagataattattttgggaaartgggagagaggcaaggtggtgaccggagagagagcgtgtatgctaaacctcctctactgtaacgggagatgaaaaa

SEQ ID NO: 668334 - DNA, 701 bp, Homo sapiens
ccccatggagcccstccccatggagccccgcccccacggagccccgtcccgggaagcccagcactggaagcctcgcccttgccactgctctggccccgcccctaaccagccctcccctcccccggcttcatcccctgaaaggctaaatcccacccccaattgaccagaaccccaactctgctcctggataatcccgccccttcatggccatgcctctccccttcataactccatccttctggacacggccctgccccttctccatcctctcttatccagtcttaactcctcttccattgtcagactctggctccgcccctgacccgctagcctgccctgcctggccctgcccacagactcatctggcccggccccgcccctgaccttcttagccctatgccctagctctgggttcctcccctagctcctccgtcctcctccagctcctccctcttcccaagctcctccccctttctctggctccttcctttgtcccagctcctccctctttcccagttcctccctcttccccagctcctctctcctcccctggctccttcctcctcccccacctcctccctcttccccagcgcctacctctttcccagctcctccctctttcccagctcctcccccttcctctggcttctccctccttctttggctcctccctcccccctctcctaatccatttttctccc

SEQ ID NO: 668335 - DNA, 701 bp, Homo sapiens
ccccatggagccccyccccatggagccccgcccccacggagccccgtcccgggaagcccagcactggaagcctcgcccttgccactgctctggccccgcccctaaccagccctcccctcccccggcttcatcccctgaaaggctaaatcccacccccaattgaccagaaccccaactctgctcctggataatcccgccccttcatggccatgcctctccccttcataactccatccttctggacacggccctgccccttctccatcctctcttatccagtcttaactcctcttccattgtcagactctggctccgcccctgacccgctagcctgccctgcctggccctgcccacagactcatctggcccggccccgcccctgaccttcttagccctatgccctagctctgggttcctcccctagctcctccgtcctcctccagctcctccctcttcccaagctcctccccctttctctggctccttcctttgtcccagctcctccctctttcccagttcctccctcttccccagctcctctctcctcccctggctccttcctcctcccccacctcctccctcttccccagcgcctacctctttcccagctcctccctctttcccagctcctcccccttcctctggcttctccctccttctttggctcctccctcccccctctcctaatccatttttctccc

SEQ ID NO: 668336 - DNA, 2048 bp, Homo sapiens
aatgcgctgtacacaaaatgagatgtgctggctagatttcaaagacttgatatgataaaaaagaatgtgaactctcacactaataaggtacattgattacatattgaaataataatattctggattatcttgagctaagaaaagtattaacattaatttcacctgttttttcattttcttyacttggctactagaaagttgaaaattacctatgtgacttcattgtgactcacatatttgtattgtagagcactggtttagaggtcaagacacttggatatccatctagggtctcctagttatttgttattttatctaaagtcagactcacataatataattgcttgaagaaaggagtcaagcaccatacttgccacatagtaaagtcacagtatgtattattctgttttcttcaatcctatttgcaactaaagagatgatgtccacaatagatcaaaactctaattcctcttgttttcagttaaggtttatttaattctgattagggagagcctgtctttaatcagcctggctgttttatcctcaccctcaccttgtgaaatggctgcctagttcctcacccactagaacaaagtgacaagaaagcataattcagttaagaaatttttatcaagtattttttcattctcttttttaaagagagaggggaataaatagagacagagagagagagatcagtaaatcgtgacatagagatttattttaaagagtaacttcctgtccataaacaaataaataaaatgtcgtatatacaatacaatgaaatattgttcagccttataaacaaaggaaatttggacacatactacaacatggatgaatcttgaggatgttatactaagtgaaacaagccagtcacaaaaggacaaatactgtatgattccatttacatgaggtaccttgtgtagtacagttcacagaggcagaaagtagaatgctggttgcctgaggatgggagttggggaggaaaagggaaatgggaaaaactgtttaatttgtacacagttttggtttggggagatgggaaaacttctggagagggatggatggtgatgatggttgtctaacaacagaatatacttaaagccactgaactgtacatttaaaaatggttcaaaaggtaaattttttgttatgtatatgttaccaaaaacttttaaatcaactttctaaaaaagtaacttccatggtagatggtggatgtcaaattgaatacagattcacccaatttcctgcacttcaatcgctgcattgacgagtcccatagtgtccctaaagagactcaatccttaatcactgattcacagtcactaacatgtgcttattaaggtgttaatgtttcagtacttgtaattggagttattaaaatcagggttttctgactaatcgtcaattaacaaattatagctgggcgtcgtggctcatgcctgtaatcccagcactttgggaggccgagtcgggcagatcacgaggtcaggagatcgagaccatcctggctaacacggtgaaaccccgtctctactaaaaatacaaaaaattagccgggcacggtggcgggcgcctgtagtcccagctactcgggaggctgaggcaggagaatggcgggaacccgggaggcagagcttgcagtgagccgagatcgcgccactgcactccagcctgggcgacagagcaagactccgtctcaaaaaaaaaaaaaaaaaaattataatgagccagaaattccattgtccaaaacctttcagttgtccaaagcattccggttaaatgaggtttgacaataacacaaattgaaaattcttttccgcgaccctaactgaatccttgatggcagcctggttggtttttccctcatctaattagagatggagttcagggatagtgtcacagctggtgagggacatcatgcagctggctttccaggaaaagcaaaggaagggaagtagtctgcactgggaggctgcttccaagattagaaaaactatgtaaaggctcaagtttgagttaattttttcaatagagatatt

SEQ ID NO: 668337 - DNA, 626 bp, Homo sapiens
gtttactactttagcaaataaaatcccaaccttctttctactctcccacaggacctaaatatactcatcatcaggcctcactgagactcattctacctcaccctttcccaaggggctgctcatacttctagtcccatcacactctccctcctgtgtgtgcaagagttgctgggcagagtctttcccacttcagactctgcaactgcctggagtgcaagttctttccatccattcatcaggcagccttcattcccaaaccatttattgacatgctaactgaaccccttatttggctttgaatctcatcatccataaaatgggcatkatacccattggctgggttgtcaagggaactaagtagaaaaccatgttgtaaaccctctagtccgatgctgacacattgtactgtatgtgcttaattaatgtatttcccatctctttctttctttgctgctcaaaatagttgagtgaatatctgaaagcaggatggtagaagctgggccaacagcactgaatccaatcaaaggcacaggaaggggtctcagagtgccacatcaggctcacagagagtgtccctcttatatgtgacatacacaatcttctcctcaatccagataagggcaact

SEQ ID NO: 668338 - DNA, 619 bp, Homo sapiens
ttgaacacatgaattccagcagtgacatctttaacctttgtttccttggcccttttctttcccatagttctctgtgtctctcttgccaataactgtgcccacccttgagcaatcaaaacttgatcacagtggataaaaagaagtgtaaataatgttctttttaaaatgccttatctgattcagaactatgcataaggcttacatatgcaactgtattttgcacaagcatttacacagggaaacactatgarcttatagttttactcagagccctctaatatgtaaaaaagtatagtatcctattcagatagttaatttgattattatattcgtaataatatcagcacatcaaaagactgatatccacataggtagactttaccttaagattcttcttccttgcctagcacccttggtcatcaatttgattaatgccactaatgaaaatttctgaatgccaaataaatgcatgtaataagaggatttttacatatagcctaagaccatgttaccacttaaaagttcagcagatcctctcattggtcatcattggatgtttttttgaggcttagaataaaggaatagtgataaagtaacaattctaaatgtaccagtgatg

SEQ ID NO: 668339 - DNA, 1801 bp, Homo sapiens
tttttkattttatcagtttttttgaaagaattctcatattttagagacatcaaatgaattagcttcagatgcaataatgtgctgttagtgacttactttaaaatatcaaaaaatgataatggagtgggcgtatagagagtggctgtgtgcctaaaccaagactgaccataagtcagtaattattgaaactgtaaaagaagtacatcaaagttcattatattacatttcactgagcttaaaattttacataataaaaatttttaacagaaagctcacaaaaattaaattagagcctgagaatatctagttttgcaaggttgttgagcactgggagtatacccacgacatggaaaaatttggcaatatctggtaaatctgaagacaggtatactccataatgcagcaatttcacatccggatatatacctcagagaaactttttcaccgatatatgagaatacacatacaagccaaaaaaaaagagaaaataatctaaatgtctattaacagaaaagaggataaatgcactgatgcaaaccaaagatattccacaaatgttaaaagtaatgagtgagagcagcatgcatcatcatgagtatataccaaagccataatttttagtagaaagaatgcaagttgcaggataatagttgtaatatcatttacatgtaagtttatatagaactttaaaataagcaaaattatactgtaaagcatttatgaatatgtaattatacaataaatgtttaaaatatatgcagttataataaacaccaaattcaggacagtgatttttctctgagaaggaagggaatggtatagaatctcagagaaatctccaggggataaatgtgtaggtaacacttttgtttcgaatacttcttctgtgaaacaaaaacaaaactgaagcaaatacagcaaattatgaaaattcactaagtggatggtggctactttgtgtattgctaaactgtttgccatagttgtcagcatgtttaaaatagtttaacattctaaaataaaaatggtgatgtgttctgtgtcaataatgcaataatggaatgttgcagctgtctcaaaagtgtctaaaaataattaaataatttcagccaaggcaaacataatcattcgaggaaattgagagcttgaacctctgtgtggtcaaatgggcattgtgacacccaactggcctcttagcaaaggtttagctttaacggctgttagaaggagagaataacctgtgtcattacactagattctgtttctagtgcacacaatggagattagctgtttatttcttcccctgacttttgaaaatcatagtttccacttgtaatataaaactttatcttagcttgactttgtggggtgactgcatgataagatacatataaatcctcacttgtaaaacatttcaaagtgcccaaatgaaacatttgcttctttttttacattacattcaaaactaggctgtagaaaaacagacactttagtgatgactctacccaaatactgaagtcaaataaggagctgcagaacagtcttttccttgttggttacaaatagtttctttcctaatgacaaagatatttcaaatactcagggtttttgtttttccttcctcctttttaaacttattttctgtctttcttattcgttattagtgttgtcctataaaggatgacctgtgacatctcttaaattctgagcaagtttcttttaatactgtagccatattttaacgtcagcagttggcacttcacatgttcgttctcacggagtgcaatgtgtgaaatgtgct

SEQ ID NO: 668340 - DNA, 1801 bp, Homo sapiens
tttttgattttatcagtttttttgaaagaattctcatattttagagacatcaaatgaattagcttcagatgcaataatgtgctgttagtgacttactttaaaatatcaaaaaatgataatggagtgggcgtatagagagtggctgtgtgcctaaaccaagactgaccataagtcagtaattattgaaactgtaaaagaagtacatcaaagttcattatattacatttcactgagcttaaaattttacataataaaaatttttaacagaaagctcacaaaaattaaattagagcctgagaatatctagttttgcaaggttgttgagcactgggagtatacccaygacatggaaaaatttggcaatatctggtaaatctgaagacaggtatactccataatgcagcaatttcacatccggatatatacctcagagaaactttttcaccgatatatgagaatacacatacaagccaaaaaaaaagagaaaataatctaaatgtctattaacagaaaagaggataaatgcactgatgcaaaccaaagatattccacaaatgttaaaagtaatgagtgagagcagcatgcatcatcatgagtatataccaaagccataatttttagtagaaagaatgcaagttgcaggataatagttgtaatatcatttacatgtaagtttatatagaactttaaaataagcaaaattatactgtaaagcatttatgaatatgtaattatacaataaatgtttaaaatatatgcagttataataaacaccaaattcaggacagtgatttttctctgagaaggaagggaatggtatagaatctcagagaaatctccaggggataaatgtgtaggtaacacttttgtttcgaatacttcttctgtgaaacaaaaacaaaactgaagcaaatacagcaaattatgaaaattcactaagtggatggtggctactttgtgtattgctaaactgtttgccatagttgtcagcatgtttaaaatagtttaacattctaaaataaaaatggtgatgtgttctgtgtcaataatgcaataatggaatgttgcagctgtctcaaaagtgtctaaaaataattaaataatttcagccaaggcaaacataatcattcgaggaaattgagagcttgaacctctgtgtggtcaaatgggcattgtgacacccaactggcctcttagcaaaggtttagctttaacggctgttagaaggagagaataacctgtgtcattacactagattctgtttctagtgcacacaatggagattagctgtttatttcttcccctgacttttgaaaatcatagtttccacttgtaatataaaactttatcttagcttgactttgtggggtgactgcatgataagatacatataaatcctcacttgtaaaacatttcaaagtgcccaaatgaaacatttgcttctttttttacattacattcaaaactaggctgtagaaaaacagacactttagtgatgactctacccaaatactgaagtcaaataaggagctgcagaacagtcttttccttgttggttacaaatagtttctttcctaatgacaaagatatttcaaatactcagggtttttgtttttccttcctcctttttaaacttattttctgtctttcttattcgttattagtgttgtcctataaaggatgacctgtgacatctcttaaattctgagcaagtttcttttaatactgtagccatattttaacgtcagcagttggcacttcacatgttcgttctcacggagtgcaatgtgtgaaatgtgct

SEQ ID NO: 668341 - DNA, 1801 bp, Homo sapiens
tttttgattttatcagtttttttgaaagaattctcatattttagagacatcaaatgaattagcttcagatgcaataatgtgctgttagtgacttactttaaaatatcaaaaaatgataatggagtgggcgtatagagagtggctgtgtgcctaaaccaagactgaccataagtcagtaattattgaaactgtaaaagaagtacatcaaagttcattatattacatttcactgagcttaaaattttacataataaaaatttttaacagaaagctcacaaaaattaaattagagcctgagaatatctagttttgcaaggttgttgagcactgggagtatacccacgacatggaamaatttggcaatatctggtaaatctgaagacaggtatactccataatgcagcaatttcacatccggatatatacctcagagaaactttttcaccgatatatgagaatacacatacaagccaaaaaaaaagagaaaataatctaaatgtctattaacagaaaagaggataaatgcactgatgcaaaccaaagatattccacaaatgttaaaagtaatgagtgagagcagcatgcatcatcatgagtatataccaaagccataatttttagtagaaagaatgcaagttgcaggataatagttgtaatatcatttacatgtaagtttatatagaactttaaaataagcaaaattatactgtaaagcatttatgaatatgtaattatacaataaatgtttaaaatatatgcagttataataaacaccaaattcaggacagtgatttttctctgagaaggaagggaatggtatagaatctcagagaaatctccaggggataaatgtgtaggtaacacttttgtttcgaatacttcttctgtgaaacaaaaacaaaactgaagcaaatacagcaaattatgaaaattcactaagtggatggtggctactttgtgtattgctaaactgtttgccatagttgtcagcatgtttaaaatagtttaacattctaaaataaaaatggtgatgtgttctgtgtcaataatgcaataatggaatgttgcagctgtctcaaaagtgtctaaaaataattaaataatttcagccaaggcaaacataatcattcgaggaaattgagagcttgaacctctgtgtggtcaaatgggcattgtgacacccaactggcctcttagcaaaggtttagctttaacggctgttagaaggagagaataacctgtgtcattacactagattctgtttctagtgcacacaatggagattagctgtttatttcttcccctgacttttgaaaatcatagtttccacttgtaatataaaactttatcttagcttgactttgtggggtgactgcatgataagatacatataaatcctcacttgtaaaacatttcaaagtgcccaaatgaaacatttgcttctttttttacattacattcaaaactaggctgtagaaaaacagacactttagtgatgactctacccaaatactgaagtcaaataaggagctgcagaacagtcttttccttgttggttacaaatagtttctttcctaatgacaaagatatttcaaatactcagggtttttgtttttccttcctcctttttaaacttattttctgtctttcttattcgttattagtgttgtcctataaaggatgacctgtgacatctcttaaattctgagcaagtttcttttaatactgtagccatattttaacgtcagcagttggcacttcacatgttcgttctcacggagtgcaatgtgtgaaatgtgct

SEQ ID NO: 668342 - DNA, 1801 bp, Homo sapiens
tttttgattttatcagtttttttgaaagaattctcatattttagagacatcaaatgaattagcttcagatgcaataatgtgctgttagtgacttactttaaaatatcaaaaaatgataatggagtgggcgtatagagagtggctgtgtgcctaaaccaagactgaccataagtcagtaattattgaaactgtaaaagaagtacatcaaagttcattatattacatttcactgagcttaaaattttacataataaaaatttttaacagaaagctcacaaaaattaaattagagcctgagaatatctagttttgcaaggttgttgagcactgggagtatacccacgacatggaaaaatttggcaatatctggtaaatctgaagacaggtatactccataatgcagcaatttcacatccggatatatacctcagagaaactttttcaccgatatatgagaatacacatacaagccaaaaaaaaagagaaaataatctaaatgtctattaacagaaaagaggataaatgcactgatgcaaaccaaagatattccacaaatgttaaaagtaatgagtgagagcagcatgcatcatcatgagtatataccaaagccataatttttagtagaaagaatgcaagttgcaggataatagttgtaatatcatttacatgtaagtttatatagaactttaaaataagcaaaattatactgtaaagcatttatgaatatgtaattatacaataaatgtttaaaatatatgcagttataataaacaccaaattcaggacagtgatttttctctgagaaggaagggaatggtatagaatctcagagaaatctccaggggataaatgtgtaggtaacacttttgtttcgaatacttcttctgtgaaacaaaaacaaaactgaagcaaatacagcaaattatgaaaattcactaagtggatggtggctactttgtgtattgctaaactgtttgccatagttgtcagcatgtttaaaatagtttaacattctaaaataaaaatggtgatgtgttctgtgtcaataatgcaataatggaatgttgcagctgtctcaaaagtgtctaaaaataattaaataatytcagccaaggcaaacataatcattcgaggaaattgagagcttgaacctctgtgtggtcaaatgggcattgtgacacccaactggcctcttagcaaaggtttagctttaacggctgttagaaggagagaataacctgtgtcattacactagattctgtttctagtgcacacaatggagattagctgtttatttcttcccctgacttttgaaaatcatagtttccacttgtaatataaaactttatcttagcttgactttgtggggtgactgcatgataagatacatataaatcctcacttgtaaaacatttcaaagtgcccaaatgaaacatttgcttctttttttacattacattcaaaactaggctgtagaaaaacagacactttagtgatgactctacccaaatactgaagtcaaataaggagctgcagaacagtcttttccttgttggttacaaatagtttctttcctaatgacaaagatatttcaaatactcagggtttttgtttttccttcctcctttttaaacttattttctgtctttcttattcgttattagtgttgtcctataaaggatgacctgtgacatctcttaaattctgagcaagtttcttttaatactgtagccatattttaacgtcagcagttggcacttcacatgttcgttctcacggagtgcaatgtgtgaaatgtgct

SEQ ID NO: 668343 - DNA, 629 bp, Homo sapiens
ttcagagatagcaaattgggatggacattcaaagacctagagatggagagagacacccagaaagaaacccagagagtcaggggtggagagagacacgaagaaaaaacacaagaaggaaaggtacatactaataatttattgctggcggggcttggtggttcatgcctgtaatcccagcactttgggaggctgaggagggaggatcacttgagatcaagagtttgagaccagcctgggcaacatagtaagacctcgtctctattttttatgaaaaagaaaaaaacaggccgggcacagtggctcacacctgtaatcctagcactttgggaagctgaagcgggcggatcacgaggtcaggagattgaraccacggtgaaaccccatctctactaaaaatacaaaaaattagccgggcgcggtggcgggcgcctgtagtcccagctcctcgggaggctgaggcaggagaatggcgtgaacccgggaggtggagcttgcagtgagctgagatcacgccactgcactccagcctgggcgacagagcgagactccgtctcaaaaaaaaaaaaaaaaaagaaaaaagaaaaagaaaaaaatagttggggaacggcagctcacgcctgtaattccag

SEQ ID NO: 668344 - DNA, 1106 bp, Homo sapiens
gcggcaagctgaccgcacagcagtctggcttgattttcagccgtcatcattgggttctgttttgacagctctgctgtcccatagggactgcgactgggaccaggtcaaccacrccaggggggtgtcaccagccttttctttttttctttctttttttttttttcctccttaagctgctgtcaatccaaaccattggcatcatcgtttcttttgaattaaaaccaacatatcagcaatagtctgctctccccgggaatctctaacatgctctgtttacatcgataaatgcacttaaggaaaacaaacaaattaaagctcatcttaaagtccaaggatttttatgtccacattttccctgtaggccacacggacatggccaggtgctgggggtgggtctggacaagatggtagagcccatggattaccccatcgagcggccacctcagaggagatgccacccatcatcaaaagactaaattgggaaaagaagcctcctggcttggtgcagtggctcacacctgtaatcccagcactctgggaggccaaggcgggctgatcacttgagctcaggtgttcgagaccagcctggccaacatggtgagcctgcgtcacctggcttctggcacacagctcggccactgtgtccctcctgcctccctggcaggtccttctaggggccctctcctggctggctttccagggcattccttccactctatccagggtccttcccaagaccacacccaggtccagtcattccctaggacttggcagagagctgtactcacagccaagatcacagcaaaatcagcaaagggaaaaggcatgcagagtgaagtccagaggcaaccagacagaagcatccagaatcctctcacagtggggtcacacaccccatgcttaactcccccaacaatgagttgtaacaacaggtgtgtaatgtgtcttttgtgaaagctagttggcagttctgtacccaggtgtttatggagccagtcacataggaaccctctacctggcacttatcaggattccagactcctacaaagaaagcaggggtttagcataaaccgcatcacttgtacagaaagtgtatgagccacgca

SEQ ID NO: 668345 - DNA, 1106 bp, Homo sapiens
gcggcaagctgaccgcacagcagtctggcttgattttcagccgtcatcattgggttctgttttgacagctctgctgtcccatagggactgcgactgggaccaggtcaaccacgccaggggggtgtcaccagccttttctttttttctttctttttttttttttcctccttaagctgctgtcaatccaaaccattggcatcatcgtttcttttgaattaaaaccaacatatcagcaatagtctgctctccccgggaatctctaacatgctctgtttacatcgataaatgcacttaaggaaaacaaacaaattaaagctcatcttaaagtccaaggatttttatgtccacattttccctgtaggccacacggacatggccaggtgctgggggtgggtctggacaagatggtagagcccatggattaccccatcgagcggccacctcagaggagatgccacccatcatcaaaagactaaattgggaaaagaagcctcctggcttggtgcagtggctcacacctgtaatcccagcactctgggaggccaaggcgggctgatcacttgagctcaggtgttcgagaccagcctggccaacatggtgagcctgcgtcacctggcttctggcacacagctcggccactgtgtccctcctgcctccctggcaggtccttctaggggccctctcctggctggctttccagggcrttccttccactctatccagggtccttcccaagaccacacccaggtccagtcattccctaggacttggcagagagctgtactcacagccaagatcacagcaaaatcagcaaagggaaaaggcatgcagagtgaagtccagaggcaaccagacagaagcatccagaatcctctcacagtggggtcacacaccccatgcttaactcccccaacaatgagttgtaacaacaggtgtgtaatgtgtcttttgtgaaagctagttggcagttctgtacccaggtgtttatggagccagtcacataggaaccctctacctggcacttatcaggattccagactcctacaaagaaagcaggggtttagcataaaccgcatcacttgtacagaaagtgtatgagccacgca

SEQ ID NO: 668346 - DNA, 1106 bp, Homo sapiens
gcggcaagctgaccgcacagcagtctggcttgattttcagccgtcatcattgggttctgttttgacagctctgctgtcccatagggactgcgactgggaccaggtcaaccacgccaggggggtgtcaccagccttttctttttttctttctttttttttttttcctccttaagctgctgtcaatccaaaccattggcatcatcgtttcttttgaattaaaaccaacatatcagcaatagtctgctctccccgggaatctctaacatgctctgtttacatcgataaatgcacttaaggaaaacaaacaaattaaagctcatcttaaagtccaaggatttttatgtccacattttccctgtaggccacacggacatggccaggtgctgggggtgggtctggacaagatggtagagcccatggattaccccatcgagcggccacctcagaggagatgccacccatcatcaaaagactaaattgggaaaagaagcctcctggcttggtgcagtggctcacacctgtaatcccagcactctgggaggccaaggcgggctgatcacttgagctcaggtgttcgagaccagcctggccaacatggtgagcctgcgtcacctggcttctggcacacagctcggccactgtgtccctcctgcctccctggcaggtccttctaggggccctctcctggctggctttccagggcattccttccactctatccagggtccttcccaagaccacacccaggtccagtcattccctaggacttggcagagagctgtactcacagccaagatcacagcaaaatcagcaaagggaaaaggcatgcagagtgaagtccagaggcaaccagacagaagcatccagaatcctctcacagtggggtcacacaccccatgcttaactcccccaacaatgagttgtaacaacaggtgtgtaatgtgtcttttgtgaaagctagttggcagttctgtacccaggtgtttatggrgccagtcacataggaaccctctacctggcacttatcaggattccagactcctacaaagaaagcaggggtttagcataaaccgcatcacttgtacagaaagtgtatgagccacgca

SEQ ID NO: 668347 - DNA, 642 bp, Homo sapiens
tgaaaaaaagcagagagccgtgagttaaaggagctgtctttttcaactgtttgtttcatacaccactgcacaaagcaagtccaacattttgattaataacaaacctaaacccagaggaaagaaagggctatcagcttacaaactacttcagctttaatatcataatacttagcatggctagttacttggcaataatatttaacctttaatagaaataaaagcataatcaaaatgcttcatccatttatctttcaacatgctttggtcacttcattgtgaaaagcaaaacaaaacagttattatgattttcagcataataaattcctgacctacttgcctctataaatcacagactgtacgaattgaaagcatgcccgcactttacagtctcctatgaggatacacaataagatttagaatacggactcaatttgagtacagggggtctgatagtttacaatcatgtatgtcccaataactcaatactatccactctgcggctctttatggaattggcccaaaaaaagtagtgaatttttttggaattaattacacactgatcatttacatatgaaaattgtagagcttgttcacttgaaggcaaagacaaaaatttasgtttgattaataaaaaatttcaca

SEQ ID NO: 668348 - DNA, 1102 bp, Homo sapiens
gaaagaaagaaagaaagaaagaaagaaagaaagaaagaaggaaggaaggaaggaaggaaggaaggaaggaaggaaggaargaaagaaagaaagaaagaaagaaagaaacaaacaaacaaacaaccaggcatcgtggtgcgcgtctgtagtcctagctacttgagaggctaaggtgggaagatcacttgaacccaggaattcaaacctgcagtaagctatgattgtgccactgcacttcagattgggtgacagagtgagaccctgtctcaaataaacaaacataaactttccacgtgatcatggttccttgcttatagcctcctgtcactgttatccatgggtaaattcccagacctagtgcttcctggtcggcctaattttagagccatctaagatcaacaataaggtaatattagtgtaataaaatgctgggtctggaatattttaatacctactactatggtaaaaatatttgggataaaaatgacaggctggacacaaaagtttcctttcctcactatctgacaaaatcttcaaaagacagtgagaaagaggcaaaaatttcacttgtagccacaaagcaagggaagaagtacaacgttgtgtcataagccttaaaaagcattgctcggccgggcgcagtggctcacgcctgtaatcccagcactttgggaggccgaggcgggtggatcacgaggtcaggagatcgagaccatcctggctaacacggtgaaaccccgtctccactaaaaaaacaaaaaaaattctccgggcgtggtggtgggcgcctgtagtcccagctactccggaggctgaggcaggagaatggcgtgagcccgggaggcggagcttgcagtgagccgagatcgcgccactgcactccagcctgggcaacagagcgagactccgtctcaaaaaaaaagaaaaaaaagcattgctcaaggaacctaacaggagactttacctctaacctcttaaacctacccctgccttttcccattaagcaagacagagaaattagggaatttgatccagtattccttaataactcccacttaggagagaaataaactgaggtagccagtagacagcccagggaaaa

SEQ ID NO: 668349 - DNA, 1102 bp, Homo sapiens
gaaagaaagaaagaaagaaagaaagaaagaaagaaagaaggaaggaaggaaggaaggaaggaaggaaggaaggaaggaaggaaagaaagaaagaaagaaagaaasaaacaaacaaacaaacaaccaggcatcgtggtgcgcgtctgtagtcctagctacttgagaggctaaggtgggaagatcacttgaacccaggaattcaaacctgcagtaagctatgattgtgccactgcacttcagattgggtgacagagtgagaccctgtctcaaataaacaaacataaactttccacgtgatcatggttccttgcttatagcctcctgtcactgttatccatgggtaaattcccagacctagtgcttcctggtcggcctaattttagagccatctaagatcaacaataaggtaatattagtgtaataaaatgctgggtctggaatattttaatacctactactatggtaaaaatatttgggataaaaatgacaggctggacacaaaagtttcctttcctcactatctgacaaaatcttcaaaagacagtgagaaagaggcaaaaatttcacttgtagccacaaagcaagggaagaagtacaacgttgtgtcataagccttaaaaagcattgctcggccgggcgcagtggctcacgcctgtaatcccagcactttgggaggccgaggcgggtggatcacgaggtcaggagatcgagaccatcctggctaacacggtgaaaccccgtctccactaaaaaaacaaaaaaaattctccgggcgtggtggtgggcgcctgtagtcccagctactccggaggctgaggcaggagaatggcgtgagcccgggaggcggagcttgcagtgagccgagatcgcgccactgcactccagcctgggcaacagagcgagactccgtctcaaaaaaaaagaaaaaaaagcattgctcaaggaacctaacaggagactttacctctaacctcttaaacctacccctgccttttcccattaagcaagacagagaaattagggaatttgatccagtattccttaataactcccacttaggagagaaataaactgaggtagccagtagacagcccagggaaaa

SEQ ID NO: 668350 - DNA, 637 bp, Homo sapiens
gtaaatgtcagaatattaattaatcaccctataatttggaatgaagataaatgaccaataatttagaaccaaaagaaccttattatctgaaaataatccatcatggaaaacaatctgctgaaggtattctgctagataaatagtagatggagggagggtcatataagttgtatcaggattgaaaaataaaactaaaaattattaaaataatcttatatgtaacaaaatttgttacagttataattatttgccaattcttggaataaacaaattgtcctggaatcattttttcaagaaaatcacattacattcgcagtgtatgtaactataccactcacactatatctgaaatttatcatcaccccaaacagaaactccgtactcattaagcaacaactcyccattccctctcctcccattccataataatgttctgcttagactcaaagtctatagtgttatttacactacaatatttttccctttaaatttgacatcttttgcagtatggtcttaaaagagggctactggtctcttgatatttaagtcattctcattctttaaatttctatcttatcatcctgtggatttgtattcattaggtctaaatttgccaaatcttcatgtattacttact

SEQ ID NO: 668351 - DNA, 1035 bp, Homo sapiens
tgcaaagtagtgaactacaccttctaagatcttaatagattcttgagggttgggtattaatgaataaagtcaccctcaagacatacatataatgggaatcataaagaaatgagggggaatctcattgtttgtactatattttacagtagatactgtcagtgtaagacagttttaccttcaggcttgatctgatttttaggtgatcatgggattttcccacttctattactgacctatattacctggtacattatgagaataaagtgtagctttactagagtctgttaatagatacctaatgctcccacatgagcttttagagacttgcaccttaagttcacctgaggcgtttttgcagaattataacttaatatagttagcaaaaaccaggattcctaggtaagtgctagaaaaactagatcttttctaatactgatattcccatatctgctgttattcaagtcttggtttcacccaaggaaataaaaggaaataaaacaagttaaaagttcgtaggtgcctagagaaaagattcatttgggttctcacaatcttatgaagaaatcttctaagcagaacacctccgtgactcactttcttgaagaaaatactctgtatgactcctgtagttaaactcaactcacttccaagttattctcacgtgcctattttctactgtgcttctaatccccaattacttacatttacatctgttastagaaaacttctaattttctaaattctcagtaatttaacagtcaatagacactactctgggttaaggtaataggaaattctggagattaggtatagattactagttgtctaaaggcaaacaacaaattatcttttgtgtacatgtataacttgcctaaaaaaatctactttgcataatatgtataatatttaagaacttatatgtaaccgttaaattacatgctttgaatgtactatatcattaattcttataacaacctagggaggcatagaataaccactttccccattttgcagaagaggaaactgatcactaaa

SEQ ID NO: 668352 - DNA, 789 bp, Homo sapiens
gctgtcccaatatccagggataaggggtgagccaggaggctttttctttcctaaggctgttcctcagcctctgccgggcctggaagggttgtggtatgagcagacaggtatgcagacaggtgcccttgcctgtggctggccctgccaagttaacatgcaagggtgcgagtatctgggcggctgtgtggttgcaggtgtctttgaggactgctgcctggcctaccactaccccattgggtgggctgtgctccggcgcgcctggacttaccggatccaggaggtgagcgggagctgcatctgcctgctgcgatgtgagtgcggcccgtggggtctgggcgtgtggggtgcacacacagccttgctgccagcctacaccctaacctgggcacccccctctgctcaccacagattctacctccccaagagacacaggaaggtgtgtgggaaccccaaaagcagggaggtgcagagagccatgaagctcctggatgctcgaaataaggtttttgcaaagctccrccacaacacgcagaccttccaaggtgggcaagacctctgctgggcatctagggggcctgccctccctgcctgcaagcccatgtgtggttcagaccccgagggagggaattggagaccagaatactgacacctgcctgaaccccaaacaaagccagttgctggtgagtggggcaccaagtgaatgaccaactgattgagtcattgtccagtttttgtttctggagatggggtcttgctctgttgcccaggctggagtgcagtagcatgatc

SEQ ID NO: 668353 - DNA, 677 bp, Homo sapiens
tatgtactagtgggaagaaatatgcaattaataaacaaatgaacaagataattgaaaattgaggtgagtgggtaaagagacaaatagaatgaagtaatactgtgttaaaggttaagtatgattgccaggaaaggctacagtgataatatctggatagtgaagagctaaccttgaaagataatttccaggctggagaaaaatatggttaagggctttggagcagaggagggcttggtaggttttaggaatwgtccgttttggtcagcattgtcaaagcaagggaggctgttttggagaggcaggtagacactagggaggcatttagattgtgcttgaaatgcaatgcaaagttgtggaagagttttatacagggaagtgcatgatcttactggagtttaagagacaagagtaaatgggagccaatcactctggaaatttttattgtagtccaggtgggagataaatgtggctgagactggggtggtagcagcagagatccagaagatgaatgattctcagtgtgttttataggaaaaagaaataggactctgttggatatattgtgaaggaggaatgaaggagtccttggtatttggcttgatcagctggggccgtttttactagaaggtggaagactaggtagaacagaattagaatgaaattaagaattcgggttt

SEQ ID NO: 668354 - DNA, 616 bp, Homo sapiens
agtgattgacctcagcctcctgagtagctggcactacagaacccactaccatgcttggctaatttttatttttagtagagatgaggtcttgctatgttgcctgagctggtcttgaactcctgggctcaagtgatctttccatcttcgtgtcccaaagtgatgagattacaggccaaagtgatgagattacaggcgtgagccactggacccagccttatttgctttttaaaaacactcatgaagtgtattttttcccatcccatctccagttataataagagtaactcttagtaagtggcaggcaccatgctaaatgatcacttatatgcataatttaattcaagatggaaaaaaaatcccataaatttaagaagctaaaaatagttttgtccaaggtcatgtagctaggtgataaagctgagatttgaacccaggtctttctgaaatcaaaataatgcttttttttttcttctttcccttatgttttctttcctactatgtttcaataagtatctttcatcaatgggtgatccagagagaaaacattaactagtttccatgaatattagtttcyagctctggtagagacaaagacctatgtaaaacaaataaaaca

SEQ ID NO: 668355 - DNA, 1423 bp, Homo sapiens
gaaagagtaacttggattgaatattccttagtatcctctgacagttcttttgtttggttgttttgctttttgagacagggtcacgctctgtcccccaggctggggtgcagtagcacgatcatagtcacagcagcctcgaacccctgagcttaagcaattctcccgcttaagcctctcaagtagctaggtctagaggtgtgcgtcactacacccagctctttttttgtagagatggaggccttgctgtattgcccaggctggtctcaaacttgtggtctcaagcagtccttacccacctcggcctcctaaagcactgggtttacaggcatgagccaccacacctggcctgatttttttgttgttgtttgagacagtctcrctgttgtcacccaggctggagttcagtggcgctatcttggctcactgcaacctctgcctttcaggttcaagtaattctcgtgcctcggcctcccgagtagctggtattacagacgtgcaccaccacgcccagctaatttttgtatttttaatagtgacagggttttgccatgttggccaggctggccttgtgaactcctggcctcaagtgatccacctgccttgttcttccaaagtgctgggattacaggctggcctgatttttttaagtcaacaatattgtaaataatttttctgcttactgaaaaaaagcagaagtcttgtttttgcatggtcattacattattatgttatgaatttataagcagttcctttagaggagccaccattttttgaatttgacagagccgttttattaaaaaaaaaatttcccagtaaaggacaaatactggccaggcacagtggctcacgcctgtaatcccagcactctaggaggccgaggcgggcagatcacctgaggtcagaagttcaagtccagcctggccatggtgaaaccccgtctctactaaagatacaaaaaattagccgggcgtggtggtgcacacctgtaatcccagctactcaggaggctgaggcaggagaatggcttaaaaccaagaggcggaggttgcagtgagctgagatcatgccattgcactccagcctgggcaacaagagcaaaactccgtctcaaaaaaaacaacaaaaaaaaggacgaatataggtcatacaaagatgataatgttcatagcagtggtctgaaacttgactgttcatgagtcatctgaggaacattctaaaagttaagatttccggccaggcatggtggctcatgtctgtaatcctaacagtttgggaggccaaggcaggcagattccttgagcccaggagttcaagactagcctgggcaacgtggcaaaaccctgttctaaaaagttaagagttctaaatcctaactgcaaagattcttattgagataggccagaaaagcctgagaatctgcaat

SEQ ID NO: 668356 - DNA, 583 bp, Homo sapiens
gggcttacagtagttactacgtagtactgatatttgtaatttttattttatggttttctatagttttctgaaataattaacagtgataatgacaytgatgataacagcagttattatttatagaaaagttaatacatgtcaggcccagttttaagagcttagtgtattaactcatttaatcctcataacataagatgaaaaagtgagattaaataacttgcccaaggtcacacagataattacagaaggtgccaaaatctgaatccaaatagtgtggctccaaagcgcctgttctctacactacattgaaaagttttgctttgttttaaaaatttaaccattaaaaaggcatatatcaatcccaactttatggtctcacggttatcagctttttttcagtactgagttgtaatattcgctctggcatggagtgtctttttggattaagatgtagccactattcctatatgtattctatctactccagaaaattccaggacaaatccacctccctatttcccatttcaatatctcatttgaccattcagactctagaactctaatattcctacttactacagca

SEQ ID NO: 668357 - DNA, 345 bp, Homo sapiens
aagaaaaaaaaatcccttctttaacccaagaaatgtaatgcaaacaacttgggcctgtgtcacttagtcttctaagaagacttcaaggctgttataaagacccagtggtgggagaaacctgatccggtatmgcggggccagaagaagctgcgggaccatgccgcggggacaaggcaaggagtttcgccaggatgttgatctcctggttatctacacttccgcctcagtatgatctgaattattaatgagaaagattaagatacagattccttccttcaagtgccttagtagtcacagacaggaggttaattataagactaaaagcatcttgggttgttagaagaa

SEQ ID NO: 668358 - DNA, 593 bp, Homo sapiens
cctcgttcaagcccatgtaaaaggaagcggaaatacagggcctggaaattacactgatcccattggccagaacttagtctcaccttcttaccaccctatatgcgagactaaaatgcctctagctggatagttacatgttcatttaaacttgggtcattttgtttctaaatgaagggaaggggcacaagtattagtctgtcacagaagagaaagaacagagagaaaggttttgaagggaatgacttataaatagttacccgaagtctggtcgtggctgacatcagagccagcatgttgaccacttccatactgcgtgctttagctgccttatctcacttaatctcagaataaccctattgtcattcccaacttgtagatgggaaaacagacycaaagagaagtgatttaccttccacacaatggggaagtaagggggctaggtgcacgtcaaggcagcctgtgcctggctcttatacctggtgctgcttacatttccagagggggcagcctagaggagaggcctagggactggactcaacgtgcgagtgcttggtggaagggaagccagaggatcgagtggccagaggttaaga

SEQ ID NO: 668359 - DNA, 652 bp, Homo sapiens
cgaaacgcttgtgggtgctgtgataaacaatgtgtctgasgccatggagactcttacccgaatcacagaggagctggtcccagttccaggatctgtgaatggagtcaatgccctgggtctagttgtcttctccatgtgcttcggttttgtgattggaaacatgaaggaacaggggcaggccctgagagagttctttgattctcttaacgaagccatcatgagactggtagcagtaataatgtggtatgtatttccattttctatatatgttatatacgagatggttattgccatcaacatgtgttctgtactgaggaaggtgccacgaggcaggatggccaattgcagttatctcactctggtaagcccaggaaaatcaatgaatctctgggcctctagaggccttgaacctatctgcaagcctcttctaataagtttgcttccttgttttcaaaagctgtcacctccttttaccccagtgctgatggaatctcattcctcatttctccattttttatctagtttttcattcaagacataattattgagtgtctactatatgctaagcatatagtgccaggcactgtggatatagcaataaagaaaacatacaaggatattccagatcttacactcttttaagggagacaga

SEQ ID NO: 668360 - DNA, 650 bp, Homo sapiens
actattgtcatccctgccctaacaatgtgattaacattttatctctctgagttcctctcccctccttaccctttatccctatcaggggcagactcatatcatgataatgtcattgctacacagctcaagttcactgtcacccaagagggtctcctggagcttacacatgacaggcaatggtattagaggtgaaatatacagaagcaatggcattagaaatatacagaatgtataaataaatatrcagaagcattggcattagagatgaaatgtaaactttccataaacattgtgaatgcccgattcaaggaaagtatgttctgtccgaatcggaaacaccttttagctacagtggttctgaggaaggtacctctgcgaggatgttaaaaaaatatgtaaaggtgtatttttcattgtcacagcaacaaggatgaaaaggtggaaaatgggaaagggtgatggggatggtagaggggtggggacctaccagcatctggtgtccaggactcagggatgtcaaatgcctgcaattctcagggcattcccaccttatgaattgtctcaccaaaaatgtcagtaacacctgtactgggaaagaatggaaggggaagtgcgcagcactcaaatagttgctaacaatggtcatttga

SEQ ID NO: 668361 - DNA, 650 bp, Homo sapiens
actattgtcatccctgccctaacaatgtgattaacattttatctctctgagttcctctcccctccttaccctttatccctatcaggggcagactcatatcatgataatgtcattgctacacagctcaagttcactgtcacccaagagggtctcctggagcttacacatgacaggcaatggtattagaggtgaaatatacagaagcaatggcattagaaatatacagaatgtataaataaatatgcagaagcattggcattagagatgaaatgtaaacttyccataaacattgtgaatgcccgattcaaggaaagtatgttctgtccgaatcggaaacaccttttagctacagtggttctgaggaaggtacctctgcgaggatgttaaaaaaatatgtaaaggtgtatttttcattgtcacagcaacaaggatgaaaaggtggaaaatgggaaagggtgatggggatggtagaggggtggggacctaccagcatctggtgtccaggactcagggatgtcaaatgcctgcaattctcagggcattcccaccttatgaattgtctcaccaaaaatgtcagtaacacctgtactgggaaagaatggaaggggaagtgcgcagcactcaaatagttgctaacaatggtcatttga

SEQ ID NO: 668362 - DNA, 712 bp, Homo sapiens
tgatggatatatactacagtacatagggctgggcatggtggctcatgcctataatcccaacactttgggaagccaacgtgggaggattgcttaagctaggagtttgagaccatcctgagcaacatagggagaccctgtctctatacaatataaaaaaattacccaggtgtggtggctgctcaccacactagccccaacttttttaaagcaatgaacatatattaattttactacaatataagaaaacacggccgggcgcagtggctcatgcctgtaatcccagcactttgggaggccgaggcgggtggatcacgaggtcaagagatctagaccattgtggccaacatggtaaaaccccatctttacgaaaaatacaaaaattagctgggtgtggtggcatgcacctgtagtcccagctactcgggaggctgaggcatgagaatttcttgaacctgggaggcgcagattgcagtgagccgagatcatgccactgcacttcagcctggcamaagagcgagactccatctcaaaaaaaaaaaaaaactggacaatatgcaaagatacaagaaattaaaattttacttctgatacacatctttccaggctgtttttaatgtgtgtgtgaacatatttatataatatcatattataaatgattttttgtagattgtgattttgacttagtagggtatatcttagataggatattaga

SEQ ID NO: 668363 - DNA, 563 bp, Homo sapiens
agataggggacagttagaatgtactggtgtttctgaagaaggacacagaagaaactttcaaataaaagggaactatcaactgtgtgcaatgataaagagaatttatggctgggcgcagtgcctgtaatcccagcactttgggaagcctagacacgaggatcacttgagcccagtttgaaaccagcctgggcaacaaagtgagacccctgtctctacaaaaactcaaaaaattagccagatgtgatgtcatgcacctgtggtcccagctacattggaggctgaagcaagaggatcgcttgagcccwggaggtcaagactgagtgagtgaagatcatgccattgcactcctgcgtgtgcgacagagtgagacactgtctcagaaaaaagagagaatttaagtagggcgaaagctgaaaaggggtcacatgataaaaaaaaatatagtaagtcatttggaatactttgaaaagaaaaataattgtgttttatttatggagtttctagacagtgttttcaaatgacaaagtcaattttccactgttaaccaactctagagatcacgc

SEQ ID NO: 668364 - DNA, 563 bp, Homo sapiens
agataggggacagttagaatgtactggtgtttctgaagaaggacacagaagaaactttcaaataaaagggaactatcaactgtgtgcaatgataaagagaatttatggctgggcgcagtgcctgtaatcccagcactttgggaagcctagacacgaggatcacttgagcccagtttgaaaccagcctgggcaacaaagtgagacccctgtctctacaaaaactcaaaaaattagccagatgtgatgtcatgcacctgtggtcccagctacattggaggctgaagcaagaggatcgcttgagcccaggaggtcaagactgagtgagtgaagatcatgccattgcactcctgcgtgtgcgacagagtgagacactgtctcagaaaaaagagagaatttaagtagggcraaagctgaaaaggggtcacatgataaaaaaaaatatagtaagtcatttggaatactttgaaaagaaaaataattgtgttttatttatggagtttctagacagtgttttcaaatgacaaagtcaattttccactgttaaccaactctagagatcacgc

SEQ ID NO: 668365 - DNA, 647 bp, Homo sapiens
ggatcaacagtggcatctatggaatccaagcctctcagatttgcatggcacctaataggtattctaaacccagtctatgtgtgctacgtaaaggtaaaataatttaaaacagctacactttcatgaacaacttctgtattaatctttatttcaaggaagtgtgagattatgatgatacgatagttacaatcatttaggtatttttcatagcataattagtttcttattttaaaatcttacttatctttgaaggcccagctgaatcctatttgatccatgacaatacactaccagaaaaaatctaaaattattttaaaaagtctaaaatttagaaaaagtctaaaattaccagaaaaaatataaaatttgctctctgttccaatttctgagtatctaatcagctactacattatatgtttatttcatttttcatagtgwttgttttatcttcctaaaatactatttaaaaaaagtgggcaaaggacaggaataaacacttctcaaaagaagtcatacaagaggccaagaaacatgaaaaagtgctcatcatcaccaattttcagagagatgcaaatcaaaaccacaatgagataccatctcacaccagtcagaatggctgttattaaaaagtcaaaaaacaacagata

SEQ ID NO: 668366 - DNA, 1678 bp, Homo sapiens
tccattggccagagctacacctgccaagatctcagtctcaggcttctgcctccctccccttgctgtgttcaactctgtactagacagtgatggggacagattatgaaagctctagactctgctgtcaaggaagccattctcaaccttcaaggctcaatcaagagagtaaggttctctctctgcaggatcctcaaaaaaaaaaaaaaaaaaaaaagtccagactgaggtggaggaaaagggaatcagtgtaggaatgataggaggagatcaaagagtgtttcttacaggaaggagaggtggaactggaaaaataaataaataactgagtgaatgcataggaaggtggaaggtggagggatgtatggacagagtgccatatagagtgcccctggaatggggatattaattctattttctatgtaatacttggattctctgaacgtacacatatgtgtacacagaagctcacacttgtacatcgatatacctacagaaaaggagttatcatgtagtaagacacatttagaaattactaaatgtgtggactgatgagagtcttaaaccaattcactagatctaatgaaattattttgctttattgatgaatggaaggaagagtttatgactggaatgacggatggatggatggacagacggacggacagatggatggatggatggatggatggatggatggatggatggaagacttaatagatgggtggatggttaatggatggatggtttgagatagatggataacagttggagagtggatagattgatagatgtatgaatgatgaaagcattgatgaatggatggaatgatggatagatgaatacatagaaagttaattgacagatgtatagataatagagtgaaagatgtttttatagaaagaataatgagtggattttctgatgaatatggatcagtggacaaaaggaagaaaaggtaatagaaagatagatagatagatagatagatagatagacagacagtatgtggtgagtctgcttggaattgaaggatgtgggcagttagagatggattcttgggagaaaaagatctacctaagtgaagaaggcagagacctatgggttaggtatgtgtatgagtatatgaagatgagaaataaggttggctatgagagctttagtgggtgcataaagaatatcactaatccgccaggcttggtagctcatgcctgtagtcccagcactttgggaggctgagacgggtggatcaccagagattgggagttggagaccagcctttccaacatggagaaaccccgtctctactaaaaatacaaaattagccctgcgtggtggcgcatgcctgtcatcccagctactcgggaggctgaggcaggaaaattgcttgaacctgggaggcagagattacagtgagccaagatcgtgccgttacgctccagcctgggtaacaagagtgaaagtccatctcaaaaaaaaaaaaaaaaaaaaaagagaatatcactaatccattaaaataagagcagaaataacacagaagacacagaagacagtttagagtcggatggcataggttcawaataaagtgatcctaccacttactgtgtgacattatctaacctttagcttagcttttttttttttttgagacagagtttcactcttgttgcccaagttgggg

SEQ ID NO: 668367 - DNA, 1480 bp, Homo sapiens
cttaattttagattttgcagttttttcaaattgtttgggaaacacagctgggattattaatattctgaggttttctaattgaaggagatgactgtcattgtgtgaagttctgaatttcattctttggacatcatagacaaccgctctaacttcagtagaaagaatttgaattaaatgctagcatttggggattaaatattttggcttctggctcatgacttgcataatgtaataacagttgtagccagcatgattgagtgtttatttacatgcctggcactatgcaaagccctttctgtgtattatcatatttaatcttcacagcagcttaggcatattcaagttttcaaattaataaatagaggcttggaaaggccgtttgcttgtttgtttcttaaatgctggaatacattgagaaaatagaattttcaaccctggaaaactacttcatacatgtagctacattgcagctgttgctcattcattcaacacaaccagctaatgagaaggtgttgctcagcagtagacaagcagagagggagggcaatccagctggctttctatatcctggggaactggatttgcagaggattagaatctgaggatgctcatgtcttttatatatagatgtcaaaagtacaaactccaactcctaaaaacatgcacatagggccacctggataatttttagtcattatgtttttaaaaagtagcccctggtcccctagttggatcctggcaataacctggattacctgcatcacaacttcctcaacattccctctctgaatttctgttgaaacggcagatatttaaagacagtaatgggctgcagaacttttctctacctaatatattcaacttgcacaaaagaaaactgcatcctcacagttaaatgatgtgccctagatcacataatgtgtgtctcacattagcttgactgcattttagcctaatgcatcaagacacttggcaatactgtccaggtttcagattaaagtgcccagctccagttgaaaatactcaaagaacttgaaacagaccaaataattacaagattgtgttcaagaatytatttatttccatccttcaccccttctttcactcatttattcaacaagcacttcttatatgtgtactattagccaggcagtatgccctccattaagactacaaagatgggaagacaaagtatctgccgtaactcattgactgaagtatgttccagaaccagactaggggaggcttcatcaggaatggggattattcttgcccagtcaatcactgtttccgtcaaactgatatgtttattaagtatttataactttttccaggcttttggtgcatgaacaaaacatagaagtatccctgcactcaaggagcatatgttgaaattgattaagacaaactataaataagtaaaccaatgaataaataagtgaggtaagttcaggtgctgatcatgctgtaaggaagatag

SEQ ID NO: 668368 - DNA, 1447 bp, Homo sapiens
  misc_feature 427, 442, 443: n = A,T,C or G
acttttttacttttggttcacttttgggttttctttgtattagctaattcatcagaattgcttcctgcagaaaccagggaaatacttccttttttgtatttggcttcaaaaaacaacaaaaaaatgcaaacagaattcttcctcaggtatgtgctaaagtctttcctttagcccaatgggccagctttagtcatctgcccacccttgggaagaaaaacagcatatgatcttttcaatcaatccactgaaaaaaatcttatgaaaaaatccaacactcacttgtaataaaacaaaatcttagggctttagtcatagaaagcacttcctttgcctgataaaatgaatctagacaaaatttatagtggtaaccaataacaattcctactggagaaactacaggagctttctcaaaaaataaatattgtanctgaaggcgtcaaanngcactgtgaataagaaaaattaaaaaacaggcataattgaaaagttaaaggcaaaagtgaaattatttgcagaaaatattatctacacagaaattgtataagaacatctataagccattaaactaataacaggattaagaagagttatgattttacacttatactgaaaaaaataagagcattcatatacactagcataattaagaaatgtaagagaaaatattcataatagtagcaaatattgtatttaggaaaaactttaacaaattataaggaaaaacaaattcagagtattatgaaaaaaacatgaaaggtaaaagatataaattatacatatgatgttagatgaaaagccataatattaaaggtgtcaacatatctccaagttataaatctagtgtaatatcaatttttaaatctcaacaaacctagacaaaaactaaactgacactgaaattcataaagaacaaaagtcatcaccaaacgtaaagccaagctacaaatagagaggtacatatatatctgccaagtttagtgtccaaaacgtgacaaaaatcttgcaaatcaatagaagaaagaaaaacaacactcgtaatccctggaaaataggaaaagaatatgaacaggcaatgcccagattataaagcataaatgactaattaatgtatgaaaaatgcycaatatctttaatgatcaagaaaatgcaaaaataaagcaataatgagacaatatgggataatcatataattggcaaaaatgtaaattttgacaataccaaatattggcaagtttctagggaaatgggctcataaatcataagtggtgagtatacatttgtataactggtttgaagaagcattatgtttttgaactgctttgaagagcaataacatctaataaacttgacaagtttgctgctaggaataaattgcagagaaaaatcttacacatgtacccccagaggcatgtacaaaattgctagttacaacattaattgtaatacc

SEQ ID NO: 668369 - DNA, 667 bp, Homo sapiens
gtatgtgtgtgtatgctgtatttaattcatattactataaaaaattttttgtaatagttatattagtcaacgtttagaaaaataatgtggagtagacactattgtatgcattataaagaaaaatacstgctaatcaaagatgataagacagatactcaaagtcataaatcttttaagtggcagcagtggaaggcaagcccaggtgcctcatactctttccagcagtccatcatgatggattcaatcattgcatccattaaatctggcagctacagtaagacagatgatactttggcctacagccgttttaagattcctcaaacaaatcaactaaacatttccaatgttattgcctttgttcttcaatacataattgcttttaaaagctgaaagtagggaagagagaaaataaatcatgaatttttatcagaaagcctgcaaatctgaattgtaaaaagccaaacaaaaccctttttctcctcagtagggaattctccttaaagtacaatataaagtcattcttcttattaaattttaagtacatgaggactgacattaatggaactcatttaagtgaacttaactgaatttctatacacatttgattttcccccacaacatgagtgccttcctgaatgatcccacagaagcaacatgattgacatta

SEQ ID NO: 668370 - DNA, 612 bp, Homo sapiens
ccactawcttgtttgcttttctataaggtaaataacattctttccatttgcctcatgaggaaactgagggcctgcgagcttaaatgatgatttcctacactattaggcaaaaaaaaagcattatgctgaaaaacgcatattatcctttgaataagaaaggaaaataagaaaacagatttacatttgcttggtttttatttaaaaatgccggaaagattaacaaaaaactagtaagagtggtaacacgttggggctggagggagatagtaaatggtaaagggagcacacagtgtgcacttttgtgtatcattgtgaatatattatctcacctaaaaatgaactcattctgagtgctaactaataaacaagtaaataacatccccagtgtaacacagcttccaagtgagagaggcaggatttgaatccaggtttctctgagcctgaagcgtaggttttcttcccccaacaccatgtaacactctccttgtagggacagttttttatgatgactctcccattagcagcaacatcccaccttggtgacaatgtttgccaggggatgaggaaagccacacctcttttttgaaaggtttttactcctggtgcacctct

SEQ ID NO: 668371 - DNA, 612 bp, Homo sapiens
ccactatyttgtttgcttttctataaggtaaataacattctttccatttgcctcatgaggaaactgagggcctgcgagcttaaatgatgatttcctacactattaggcaaaaaaaaagcattatgctgaaaaacgcatattatcctttgaataagaaaggaaaataagaaaacagatttacatttgcttggtttttatttaaaaatgccggaaagattaacaaaaaactagtaagagtggtaacacgttggggctggagggagatagtaaatggtaaagggagcacacagtgtgcacttttgtgtatcattgtgaatatattatctcacctaaaaatgaactcattctgagtgctaactaataaacaagtaaataacatccccagtgtaacacagcttccaagtgagagaggcaggatttgaatccaggtttctctgagcctgaagcgtaggttttcttcccccaacaccatgtaacactctccttgtagggacagttttttatgatgactctcccattagcagcaacatcccaccttggtgacaatgtttgccaggggatgaggaaagccacacctcttttttgaaaggtttttactcctggtgcacctct

SEQ ID NO: 668372 - DNA, 612 bp, Homo sapiens
ccactatcttgtttgcttttctataaggtaaataacattctttccatttgcctcatgaggaaactgagggcctgcgagcttaaatgatgatttcctacactattaggcaaaaaaaaagcattatgctgaaaaacgcatattatcctttgaataagaaaggaaaataagaaaacagatttacatttgcttggtttttatttaaaaatgccggaaagattaacaaaaaactagtaagagtggtaacacgttggggctggagggagatagtaaatggtaaagggagcacacagtgtgcacttttgtgtatcattgtgaatatattatctcacctaaaaatgaactcattctragtgctaactaataaacaagtaaataacatccccagtgtaacacagcttccaagtgagagaggcaggatttgaatccaggtttctctgagcctgaagcgtaggttttcttcccccaacaccatgtaacactctccttgtagggacagttttttatgatgactctcccattagcagcaacatcccaccttggtgacaatgtttgccaggggatgaggaaagccacacctcttttttgaaaggtttttactcctggtgcacctct

SEQ ID NO: 668373 - DNA, 1729 bp, Homo sapiens
ttacctttaaaattataccaaatacataaacaagagggcattgcaaaataccacaggctctaattcatttatagatatataaatgtaactaaaatatacagacccaaatacatctgtaaaaaatttataaataagtgtgtgcagtgttccaggtgagcacaaaggaaaaaaggaagtgttaaattcacccaacacagcttttcctgctttccactataacgcagtaccttcagaagtaaattcctaactcttggtttctgttttaaaagaaagctaaaatactggcacattcgttgttatttctgacttttagggaccttttctgacacttgtttcagtctctcatgacataaagtgctgaaagaaatggtggcatattttgaaatgagagtttgagtcagctgagaccaaaaaaaaaagtggtagagcagcagactgacagcagtaccacagaaaaggaacaggtgtagcaagtgatttctgactcctacaaaataacaagagtaaactctgttaattaaaaattaaacacaaaatttcagacagcacatatcctaagaaaatgtgtgagaaactcccataatcaccagcyaaaacaattgttttcagactatgccaggacagaacaacattataaagattttgacaggtagctttttttaatgtccaaatcacaatcaaagataaaatatacaaaatagggcaatatgatcccagcaaaaatattataaaattttctgaaagaaagcataaaaaaaatcagaggtataaattacttttaataattggtaataaattgaatagttctcattgattaaaataggaacagagacaactatggaaattcagaaaaatgaggacaagaacaaaaatatttaagatttcaaaaaaacaaaaattgtggaggtaaaaaaatttaaaaaaaactaatagatcctaaaagtaagaaaatatgatgtaaaaataaagaagtacaacaaactagtatcacagaaagatatttataacaaacatgtatatagccacaatttctagtcaaagacaaaaagattatctttgaagctgcaagataaaagtgatgtgccaggccaggcatggtggctcctgcctgtaatccaggcactttgggaggcagaggtggacggatcacctgaggtcaggagttcaaggccagcctgaacaagatggtgaaaccctgtctctaccaaaacgacaaaaattagctgggtgtggtggcacatgcctgtaataccagctactcaggaggctgaggctggagaaccacttgaacctgggaagtggaggttgcagtgagttgaagtcataccactatgctccagcctggctgggggatagagagacgtttagtctcaaaaaaagaactatgttatggagtcatgaaaaagttgttaaaaaaaatacctattaagtgagaattataccatcagtgaatctatcctgccaaataaaaaaaaaaaaaccttccaaagtaatgaaattctaaaaaagtatattggaactgcatatgccctacatataaaaggtgctaacaacagttccttttactgaaaataacatgattcaaaaagctacacataattatataaaaatacattattttctagaaaaaatatgcaaattcactttgtagaatttattagcattatcctagtgacgcagaaaacatttttaattattctctgaaatttgaacaataaaagaatagaaa

SEQ ID NO: 668374 - DNA, 1729 bp, Homo sapiens
ttacctttaaaattataccaaatacataaacaagagggcattgcaaaataccacaggctctaattcatttatagatatataaatgtaactaaaatatacagacccaaatacatctgtaaaaaatttataaataagtgtgtgcagtgttccaggtgagcacaaaggaaaaaaggaagtgttaaattcacccaacacagcttttcctgctttccactataacgcagtaccttcagaagtaaattcctaactcttggtttctgttttaaaagaaagctaaaatactggcacattcgttgttatttctgacttttagggaccttttctgacacttgtttcagtctctcatgacataaagtgctgaaagaaatggtggcatattttgaaatgagagtttgagtcagctgagaccaaaaaaaaaagtggtagagcagcagactgacagcagtaccacagaaaaggaacaggtgtagcaagtgatttctgactcctacaaaataacaagagtaaactctgttaattaaaaattaaacacaaaatttcagacagcacatatcctaagaaaatgtgtgagaaactcccataatcaccagccaaaacaattrttttcagactatgccaggacagaacaacattataaagattttgacaggtagctttttttaatgtccaaatcacaatcaaagataaaatatacaaaatagggcaatatgatcccagcaaaaatattataaaattttctgaaagaaagcataaaaaaaatcagaggtataaattacttttaataattggtaataaattgaatagttctcattgattaaaataggaacagagacaactatggaaattcagaaaaatgaggacaagaacaaaaatatttaagatttcaaaaaaacaaaaattgtggaggtaaaaaaatttaaaaaaaactaatagatcctaaaagtaagaaaatatgatgtaaaaataaagaagtacaacaaactagtatcacagaaagatatttataacaaacatgtatatagccacaatttctagtcaaagacaaaaagattatctttgaagctgcaagataaaagtgatgtgccaggccaggcatggtggctcctgcctgtaatccaggcactttgggaggcagaggtggacggatcacctgaggtcaggagttcaaggccagcctgaacaagatggtgaaaccctgtctctaccaaaacgacaaaaattagctgggtgtggtggcacatgcctgtaataccagctactcaggaggctgaggctggagaaccacttgaacctgggaagtggaggttgcagtgagttgaagtcataccactatgctccagcctggctgggggatagagagacgtttagtctcaaaaaaagaactatgttatggagtcatgaaaaagttgttaaaaaaaatacctattaagtgagaattataccatcagtgaatctatcctgccaaataaaaaaaaaaaaaccttccaaagtaatgaaattctaaaaaagtatattggaactgcatatgccctacatataaaaggtgctaacaacagttccttttactgaaaataacatgattcaaaaagctacacataattatataaaaatacattattttctagaaaaaatatgcaaattcactttgtagaatttattagcattatcctagtgacgcagaaaacatttttaattattctctgaaatttgaacaataaaagaatagaaa

SEQ ID NO: 668375 - DNA, 608 bp, Homo sapiens
gggggatgagtccctacagaacaatccatttgttccttagggcaaagaaatactttcttgacattaataaaatttgattttatttctcatggaaatagttctagaaaataaaccagaaaacgggatctgggtgagggatcaacagcatcctctctgtagggatcgacacttaaataaattcaacctgactaccaagctggctgccatgatcatctttgagcctgtcgagaattaarcattactgccaggcacgatggctcacacctgtaatcccagcactttaggaagccgaggtgggtggatcactagaggtcaggagttcgagaccagcctggccaacatggtgaaaccccgtctctattaaaaatacaaaaattagctgggcatggtagcgggcacctgtaatcccagctactcaggaggctgaggcaggagaggcgcttgaaactgggaggcagaggatgcagtgagctgagaatcgcaccactgcactccagccagggtgacagagtgagactccgtctcaaaatataaaaaaagaattaagcattacttgcaccaaagaatatgaagttccagttaaacaggaggaatgagttttcaagatc

SEQ ID NO: 668376 - DNA, 604 bp, Homo sapiens
cgcagagggcccccacctctccgtgcctgcctcggtcatagtcagcgccccgcctcccgcccaagacccagccccagccacccccgtcgccaaaggagctggcctcggccctcaggcccccgacagccaggcttccccggctccggccccccaggtagagggaccccagcagcctgtgtccgcagcacagacccagcctcgcccctcctgcccgctctcccgctcctcgctctscgccctgcctgcgtctctgttctgctgacttggaacacagagctctccttcaccccccaagtgtctcctagtgatcatggatgcctgagaccagggccggccctgggggagcccacgcgctgcaggaatgcaagacacacacggaaggaaatctgttctttcctaaaattataattttcaaatctgaataagtaatacattcagataattcacatttcaaacggtacaaaaagatgcatagtggaaagcccccgtctcctgaaccgtggcctcctgttgtcctcccaaggtggtttcttgcatttgttatctggatagggaaacagaatcaaatagattcttttccttcaatttttacaaaaagggtagc

SEQ ID NO: 668377 - DNA, 644 bp, Homo sapiens
tatctgtcactgttataatcaagttcaatcacgtcagtcaagcaccagccccattccytgcccttagcggacaaggactcatccaggcattggatccccttaactcttctttaaccctcatgcaaattatctatttacccgatttgctctgagactagaatagtgaagtaagcttgtgggcaatggtcagggagctcccaggtcttcatgctgagctcactgagctccacctgccttgcagtgcaccatctcctctttcttctctgtagacacaggagctggccacaggcgatgcacacagtatacattttatggtatttattccttttggagcatcttttgaagtccttagtctcaggagaaggaattttcctttgcaacttggattttgtgtttgctccaggttacaggaggccaaaggaagacactcttccttccatctttagcatctccacgtgtatctgtttgctagcccggtgcctctccccttcccttagctggaccttttctgccttcctgggtaggcttctgagctaaatcttcccatctctctctgtgcattctggctggctgcaccaaaatataaaaatcttgatttaagtatttttgtattcaaggaccatacgcaagtgttcatttgaagg

SEQ ID NO: 668378 - DNA, 644 bp, Homo sapiens
tatctgtcactgttataatcaagttcaatcacgtcagtcaagcaccagccccattccttgcccttagcggacaaggactcatccaggcattggatccccttaactcttctttaaccctcatgcaaattatctatttacccsatttgctctgagactagaatagtgaagtaagcttgtgggcaatggtcagggagctcccaggtcttcatgctgagctcactgagctccacctgccttgcagtgcaccatctcctctttcttctctgtagacacaggagctggccacaggcgatgcacacagtatacattttatggtatttattccttttggagcatcttttgaagtccttagtctcaggagaaggaattttcctttgcaacttggattttgtgtttgctccaggttacaggaggccaaaggaagacactcttccttccatctttagcatctccacgtgtatctgtttgctagcccggtgcctctccccttcccttagctggaccttttctgccttcctgggtaggcttctgagctaaatcttcccatctctctctgtgcattctggctggctgcaccaaaatataaaaatcttgatttaagtatttttgtattcaaggaccatacgcaagtgttcatttgaagg

SEQ ID NO: 668379 - DNA, 671 bp, Homo sapiens
tgggggctgagcctctgccccactgccctgccctggcagtgaggtgcagcctgcagtgtgtgcacggccggttccgggaggaggagtgctcgtgcgtctgtgacatcggctacgggggagcccagtgtgccagtgagtcstgccccagggcccccaaagagccagctcctctcaagaccccccttcaatggggcatcagctcccaggagcccgctgtgtgcctctctttccaactcattcagtgacaacacgttgagatcttgaaactggccacagcatggatatttacaccaaagaaattggcaaatgctataaaccatggatttttttttttcttttgagagagagcaagctcaatattccaacttaccagctcgctcctgaccctcaccacccactcttttggagcaggtggccagaggaaggggcaccctgagcttagctccccggcagggcaggaaagggcagggattctgaagtccacacacaaactcaggctcccctaccccagccaaggtgcattttcccttccacacctgtgacctgaggatcgacggagactgcttcatggtgtcttcagaggcagacacctattacagagccaggatgaaatgtcaggtgacagtcacccctagcttcctaggaaccccctagggcctcaagtgagggtc

SEQ ID NO: 668380 - DNA, 693 bp, Homo sapiens
gctatgttgcccaggccagtcttgaactcctggcctccagtgaacctgctacctcagcctgtcaaagtgctgggattacaggcatgagccactgtgcctggcctaaactatccagaattttaaatctgtcccatgtcattgaacatttttctcaccctgttgcccaagctggagtgcagagatgtgatcacagctcactgcaacctctaccttttgaactcaagcgctcctctggccttagcctcccaagtagctgggactgcaggcatgtgctaccatgcctggctaattttgttgttgttgttggtagagatgggttctccctgtgttgaccaggctggtcgtaaacccctgtcctcaagcagtcctcagtcctcctaccttggcytcctaaagtgctgggattataagtgtgagccactgtgcccagcttgtttccatcttttggtgttagaaacagtattaaatgagaaaccctgacctcgtattcacagatgacgtcaatctacctaatagcattttgcatccatcctgcaggctggctgctggctctaccaggttctgtgctggcatcctgagcactgccaggcacttgaccattgagcagaagatggcagactactcaaacaaactctactatcagttagagcaagaaacagggatccaaacaggtaagcaagtgtcttccattta

SEQ ID NO: 668381 - DNA, 693 bp, Homo sapiens
gctatgttgcccaggccagtcttgaactcctggcctccagtgaacctgctacctcagcctgtcaaagtgctgggattacaggcatgagccactgtgcctggcctaaactatccagaattttaaatctgtcccatgtcattgaacatttttctcaccctgttgcccaagctggagtgcagagatgtgatcacagctcactgcaacctctaccttttgaactcaagcgctcctctggccttagcctcccaagtagctgggactgcaggcatgtgctaccatgcctggctaattttgttgttgttgttggtagagatgggttctccctgtgttgaccaggctggtcgtaaacccctgtcctcaagcagtcctcagtcctcctaccttggcctcctaaagtgctgggattataagtgtgagccactgtgcccagcttgtttccatcttttggtgttagaaacagtattaaatgagaaaccctgacctcgtattcacagatgacgtcaatctacctaatagcattttgcatccatcctgcaggctggctgctggctctaccaggttctgtgctggcatcctgagcactgccaggcacttgaccattgagcagaagatggcagactactcaaacaaactctacyatcagttagagcaagaaacagggatccaaacaggtaagcaagtgtcttccattta

SEQ ID NO: 668382 - DNA, 660 bp, Homo sapiens
caagtccaggctgatactgcattgggatcggtgttgatattcacagttagggagggggtaaatattgggggtcaggatgggggatggggctcaggakgggggatggggctcagtgttgaggtgagaggagtcacaggattgggttcgggtttggggtcagggtcaggtcaaagttggatctggtgtcagagctgaggccaggtcacccaagctgggcaaggcagtctgattgaaagcatctctcacccagggaggttgcttcccggctggggtcccaggctgacccatgagggctcaggaagtctggaaagggaagagggaggttactattcctcctggcctccaggtgtcctccgcctcccccctggactgttgccatcctcacacacacccattgtcctggcgaccggctgggtcagctcttcatcctcgttctcataagactcagctgtggcagaagagagagaactccagggaccccttctaggagtgtcacagcgctgcaattacacctaagtctctgaggtcccacaaaggccccaagttaccgttggagaaggagtcttcatcctcaggacccaggggctcatcctcagggttctcgtagccgctgccatctggtggagaaggaggggtgtccatgggagtccacaggccacc

SEQ ID NO: 668383 - DNA, 585 bp, Homo sapiens
caccagcagtattccctgtattctttgtcaggagtatttttctatcagttccaagggctagaaataatgtttccaccctcactttgtacctgtgtggcttagaggcattctacacattaatatggccaggaagtccctcatcgtctgccacctcatctctgtgtgaagccagtccacactgccagaaataacattcaagttcctctgtgatggcattggactgagaaaccctggaaggggcccatcctgccctgtgcatcccatctgccttcctgggctttgaaagagctccattcaggatggaaattgggagactgggaactctatttcatgttattaatatcgaagctacactcaataaccccgaccctggcttctggtttgcgcatgtttgctttttaatatatttttgcacaactggctttaaaacaaatgggtttgggtttgacaatgaacctaatctcagcacaagaactcaggaatgtctgcaggctstttcaggagagagagagaaagacggagctgtatctatgggcaatcccagcctgccttttgttacttcctgattttagaaaggaagagacg

SEQ ID NO: 668384 - DNA, 585 bp, Homo sapiens
caccagcagtattccctgtattctttgtcaggagtatttttctatcagttccaagggctagaaataatgtttccaccctcactttgtacctgtgtggcttagaggcattctacacattaatatggccaggaagtccctcatcgtctgccacctcatctctgtgtgaagccagtccacactgccagaaataacattcaagttcctctgtgatggcattggactgagaaaccctggaaggggcccatcctgccctgtgcatcccatctgccttcctgggctttgaaagagctccattcaggatggaaattgggagactgggaactctatttcatgttattaatatcgaagctacactcaataaccccgaccctggcttctggtttgcgcatgtttgctttttaatatatttttgcacaactggctttaaaacaaatgggtttgggtttgacaatgaacctaatctcagcacaagaactcaggaatgtctgcaggctgtttcaggagagagagagaaagacggagctgtatctatgggcaatcccagcctgccytttgttacttcctgattttagaaaggaagagacg

SEQ ID NO: 668385 - DNA, 921 bp, Homo sapiens
aatagaagagagttgggcaggtcaaaatggaaaggaggcagtttagaaatgtgtcatgtgtaggcagattgccaaaggccttggtcgtcaacaccaaaaacttatgctgtgtgcttaatgaggaatcagtggggagtttggaggcaggagagtcttatctgcagatttgcaatggaaggggattcctgcggctgtttgctgacaggtcatgggagttgggtagaaatgcattggggctgcccccaaagaatccagagaggagactactgtgataatccagttaagaaacaaagcatccatggcagcaggaatgccctggcagaaaatgcaggcgatrcccttcctcactgtagcctgtacattctgagcccttgtgttaaaccctggcacttattccacagcaatcaagtagagcgacatggtaaaaaatcctctgccagataaagatttcagatgaaaaagaaatttaagcctcttttcttttaccaatgttgcctgttggaaaatgcctgtccagccaaaattcaatttctgtccttttaattcaagtgcaaatggattgaaggctcagataacaacataaaattggttaatcaactttcatcccatatttatattgcaacggggagattttacagttttctgcagctcagcccggtgttctgtgaaagccagccagcattttatgtcccttaaaattgcaaaccagaggcccctctgctgtcagtgacccaccacccctcctgctaaccagctctcttgcctgtctgaccagggccagtcagtgcagttctcattctgaatgcgtgaggccctgcaggaatagattttatgctttacttgagaaatgaaaattgctttttgctctcatcgccccatcaccatggagggatgccagtgaagtcatagcatgagcgaaat

SEQ ID NO: 668386 - DNA, 628 bp, Homo sapiens
catcctaaatgaggctttttaatttttcatgatttattcttttttaaacataacactttcatataatgcctttatgcctttgaaaaataaaacaacaggccaagtgccattgctcattcttgtaatcccagcactttgggagactgaggcaggaggatcacttgagggcaggagtttgagaccagcccggcctacataatgagaccctgtctctacaaaaacttaaaaaacaaattagccagacatggtagtgtgcacgtgtagttccagctccttgtggggaccaaggtgggaggatcacttgagcccaggagtttgagaccagcctgggcaacatagcaagactctgtctgtacaaaaaatacaaaaattatccaggcatggtggtgcatgcctgtagtccckgctactcaggaggctgaagcaggaggactgcttaagcccaggagttggaggccacagtgagctatgatcatgccattgcactccagcctgggcgacagagcaagactctgtctctaaaataaaataaaacaacaacaacaacaaaaacccctccaagctcctctggttagtgctgttaaatagtaaccaccgtctggggaactgcatgtcctgtcagataccc

SEQ ID NO: 668387 - DNA, 782 bp, Homo sapiens
agcaaccacattctgcctgctttttaagaactattttttattctcctcatttataaaacattatatattaattgtagataatttggaaatgcagaaaaatagagggaaaaaaatcatccataatctacccactctatcctccccctaaaacaagtggtaccaataagcatattttggtgacacttcttcccgcctgtcttctgttaatagatgaacattcacgatgtattctgtatgtatatttagtacaaccatgtcatgtttaaaacatcctgaatattatcattaaatatgcctctaagcatggtttttattgtatatattgcattgtattacctcctctgggttggatatttatattgttttcaaagtttttgacaccttcaataaggctttagttaatatgcttgtatataaatctttatgcatatctcagattatttccttggcataaaattgaaagtctggtcttgattcttttttgtatatgaaaaagtctgcccttacgctctttgctggtaccakccttgtctgttttgtctgtcttagttcataagctgaatgttcttgtttacctgcctctttgccaacaggttggtcaaagtcactctgtacggatctcagataaaattgtacaacattgaaactgctgtgccatcagtattgaaacctgacctcattgatgtgtaagtctagagtttgatgtttgtgcatttttaggaaaggccttgcccccaatctccaaataatttgattgagaaaaaggaacagtagtggctgcc

SEQ ID NO: 668388 - DNA, 2087 bp, Homo sapiens
ccccatctctactaaaaatacaaaaattggccaggcatgatggtgcacgcctgtagtcccagccactcgggaagctgaggcaggakaatcacttgaatccaggaggtagaagttgcaatgagtgagattgagccactgcactctagcctgggcgatagagaaagactatctcaaaaaaaaaaaaaaaaaaaaaaggaaaggatttggtgtgagctgaatgtattctgttttgaatttgatttttattattattatttttttttagacagagtttcgctcttgttgcccaggctggagtgcagtggcatgatcgtggctcactgcaacctctgcatcccaggttcaagcaattctcctgcctcagcctcccgagtacctgggattacaggcatgcgaccacacccagctaattttttgtatttagtagagagggggtttcaccatgttggtcaggctggttttgaactcccaacctcaggtgatctgcccaccttggcctcccaaggtactgggattacagtcgtgcaccaccgcacccagtgatgcggaattgtttcttagctggttatggaatatgaatgggtaagatacctctcctctttgggctcagtttcctcatctgtgaaatgggcatgataattgtactgaacattcctcacaaagtgatgtgaggaacaagtgagagcacagaaaagtgcttaatgcagggtttggcacagagtgaaggacagtaagacagactgtagtttcctcctttctaaggtgcaaaacttagtttgtttttctagggaattattctgaacaccactctgctattgtatccaaaggtgatttttctgttgggaaggtcacacagggctcaatatcctgaattgcccagcagccagtggtgaaaaactcagcatattgttgtcctgatttcctcccattcagaggcccctgcaagtggtgactggctagatgattcacagatccctcccagaaatttcattttgaccttaaatgtgtgaaaattccattcctagcaagtggagcacattgctttgagaaagaaagctgaatgtattttgtttggaatcctctgctattggttcacaccaaaggacccaaaatgcgcacccatcatctgcagaatatgggcttgctagaacatgttatgagatctcatactcctgtgtttcctgatatttacagaacatacctccgttcgcatccttcactgctgacaacctgaaacatcctcaatcacactcgttattttctacaacgatcatggccatggccagcatcaccttcctcttggcataggatagagggaaggaggagggctggtgttgtccatagagagccttcatgctaagtaaagggtggcacctgtcctttaagcagacacagcccctgccagagcgtgtgacttggagaacacaaacgggctcccactcatccactccacagctctagcagaccctgcaaacagcatggcctttggagttaggtggagtcagagtctgctttaaatctagtccctgatatttactgtttactagctgtggctctgggccaggtacttaacctctctgagcctcggtttcctcatttgattgtcatgcccatttcatatgattgttatcatatgattatctctcattgttgaaatgagatagaatattttaaaactctgtgtatttgaattaacataaatatacccaaagacacactctgctattaaaagtggttggaaattaggggcagcatcataaggcagaaagaaagaactttaattctttttttggtggtggtttctttaaacacttctgttttgtttgaacctgtttttatgcacatttattacgtcttttttaaatgatatttttattttgaaataattttagatttacagaacagatacaaaaatagtacagagattctgtatattcctcacccagttcccactaatgtgatcatcttatataaccatggaacacttgtcaaaactaagaagcccatattagtttattactgctaattaaacaccagacttcattaggatttcactggtttatctactaacatcctttttttgttca

SEQ ID NO: 668389 - DNA, 2441 bp, Homo sapiens
gaagaacccaaaacaacagatattcactgcaaagcccggagggccaatttgagaacagcaattggtactgggaaggttcttgcccacttcagtaaatggggcccacaggaaggtctgaaggggctggaacaatttagcattaatgaactctcaaaactgatcccgtagggttccctcccaggacaagactccaaagtgaggaggaactgcagggagcagaaaaaaaattgaacaggatagggacaacagaagtgatgaagagagccaggcacggtggttcaggcctgtaatcccagcacttcaggaggccgaggcaggtggatcacttgaggtcgggagttcaagaccagcctgggcaacatggtgaaaccccgtctctactaaaaggacaaaaaaattagccgggcatcatggtgcatgcctgtaatcccagctacttgggaggctgaggcacaagaatcacttgaacccaggcagcaaggttgcagggagccaagatcacaccactgcaccccagcctgggtgacacagcaagactccgtctcaattagaaaagaaaaaaacccatggaatattgttcccatgagaacttccttaggaatctgctggaaaatgaggctcagacaaccaaaatgactagggagatattaacacaagactagcggtgagcattaagtatgtctttattgtttatataatgaagattaaaaggacagtgtagtaagcaatgacagacaggtatttaaataacttacctgaccattgggagggatgaagaaacttcagagccacattgcaattaaaaagctgtctagcaaaaaagagaaaactgcggctacagttgcaggctctataaccccaccatttctgctctgatccataccagaaaatggatgcttcatggaccgtctctctctcaatttaagtcaattccaaatccaaatctcaccgattaatggacattaattcctatctggaatcctaactgtaaaggaattggagaaaatgcagtatttagcttttgagtttcacaaatatgggaaggcacactagaaggaggtgcagtagaggttgagcaagtctatctacaattaccaaaaggaacttccttagggaggaacagacatcttccaaaaacctactacaaatttgctacttgtcagtgaaatgtaaggatttaacatcagtcacaagagaagtctgatgtatctattaaacattatactgaatgttctaagtacaataaaataaggaagtataaacattggaaagaaacaaatgattcattactgttactattcaaaagtgatgtgactgtctacatagaaaaatctaaaataatctataggccccagaattattaagaaagtttggcaagccttctgaatgtaagataaatatacagaagtcaattacactccaatgtatcagtaataggaaattagaataaattggatgcaggggctcatgcctataatccctgctttataaaaaaattttaagagatattagaataagtaattttaaaaataccccttagacacaaatctagcaaaagatgtataagaacactattttaaaaatcataaaattttccagcctggacatggtgaaaccctatctctactaaaaaatacaaaaattagcagggcatggtggcacatgcctgtagtcccagccactcaggaggctaaggcacgagaattgcttgaagccaggaggtggaagttgcagcgagctgagatcataccactgcactccagcctgggtgacagggtgagactctgtctcaaaaaacaacaacaaaaatacaaatcataaaatcttaaaaacatttggggtgtaatttagcaacttctagtaagtttgaaaatgcataccttacagcccaataattaaaatcctaggtttatacctaaaaacactctcccagattggacaagaaggtaagtaagaacgttcattgaagtttacaatagcaaagactggatatctaagtgaccatctacggggaaatacataaaccgtggtataggcctacaacaaaatgctatatagcaggcaaaacaaataaacaagaacctcatttatcaacatagtattttttttttwaaaaaaaaaggtacgctaccaaaggctacacacatcatgacgcctcctaagtaaaatgactaaacatgcaaaataaaatatggctatggatactgacatacatacattttatatatatatatatatatatgtatgaaatcatgcatatatatatatgtatgaaatcatgcatgagaatgaaatatatcaaagtcagggtagtagttaccaccaataaagaaataagtggaacgggcttggggtgacaaacacaggaggctttacccacttttgtattattatttttttaaacctgtattttttaaaagtatgacttagatagcagctat

SEQ ID NO: 668390 - DNA, 2441 bp, Homo sapiens
gaagaacccaaaacaacagatattcactgcaaagcccggagggccaatttgagaacagcaattggtactgggaaggttcttgcccacttcagtaaatggggcccacaggaaggtctgaaggggctggaacaatttagcattaatgaactctcaaaactgatcccgtagggttccctcccaggacaagactccaaagtgaggaggaactgcagggagcagaaaaaaaattgaacaggatagggacaacagaagtgatgaagagagccaggcacggtggttcaggcctgtaatcccagcacttcaggaggccgaggcaggtggatcacttgaggtcgggagttcaagaccagcctgggcaacatggtgaaaccccgtctctactaaaaggacaaaaaaattagccgggcatcatggtgcatgcctgtaatcccagctacttgggaggctgaggcacaagaatcacttgaacccaggcagcaaggttgcagggagccaagatcacaccactgcaccccagcctgggtgacacagcaagactccgtctcaattagaaaagaaaaaaacccatggaatattgttcccatgagaacttccttaggaatctgctggaaaatgaggctcagacaaccaaaatgactagggagatattaacacaagactagcggtgagcattaagtatgtctttattgtttatataatgaagattaaaaggacagtgtagtaagcaatgacagacaggtatttaaataacttacctgaccattgggagggatgaagaaacttcagagccacattgcaattaaaaagctgtctagcaaaaaagagaaaactgcggctacagttgcaggctctataaccccaccatttctgctctgatccataccagaaaatggatgcttcatggaccgtctctctctcaatttaagtcaattccaaatccaaatctcaccgattaatggacattaattcctatctggaatcctaactgtaaaggaattggagaaaatgcagtatttagcttttgagtttcacaaatatgggaaggcacactagaaggaggtgcagtagaggttgagcaagtctatctacaattaccaaaaggaacttccttagggaggaacagacatcttccaaaaacctactacaaatttgctacttgtcagtgaaatgtaaggatttaacatcagtcacaagagaagtctgatgtatctattaaacattatactgaatgttctaagtacaataaaataaggaagtataaacattggaaagaaacaaatgattcattactgttactattcaaaagtgatgtgactgtctacatagaaaaatctaaaataatctataggccccagaattattaagaaagtttggcaagccttctgaatgtaagataaatatacagaagtcaattacactccaatgtatcagtaataggaaattagaataaattggatgcaggggctcatgcctataatccctgctttataaaaaaattttaagagatattagaataagtaattttaaaaataccccttagacacaaatctagcaaaagatgtataagaacactattttaaaaatcataaaattttccagcctggacatggtgaaaccctatctctactaaaaaatacaaaaattagcagggcatggtggcacatgcctgtagtcccagccactcaggaggctaaggcacgagaattgcttgaagccaggaggtggaagttgcagcgagctgagatcataccactgcactccagcctgggtgacagggtgagactctgtctcaaaaaacaacaacaaaaatacaaatcataaaatcttaaaaacatttggggtgtaatttagcaacttctagtaagtttgaaaatgcataccttacagcccaataattaaaatcctaggtttatacctaaaaacactctcccagattggacaagaaggtaagtaagaacgttcattgaagtttacaatagcaaagactggatatctaagtgaccatctacggggaaatacataaaccgtggtataggcctacaacaaaatgctatatagcaggcaaaacaaataaacaagaacctcatttatcaacatagtattttttttttawaaaaaaaaggtacgctaccaaaggctacacacatcatgacgcctcctaagtaaaatgactaaacatgcaaaataaaatatggctatggatactgacatacatacattttatatatatatatatatatatgtatgaaatcatgcatatatatatatgtatgaaatcatgcatgagaatgaaatatatcaaagtcagggtagtagttaccaccaataaagaaataagtggaacgggcttggggtgacaaacacaggaggctttacccacttttgtattattatttttttaaacctgtattttttaaaagtatgacttagatagcagctat

SEQ ID NO: 668391 - DNA, 3250 bp, Homo sapiens
tccatgtcttctagaaactgaccaagaagagtcgtaggaaatgcaagatcagctacccaaaatggctccaaactctgcaaccacccttggaatcgtataagaaattgtgaaagggtaggggggagaaaaaacaccaaaaaatccaaattaaaaaaatataagaggctcgttttaaaaagtatctggttttcaagcagcataccctaaaacatgtcctatatcataaaattaagactgctaaacatgctgatcacgattaaccaatacctctttaatacctctttaatttctgcagaaattaacttgtaaatgttatttccttactttttcagtaaatttcatatctatattgtcactacacatgacttaagactaaaatgccacaatctaccattggcctggctaatcccagggccacatctaaccattaaaggtgtatactcatctcctcagtgaaaatgaaacagaccactatcacctgaatatcctattttcaaaagtttattacaccaagtaagttacgagaaactatgacacttgaaacaagctgaaatgtgcaaatgagccacgctagtcattcacttaaatccaaaaaaatgggaaacaaaaccatttctcatttatgacaattctccaaattaaccctatatttccttttttaaaaaaataaccagaaaaacaataaaatgtgacaaataacttggatcttccattgtccacttcagggtattgccactgcaatatattcttaccatatactttcctaccagtacaaactacaaataacttgggtaagtcctgtctgtacttactctacccacctactagtaatttcctctgaaaatatatatttagctaacaagtcacgttcatttacaataaaacatttctctgaattagttttcttgcattattaaagaaatggtattggccgggcgcggtggctcacgcctgtaatcccagcactttgggaggccgaggcgggtggatcatgaggtcaggagatcaagaccatcctggctaacaaggtgaaaccccgtctctactaaaaatacaaaaaattagccgggcgcggtggcgggcgcctgtagtcccagctactcgggaggctgaggcaggagaatggcgtgaacccgggaagcggagcttgcagtgagccgagattgcgccactgcagtccgcagtccggcctgggcgacagagcgagactccgtctcaaaaaaaaaaaaaaagaaatggtattgatagatggtcactgggggaccactgctcctccccgacagtatttaaataactggtataggctgcaagacttaccagatacctgctgcgtgagcgaaggtttctgagtatgatctctatgccatccaactaatatatcaactgtatccttgatggaaacaaagagagagggggccaatcattttaagatattactgccattcacctgtggaccatttcacagcaaaagatcctaaaaggagcatctatgttctacctacttgacattctagaaacttagaaaggggagaggggcaggaaaataaaagaactacatttctgacaacaatgaaatagtttattttcttcaaatattttaaggtacgaacgtcagaaagaaaaatgcggcatttaaccctggaacctcaaatatcactgattatattcaaaggagcagaggcattgttttccatctgattcctcagttcctcacacacacaaccatccccctcaccccatgatctgaacaacggaatgaggaactcaccctaaaattagygctgaaaatatgagggtaacatcgagccaccaaaagaatgcacttaacacatttgcaaagcaattctggtgtatccacattttcaagaattgactgcaggctggtcattacaagcttaaaaataaaagttacaaaccgtgaacattcaacaaaatagggagaaaacaagcaaattaggttcattatttactgactacataaaaaactgagtatgagaccaagaaaaatagattctgtagttttagttaaaaaaaaaaaaaaattcacttgtaaatcccaactgcttgggaggctgagacacaagaatcgcttgaacccaggaggcagaggttgcagtgagctgagattgcaccgctgcactccagcctggacaatacagccagagtccatctcaaaaaaaataataattaataaataaataaataaattgaaaatatttcgctccactaagatgttaagctaaaaacaaatactgctttctcctcttcaatgtttgttaatattagtcctttgacatcagttaacattagtccttaataacatctgtttacaatatccctaaatgctctctttaagattctacctgtgattaaatttcaaatacaaaaaagtaaaatggatttgggaaacttttctataaagtacaacaattactttgcaatccaaaatataaagcaaattttatataatttatgctttagtatattagtacttgcttcatattaaaattaaagaagatcagtatggcaccacacatgaataacatgcaggctcaggttaccattatacataaatttttaaaataaatatatggcaaaaataaaataataaataactatttgtcattccattgaaagaatatttattttgcagctgttaaaaaacatttttccctaaaaaaggaaaagctgcgctttacatagcaatcttataaaagaaatgctagaatcagaaaaccatcattttacgctgggtgcagtggctcacacctgtaaccccagcactttgggaggacgaggcaggtggatcacctgaggtcaggagttcaagaccagcttggccagcatgatgaactccgtctctactaaaaatataaaaattaacagagcacagtggcacatgcctgtaatcccagctactcaggaggctgaagcaagagaactgcttgaacctgggaggcggaggttgcagtgagccgagatcgcgccactgccctccagcttggacaatagagcaagattacatctcaaaaaaaaaaaaaaagagaaaaagaaaaccattattttgcaatagccaatgttataatctacacaggcacagactatcaatgctaaaaatcatttaaaagacatcttaagggtaattacagaaatttgaatatagaacacatatgtaataaaattcattttcttaggtatgattacaatattcttgttatacagaagaaaaaccttattcttgggagatgca

SEQ ID NO: 668392 - DNA, 1350 bp, Homo sapiens
tctccctaatgtggttatcttcattttactataggtatgtcagccaggtaattgtctgtgacatggcagttaagaggaagtggcatttcctgtgcaattgctggctggctgtggacctcggagactgtgagcttgaccgggtcttcatcccagtttcaaagagagagctcttttcctttaggtactgttggaaaattactattaacagtgaatattgatgttcactattaattgaattgttcacgattgaattgtttttaatgcaaattaacattttattaatgtattatttcaaacatacataagcattactgttgtggttgtaactggtgtaaccattaccttaaaaatcagaaggaagacaaaaagagattcgaagtataaaaattataaatattgcccttattttctgaaactgtttacctagagaatcatttataaatttactaagatatctaggaataaaagaatcactcagatcaatggaatataaaaaggataccactacttcgatgatacaaatatttatgagaacaaaatataaaaataaaggaaagtattagagggctgtagccttcaactgactttcaaagacactagtaaactggccaggcaccgtgactcatgtttgcaatccctgcactttgggaggctgaggcaggcagatcacttgaggtcaggagttcaagaccagcctagccaacatagcaagacctactaaaaatacaaaaattagccaggcgtggtggtgcacacctgtgatcccagctactcgggaggctaaggtaggagaactgcttgaacctgggaggcagaggttgcagtgagccaagattgccactgcactccagcctgggcaacggagcgaaactccatctcaaaaaatgcaaagatgttagtaaaccaaaataattaaagcaatgtactggtgaattcacagaccaggagaacggtataatatacgtatcaacttctgtatctttctaggtatccatgtatctttctatgtctcctgaatgctaaagatgagaatattcctaggagaatatacctctgctatctgacctccttcttaccttcagctttctggttcaatattacggctctcggctttttcctcatgggaacaagatgattgcaagaggcccacacaccatgtcctagccgggcatggtggctcacacctgtaatcccagcactttgggaggccgaggtggacaaatcacttgaggccaggagtttgagaccagcctggccaacatagcaaaaccccatctctaccaaagtacaaaaattagccagacktggtagcatgagactgtagtcccagctacttggaaggctgaatca

SEQ ID NO: 668393 - DNA, 1988 bp, Homo sapiens
tgaatttatatgagtgcctagaacagtgccaggcgtggaattagcactatataagggttaggcattattattattcactcatgcctgcagataatgcaagtcgctgactgggtgtcttttctgcaccaggagaggagattgggcagtgagttgaatagatctttccgtgccctgcataagaaaacagtttcagtatcattggctgtgatgaggactttcagaggaggctgcgggagcctcagatagaaactgagacagctgtgtaggtgcagcctgagtaggacttgcaagggagcggggtgggaagggtgtgtggcaggacagacaacagcccagatggtctgaggatatggctggagccatatgggatctgggaaggagaggggcggcagcagagagcgaaggataagtctgcatttgtcctagggtagttaggaactactgaagggttttaactggtgggctctcctccttagacagaaccccttgtctgcagtgatttagagtggggcgtttggtgagaccaaaggcagagaaaccaataagaagacaattactttaggccaggcgcagtggctcaggcctgtaatcccagcactttgagaggacgaggtgggcggatctcaggagttccagaccagcctggccaacttggcaaaaccccgtctctactaaaaatacaaaaatcagccgggtgttgtggctggcgcctgtaatcccagctactcgcgaggctgaggcaggagaatcgctcgaacccgggaggaggaggttgcagtgagccgatatcccgccactgctctccatcctgggcaacaagagcaaaactccgttgcaaaaaaaaaaaaaattatccaggcaggaggcgctggaagggacacgtttcagtgtgtgcacgtgcatatgtgtgtagtgtgtatttgtactaattgcaattttctttaccatggttatatatttcctaaatatgttcaataaaaagtgctaagtgaagcaagtgacatctttggaggctatctttatttatttatttggagatggggtctcgctctgttgctcaagctgtaatacagtcgctccatagtagctcactgcagcctccgacttaaatgatcctcccacctcagcctctcaagtagccgagactgtaagtgtgcaccactacccccagggtgattttttccccctcaggcaatccttttgccacagcctcccaaagtgctgggattacagacgtaacccaccgtgcctggcctatttttcttagagccggggtctcgctatgttgcccaggctggtctcaaattcctggcctcagcctcctgagttgttggggttacaggagtgagccactgggcctggcggctgtctttaaacttggaggttagccaggtgcagtggctcatgcttgtaatcccagcactttgggaggccaaggcgggcagatgacctgaggtcaggagttcgagaccagcctggccaatatggtgaaactctgtctttactaaaaatacaaaaattagccggatgtggtggcatgcacctgtaatccctgctactcgggaggctgaggcagaagaatcgcttgaacccgggaggcggaggttgcagtgagccaagatcgtgccaatgcactccagcctgggcgacagagagaggctccgtctcaaaaataaataaataaataataaataataaacttgaaggtgaaaaaaataaataataaataataataaatataaacttggagggaggacgcctcaccgtgactggcctgcctgagcaattgggggcagaccacgggaaaggggcgccctgcatctctgggtttcctctttgacccccacccacaccattcccacccgttctttcccaacgtcctggartacagccaggcggcggcagccccaaggcagccacggctggagcccgtggtaaaagggagcgggaagggtgctcctggcggggaggacaggctgcgcaaagca

SEQ ID NO: 668394 - DNA, 619 bp, Homo sapiens
agccactgtgaagcaaacctcagttaggactagagaactggcataggcatccacaccgccgagcctaattagggggctctttcaccccctgggatgggaacagccctgttagggctgagaggcacaggcactttggaactctacaggtttggagtttaggtgagaagaggaatctctgagacctgacttgggtttctggggaagtggcaggcttccagcagggacccagcgagcctgcacagggtagggctcccagtcagaattccggcattaagtgactggcatgcaaattgaatgcaaagtaattcctgggacggatattatgtcttgatgataagagatgcactaatgagtcaggaatacgggaggcaggcccatcctggagggtgcagacgggtggagcaggggagtgacaagtaggggcattcccacgaggctgggacaggggtcccatcagaccaacagggctaaaagctcaggccctggcttgcgaatcgcaagtctgccacttgcctgtagttacagagcaaggaagtctyttaacctctctggaactttggttaccttcagtaatgaggggaacaaaattcaatttcaaaagctactgtgaggatttgat

SEQ ID NO: 668395 - DNA, 619 bp, Homo sapiens
tggctttggtctaactttgcttctcttgcagagaaaccccgttcaccaaggccatggaagtggaggctgcagaggcccggtccccagcccccggctacaagcgctcgggccgccgctacaagtgcstgtcctgtaccaagacatttccaaacgcgcccagggcagcgcgccacgctgccacacatgggccggcagactgctctgaagaggtggccgaggtgaagccaaagccagagacagaagctaaggcagaggaagccagtggggagaaggtgtcaggctccgcggccaagcctaggccctatgcgtgtccgctatgccccaaggcctacaagacggcacccgagctgcgcagccacgggcgcagccacacgggggagaagccctttccgtgccccgagtgcggccgccgcttcatgcagcccgtgtgcctgcgcgtgcacctggcctcgcacgctggcgaactgcccttccgctgtgcgcactgcccgaaggcctatggcgcgctctccaagctcaagatccaccagcgtggccacacaggcgagcggccttacgcctgcgccgactgcggcaagagctttgctgacccttcagtgttccgcaagcaccggcgtac

SEQ ID NO: 668396 - DNA, 620 bp, Homo sapiens
gcatgcaacataattgatccagtattatacattttcaggtacttgtctctcctctcccttctaattcagcagcattcamtgagcacctactatattccaggcagtgttccaagggatgccttggagacagtgttcctgccctcaagggctcacaggctggttaatggatacattatagcctactgaaatgagttccacttgtcatcttaaatggtgccatttaattatttattttctgcagaaacctgctagagtgtgtccctgactgggcctgtgaagcaaagaagatagaagtattagatgtgagctataatcttctcacagaggttcccgtgaggtatgtgtgcctggatgcatatattatgtatatactaacatttacgtgtgtgcgtatttaaatttttttctagatttgggttgccttttatttgttcagtgtgttgagtacctgctgagcatgaggcagtgtgatgtgctgtaaggaacatagtaaaggctaaagcatgggcttggcttgcaaggaacttaatgagaagatagtgtaacatatgtggataactgtgatgaaataaatacactaagagttgctgccataggttggtgacatgatagtaataata

SEQ ID NO: 668397 - DNA, 1168 bp, Homo sapiens
ctagttagtggtaaagcaagcatcaagactaatcccccaacttgaggccactccttttctagccactttttgtacattaggtaacaggaagatgttcctgcccacaagatccaacagcccttgaaacacactgaggcagatcaggcttagttatagcaggagtagttatcttcttgagccattgcctttcctggtattcctggtatcggtttcatttctcaccagtcatctggcagtggaccgtgtcggccttctgtactctgtggctgctgtagaatagcacttccttggcagctgctcagtcttggtgcattatagtattctgttgtttctttttcagcaaactaaataaattggagcaattggaggaactgaacctaagtggcaacaagcttaaaaccattcccacaaccatagcaaactgtaaaaggctgcacacccttgttgcacactccaacaacatcagcattttcccagaaatactgcagttgcctcagatccaggtacttctgtgtgctggaatgatgtccttattgggggaaatggcaggagagtgaatgacattattttcyttttataaagaagaagaaaggagtgtgaatgagattattcttataaggaaaaatattattgtcttcttatgtgctccagtttgggaccagaatttatgtaatggattcctgggaagaaattaagttcctctttggggatatagtaagagattggacacttgggagtaaagaactaagtctctgtgatgtattttcttttgatttctcaattttttcttagtttgtagacctaagttgcaacgacttgacagaaatcctgattccagaggctttgcctgctacattacaagaccttgacctgactggaaatacaaatctggttctggaacacaagacactggacatatttaggtaggaaaaaatttgaaatggaatctctatgtgctcttagcccaccagccatgtgtaggtcttccttagtactgtggagatcttgattaattaaaagaacagaatgaagttaggctataaagcccctaggttctcttctttgattaagttatgaatagatgttctatccagtagtcaacctgtttatattaggactactccatggctactaccccccaacatactgaatattttcacaacaggca

SEQ ID NO: 668398 - DNA, 2374 bp, Homo sapiens
gtccagccagctccctctgcgtctctctagcctcattgtccatgactcccctgttactcaccctgcaccaccactttctctcaggcctctagcccatcaaggcttcagcatgctattttcacagtttggaatctctgtccccccttctgcccaaaacctcatctttccaactcaaattaaatgccacttctccagtgaagactcctttaacccgtatcctcactccaagctattctccatgcacttttcctttatggaacttactctaatagcaattgaaatattaatttctataataatttgcttcacgtctatctgtgacactaaactctaagctccatgacagtggagtctgtatctatcttcttgacccctacatctgtaggacatagaacgtttaacctgtagtagatactcagtaaatatgtgtgaatccattactgtatgcatctgatagaaaaaccagcaatggtttctgtaaaggtcatcttttttattgagatggagtcttgctctgtcgcccaggctggagtgcagtggcrtgatttcagctcactgcaagctccaactcccaggttcaggccattctcttgccttagcctcccgagtagctgggacaacaggcacccaccaccatgcccagctaatttttttgtatttttagtagagatggggtttcaccatgttagctaggatggtctctatctcctgacctcgtgatccacccgcctcggcctcccaaagtgctgggattacaggtgtgagccaccgcgcctggctgtaggtgatcttttggtgttcctgtgtttgtttttagctatagccactgtttggctatattttgtttgtgggctagacatgggattaacaaggaaaacaaggtgtgacaccaggaactgagtcaattagtaaacactgagcagctaccaaaacatagtcaactaggacatgaaccaaatttccattagctggtgaatagatatgcaaaatgtggcatagtccatgtgaataatggaatattattcatccacaaaaaggaatgaagtgctggtacatgctataacatggctgaaccttgacgacattatgctaagtgaaagaagtcagatacaaaagaccacatattatgtgattccacttttatgaagtgtctggtatagacagatccatagaggtgaaaggtagattagtgattgccaagggctggaacagagagaaatgggagtaactgctaatgggatagggcataaggtttccttctgggatgataacaaggttctgaaattggatagtggtgatggttgtatcatttgtgaatataataaaagccactgaattgtactcttgaaaaggatgcattttatggtatgtgaattatatttcaattaagaaaaacacaatcaacaatgtgttactataaaaataataggacattgtggtccagaggtcggctgatagattggaccatggtttggactctagattattctgaatgtcagaatggcaagaatgcagaatgatttcccaggaacctaggtgtatttgcttggtggcttcctctgtgagtacaaatgacagcctttcttgatgaatgctaagaactagagtggggttcaggttttaaccattcacaagtgaaggaacactaagttccaacgaaatgaaaatgactgagttaatggccatggtttaaacggttatgcaaagctcaaaacaaacaggatgatgttatttgctaagcttcatgaggaagtggcccgcaagcatttcaatcagcaaacagatgaagattctatttcttttttaacctttagagctctgatgtggaatgagtggctgtaactctgaaagctcaactggtctttccagaacccatgagaaaaatatcagacaaacccaaattcaagaatattctacaccaaagctgccaaggtcatgaaaaacaaagtctaagaaactgtcacagaccagaggggactaaggagacatgaccaccaaatataatgtgatatcccagatgggatcttggaacagagaaaggttgttagtaggagaaactagtgagatctgaataaagtgtggagtttagttaatattaacgggccaatgtttgtttcttagttgtgactaagaatttaccatggtaaatataatatgtttgaaaagggagaaactgggtgagaggtatgtgggaactctactatctgcagcttttctgaaaatctcttttttttttcatttgagatagagtttcactccattgcccaggctgaagtgcagtggcatgatctcaactcactgcaacctctgcctcccaggttcaagtggttctcctgcctcaacctccagtgtagctgggattacatgcatgtgc

SEQ ID NO: 668399 - DNA, 1089 bp, Homo sapiens
tgaggcaaggtctcattctgtcacccaggctggagtgcaatggcatgatcacagctctctgcagccttgacctcctgggttcaggtgatcttcctacctcagcctcccaagtagctgggactataggctcatgccaccatgcctggctagtttttgtatctttttgtatagacggggtttcactatgttgcccaagctggtcttgaattccttagctcaagtgatccatccaccttggcctcccgaaaggctgggattaccaaaggtgtgagccaccatgcccagccccaaaatattctttaaacatgtaatcatacaaaattatatgagatattaacattctttttttatactaagtcttcaaaacctgatgtgtattttacaacacatcttaattcagaccagtcacatttcaagtattcaacggccacttatgactagtagctacaatattagacagtgcaactatagaccacgtttactctccatttttttagcaactcccaaaccagctttatacgtaytgtaataaacatagaaaacatttggaagggtacacaagaaatgactaaaaatgatttttttatataaaatgagaatgcagggagggaaggtgatcagggtttaattcacgtacatctctatttgaatttattatataaggatatatcatatttactaaaaatgtaaaagagaaatgcttattctttgcaacacagtccttgtatagaaatctgtcttaaggaaataatcaaatatgtaaactaacatttatgacaaggatgcccttggcccaagacgtgaataattttttctagtgtatccatgctatagacgttacctgccattactgtataagaaaaaacatagtgtacctagggctcagtactacccatggtttcagacatccataatttcaggcatccactggaggtcttggagtgtgctccctgtggataaggggggactactgtattcaaccccactggaggcttgactccctgaaaagtgaatggagaagaacaaactgatgtgaaaaatctttgtcttccaacaaataaacagacaggatctgagccctggggagat

SEQ ID NO: 668400 - DNA, 1032 bp, Homo sapiens
tgatagcttattttattatttattattttactgcaatcaatttattatttatttttattatggtgttgttggctctaaaacctgacttttgatgccacttttctagcttcagttctggcttcctttctcatagaatttaaacttaaaatatagcattttgcagctctaaaaccacatctgatccaccccagccacaggacacttcctctcggtgctggctgtccatgaagttgtcgttgtttcggtccaatgtagcctacaaacaccatttgtgttccaaaccccctaggggctcctgtatcgtgttgcacgcagcacaccatgacattaattcacactgccatggaagcaagattgagagtcagggctaagtgatttactcaacaagtatttgttgaacatcttctgtataatgagcactgtgctgggaatacagggtgagcaatgaaaccggcagtctagcaggggagaccagtgtcagcgccatacccatgcaagtgggtttataaatacaactgagaaaaacagcctgaaataaaggaacaggcatccatgagcctgtaaaccaaaggaacctgattttctttagtgggagagagaaatcttgtttgagagaaggatcctatggttgacatctgaaggacaagtcaaggtggaattatgcaacatgccaaaggagggaaaagggtcagcaagagcaaggacccaagggtgcattgaagctcagactctggggagtagacgctgagtagtgtagctaacagaaaataacatgatctgattcatacctctctttccatttagattcacataggctaagracaggatcttactatgaaaacagttgggtgccactggaagtcccaagcggaaaaatgaaatgaactaaattgcattttaaaaaatcactttggctgcaacttcaggagagaattggagggagccagggtagatctgaggagactaaatgcagtgcaatagaaggctattgacaacagatctctaagggtttttttctgcttttatattaga

SEQ ID NO: 668401 - DNA, 1538 bp, Homo sapiens
ggtctgaacgtctgccaaatgttttaaaagacaaggttataaataccccagcagcgagctttgttccttaatgtatggctctgttactctgagtcaacgtggaagataaatcagaacatagagctggcttgggcattaacttgatatttctggcaagaattcatatagtatctcatttcagagagcaaaagagaagtggttgtctgaggtaacattaagacagtaaaaaaaattagcttttataaaaagcaaaaagcagaattatagcttaactaaaacatcttaaatccaaatactcagtccaattttcttaccatcaaatttaagcttaaagagtcataatcatgtctgtggggttggtgattacaatctctggtccctggtactctagatttggaatagatacctctcaatttccttggtagtacatttctctgtcccaccccagcttggtttttctctatttcccagtaccctattctcaaatgttcctccacccaaaactgggcttgtccctgtttgactcagttcagggcccacttctatcatctctctgactctgctgtttctctgtaaataggaatttgctgaactgccctccactccccagcttttgacacagctggtcccatttgtcactgggctgacagctgaaaggaaccctttccatttctgcaacacaagatgcaccatgcctaacactactttgaaaggcggcctcttgggtgcataaattgcagcatggtataagaaaagccctttgcatgaactttccaggtcactcggataatgttcaataattcatgtctttctcatagtaagtgcacttagtatcccaaatggtttaatgtagcttccaaagagtccaggaactgcctggacttagctcatttwtgtagcaggatatgattaaggacagagagataaaagaggaatcaagagaacttcactaagactattttttccatttcctgaatgagaatattttttgtttttagtaatccatgtaagcttcagcttctctatatctaaaatgggaatactaacaaatctgacttgcttagaatattgatatggggcccaaatgatattaatgtaatgcgtaagaaagcatgcaagaccctgaaaaatgcccttactatttgtattaatgagctgggttttgctggcagaacaaaaaccctccgatctcaatggtttgcaaccagaatattgtctctcattcatgctacacgttgtggttgcatgccactctgcaccaaatgtcttcttcttcattccagagtcaaggctaaccctctacctgggatattattacctgatagtagagagaaaaagcaatagtagaacctcatgatggttcttgaaccttctgcccaaatgtggtgcatgtcacttctgcttagatttaatagccaaaacaattcatgttaccaaacctgacctcaattaaaagtgtacacccaacaggacggagccctatggaagagccctatggagagggactagtagagaggaccagtgaatatcttcagcaa

SEQ ID NO: 668402 - DNA, 593 bp, Homo sapiens
aaatatataaaaatgtccagcacaaagttggtgttttgtcaagaggaactgttgttactgttcagtaacacgtgaaatgtttggaaaacctgaaagggagtgttgggcatttgacagttatgggtagtggcacaccacccagagcagaaaaccccttgcccatggttctgtcatagtgaggggcaacagggcctgatgatggtggatatattcctagagtcctggaacttgccattcaggaagagccctgttccccagcagcttccctgtggggtggtgtcagaagcaggcctagctgttctcccacaaatcggtctggacagacttgcagcctctgggcagcccctgcctgttacagagcgcttcccaagattgaaaggtgctgagaaggcaggggagagtttcctgcagctcctctgggagagacaggggattggggcaggcaatagctcttgggtgggagtaggcaggagaactttcagtctgaagttagacagggaagccctgtgcatttctgacctcaagagccccattgttaktgcttctcattttgacacagatgtcccagtcaaggccactcctgtgcacagccc

SEQ ID NO: 668403 - DNA, 639 bp, Homo sapiens
ggaaatgacagggtcgagcctctccctattttagaagccctgctgggagactggcccttacgctggacagatttagccctcattgcacagatttgggtcccatgtctcttcttaaaccaatcactggttagggcagtgggtttacatgatgtgcttctgccaatcaagaggagatagggacaccaggacacagctcrgacttggccaacagggaagagagagaacaatggtggatggcttggccaccaacagtgtctgctccagccccaaaccatcaggaagaattggtactgagaagtaagaagggagggcgttctaggtggggagaaaagcatgagcagaggcacagaagcatgaagatacaaggtatgtccctcagacaagttggcggggttgatgagttgtatacagtgtggcatggaatgaaggccagaaagaaaccgtaattgctaaccttatttggggatcttcttggcttaccaggggtcttcagaccagtacttaaaaaccacagatctagaaggccaaccatctcaaggaaggaattcttgaagaactgtaagccttggccaattagactagataaagccactgttaatattcctctgagcacttccactttgggggaagatggaatgt

SEQ ID NO: 668404 - DNA, 639 bp, Homo sapiens
ggaaatgacagggtcgagcctctccctattttagaagccctgctgggagactggcccttacgctggacagatttagccctcattgcacagatttgggtcccatgtctcttcttaaaccaatcactggttagggcagtgggtttacatgatgtgcttctgccaatcaagaggagatagggacaccaggacacagctcagacttggccaacagggaagagagagaacaatggtggatggcttggycaccaacagtgtctgctccagccccaaaccatcaggaagaattggtactgagaagtaagaagggagggcgttctaggtggggagaaaagcatgagcagaggcacagaagcatgaagatacaaggtatgtccctcagacaagttggcggggttgatgagttgtatacagtgtggcatggaatgaaggccagaaagaaaccgtaattgctaaccttatttggggatcttcttggcttaccaggggtcttcagaccagtacttaaaaaccacagatctagaaggccaaccatctcaaggaaggaattcttgaagaactgtaagccttggccaattagactagataaagccactgttaatattcctctgagcacttccactttgggggaagatggaatgt

SEQ ID NO: 668405 - DNA, 1618 bp, Homo sapiens
aacaatttaaagtatactatagggctgggtacagtggctcacgcctgtaatcccagcacttgtgaaggccgaggcaggtggatcacctgaggccaggagttcaagaccagcctgactaacatggtgaaacccgatctctactgaaaatacaaatttgccgggcctggtggagcgtgcctgtaatcccagctactccagaggctgaggcaggagaactgcttgaatccaggaggtagaggttgcagtgagccgagatcgtgccattgcactccagcctgggcaacaagagcgaagctctgtctcaaaaaaaaaaaaaaaagtatactatacatacataaaacagtaacatagctgtttattctcttttatatgactggcagcatggtaggtttgtttacaccagcatcactgtgaacacacgagtggtgtgtgactgtatttatttttactctgggcaagttaatttctctgagtctcaagtaagtaaccaattagtaaaatgaagataataagaactaccttgcagggtaatgattaaatgagatattcatcaactcagcccttatcgttgagtgccttcagtgtgccagactcttttttggccactggagatagacagatttcttaccctcatttaatttattcacaagataaagatacacaaacaagcaattacattaggagaaaaccattacacaggaagtgcagtagagcataagagtctgagatggggaaagctatagagagggtgggggaggtgtctgagagttgaaggatgagaaagaatttgccagggggacgagctgggatagagaagtccacaacgaggcaacaggcactgagatgtgtgtgaatgcacttagcataatgcctggtgcacagcagatcatcaatacctcctgttgtcctcactcttatcctcttgtgttatgaaaaaaactcactctagaatccagaaagaaattttaaaaattgttgttgctggctgggcgcggtggctcatgcctgtaatcccggaactttaggaggtcgaggtaggtgggtcacctgaggtcaggagtttgagaccagcctggccaacatggtgaaactccgtctctactaaaaatacaaaaattagccgggagtggtggcaggctcctggtaatctcagctactcgggagtctgaggcaggagaatcacttgaacctgggaggtggaggttgcagtgagtcgagatcacaccattgcactccagcctgggctacagagtgagactttgtcttaaaaaaaaaaaaaaaaaaattgctgctgctaggaaagattagtggagctgggactcagaagttgcttgttcttttttcgaggctaagtcatctttggcagcaaagtgtattttaaattttggcggtttctttccccacaaacttttgattttgagaaatttcaagccaagaaacgttggtctcctttaatttagaacagtccccttacctgtagaatggcctgctctttggaattgtctgattgttaatttgagcttctttgatggcatmtgggagtcttctagcatggaaagtccttggacttttctccatctatacccactctttgggtgactgcatccagtcccaaggc

SEQ ID NO: 668406 - DNA, 607 bp, Homo sapiens
tgacgtctagacttaatttagataatccattatatttctgtccaataaaatgttatacacgtgtccatcaataccaaatragaattctttttctaaaaggtgttctctttattagtatgattatctgtaccttctatctaggctatttcagtttctagtttgttttttagatatatttttggtccatttgccaaacaatatatttgctagcagaaagatattcttagtgcccagattctgatgcttttatctgaataggtatgctaatttattgaagattttatatttgtttgttttattttgaaagacaaattatgctgacttttttcttctttgaaattttgttgttagctcatcaactttattttgctcaaattgagagtggcagttactactctttaattgcttgatttctttttggcacaataagggcagaataggataaatgtgttagatactgatttctagggaaaaccagctatttcctaaacatctttagatcagtggtcatcagagttactctgtaaaggaactcataataagtaacttaggcttcgcgagccatatagtctctgtcataatgcctgtactctgtcactgtagcact

SEQ ID NO: 668407 - DNA, 640 bp, Homo sapiens
ctgtgaggtggcagatctgggattcaagtcctcaggggccggctcccccatctgtactttgcatccctaaggccagtggtcctcaaacatcagtaggcaccagtgccacctgcagcacccacctggagctccagtagccggggtgggcctgagaatggtcattcctcacctgtccccaggtggtgccagtgctgctggccccaggccacccttcaagaactgctcctcatgggggctgagcagggtggatctgcttgtaatcccagcaccttgggaggccgaggctggaggatctcttgaggctaggagttcaagaccatcctggacaacacagcgagccctcatctctaaaagaaaaaaatacacacatgcaaacatacatatgtgcatacacagtgtgcaaacacacacacctaatgcacatacacatacatgcatatatacatgcatacatacacatacatacacgtacatacacttacatgcatacacgcctgcatatacacatgcacgcacacatrcatgcatatacacatgcatgcatacacagacatgcatacacacatgcatatacacatacatgctacacatacacatgcatatgcatatacatgcataaacatacacatgtataaactca

SEQ ID NO: 668408 - DNA, 640 bp, Homo sapiens
ctgtgaggtggcagatctgggattcaagtcctcaggggccggctcccccatctgtactttgcatccctaaggccagtggtcctcaaacatcagtaggcaccagtgccacctgcagcacccacctggagctccagtagccggggtgggcctgagaatggtcattcctcacctgtccccaggtggtgccagtgctgctggccccaggccacccttcaagaactgctcctcatgggggctgagcagggtggatctgcttgtaatcccagcaccttgggaggccgaggctggaggatctcttgaggctaggagttcaagaccatcctggacaacacagcgagccctcatctctaaaagaaaaaaatacacacatgcaaacatacatatgtgcatacacagtgtgcaaacacacacacctaatgcacatacacatacatgcatatatacatgcatacatacacatacatacacgtacatacacttacatgcatacacgcctgcatatacacatgcacgcacacatgcatgcatatacacatgcatgcatacacagacatgcatacacacatgcatatacacatacatgctacacatacacatgcatatgcatatacatgcataaacayacacatgtataaactca

SEQ ID NO: 668409 - DNA, 1006 bp, Homo sapiens
ctggtgtgtgcccgggtcccccttctacacagaggcagtcactccccagctgctgggagagctggtggctgatggtttgtgcccagctgagtccctctctgggcatggccccctagaccccctaccccacgggtcagcacacctccaaagactggtgaatatggagtacaaaagcccggcccccttttccccaggcaggacagctctrctgtgctacttgagctccagaactttccccagggatgactgaggcctttgttgcgactgcatctgcatcgcagctcaactcctctgcctggtcctgctgacctcactcccacgcaggtgctgcctccaagagcactccccaataaacctgctcactcgtccgtgggcttccctgggaacctgacttgttactcttctcaagccataaccctgtcattcgtccattcattcagtaaatatgtactgaacagctatgccccaggcattgttttgggatccagcagcaaccccagacagaccaggactgtttgtgtagggatactggccatcgagtttttagatttcaccaagactgaatctcatcatctccagccccaccatggccatgacactcctgggaggcctggctgcttcagctccctagagtggcccttagaaggtgtggacaggtgtggggacaggaagggagcagacccaggagcccaggtctgtggagtcaggcagacccaggttcgaattcagcttagtgcttttttgcatttccctagtgactaatgatattgagcatcttttcatgtgttcactggcttttgtatatggtgttagtccacttttgttgctataaaggaatacctgaggctaagtaactcataaagaaaagaggttcgggcgcagtggctcacacgtataaccccagcactttgggaggccaaggtgggtagatcacttgaggtcaggagttcaagaccaacctggccaacatggtaaaacctcgtctctactaaaaatacaaaaatta

SEQ ID NO: 668410 - DNA, 950 bp, Homo sapiens
aattagccaggcatagtggcaggcacctgtaatcccagctactcagaaggctgaggcacaagaatcacttaaactcaggaggtggaggctgcaatgagccgagattgygccactgcactccagcctgggcgacatagcaagactctgtctcaaaagaagaaaaaaaaaaagaacattactatgggcttttcttctttttctaggaaagtatgtgatggtgatgggagtggttcaggcctgcagccctgagccctgcctgcaggctgtgaagatgacagacctttctgataatcccatccatgaaagtatgtgggaactggaggtagaagatttacacaggaatattccttagagtatgttggaactgtcgttaaaaacaaccaaaatcccgaaactatttagaagcttataatgatgtggatttcatggacacttttcaatgcgtatttttcaaatgcttctcagagagccttgctttggttgaccaaggagtccggatgtaggaatgtttaaatcctcggatacttcagtgacacagcctctgctgccccttgctttgcctgtgtttgctgatgaaaagcagatgcttgtgtttcattttccttcctggtttgtgtgtgttaattctctctctctctctcagacacagaagtctcatgttgcattttccaaattttatgagtgatgatactttttccattactgctgcgtccctgttttacaatgcaaaatttaagtacggtcgttgcccatggtgattaaagtgtggttatgggcaggaagacagactgtgtaaaaaaggaatgacatcctggctcctcatcttcttcatcagcaactaccataaccagtttgcgagtcaaatggcatttcctaacggcaggcatggcggcccctgaaagacaacagctccctttctgcttcggacaccactcaaacatttagacgca

SEQ ID NO: 668411 - DNA, 950 bp, Homo sapiens
aattagccaggcatagtggcaggcacctgtaatcccagctactcagaaggctgaggcacaagaatcacttaaactcaggaggtggaggctgcaatgagccgagattgtgccactgcactccagcctgggcgacakagcaagactctgtctcaaaagaagaaaaaaaaaaagaacattactatgggcttttcttctttttctaggaaagtatgtgatggtgatgggagtggttcaggcctgcagccctgagccctgcctgcaggctgtgaagatgacagacctttctgataatcccatccatgaaagtatgtgggaactggaggtagaagatttacacaggaatattccttagagtatgttggaactgtcgttaaaaacaaccaaaatcccgaaactatttagaagcttataatgatgtggatttcatggacacttttcaatgcgtatttttcaaatgcttctcagagagccttgctttggttgaccaaggagtccggatgtaggaatgtttaaatcctcggatacttcagtgacacagcctctgctgccccttgctttgcctgtgtttgctgatgaaaagcagatgcttgtgtttcattttccttcctggtttgtgtgtgttaattctctctctctctctcagacacagaagtctcatgttgcattttccaaattttatgagtgatgatactttttccattactgctgcgtccctgttttacaatgcaaaatttaagtacggtcgttgcccatggtgattaaagtgtggttatgggcaggaagacagactgtgtaaaaaaggaatgacatcctggctcctcatcttcttcatcagcaactaccataaccagtttgcgagtcaaatggcatttcctaacggcaggcatggcggcccctgaaagacaacagctccctttctgcttcggacaccactcaaacatttagacgca

SEQ ID NO: 668412 - DNA, 950 bp, Homo sapiens
aattagccaggcatagtggcaggcacctgtaatcccagctactcagaaggctgaggcacaagaatcacttaaactcaggaggtggaggctgcaatgagccgagattgtgccactgcactccagcctgggcgacatagcaagactctgtctcaaaagaagaaaaaaaaaaagaayattactatgggcttttcttctttttctaggaaagtatgtgatggtgatgggagtggttcaggcctgcagccctgagccctgcctgcaggctgtgaagatgacagacctttctgataatcccatccatgaaagtatgtgggaactggaggtagaagatttacacaggaatattccttagagtatgttggaactgtcgttaaaaacaaccaaaatcccgaaactatttagaagcttataatgatgtggatttcatggacacttttcaatgcgtatttttcaaatgcttctcagagagccttgctttggttgaccaaggagtccggatgtaggaatgtttaaatcctcggatacttcagtgacacagcctctgctgccccttgctttgcctgtgtttgctgatgaaaagcagatgcttgtgtttcattttccttcctggtttgtgtgtgttaattctctctctctctctcagacacagaagtctcatgttgcattttccaaattttatgagtgatgatactttttccattactgctgcgtccctgttttacaatgcaaaatttaagtacggtcgttgcccatggtgattaaagtgtggttatgggcaggaagacagactgtgtaaaaaaggaatgacatcctggctcctcatcttcttcatcagcaactaccataaccagtttgcgagtcaaatggcatttcctaacggcaggcatggcggcccctgaaagacaacagctccctttctgcttcggacaccactcaaacatttagacgca

SEQ ID NO: 668413 - DNA, 950 bp, Homo sapiens
aattagccaggcatagtggcaggcacctgtaatcccagctactcagaaggctgaggcacaagaatcacttaaactcaggaggtggaggctgcaatgagccgagattgtgccactgcactccagcctgggcgacatagcaagactctgtctcaaaagaagaaaaaaaaaaagaacattactatgggcttttcttctttttctaggaaagtatgtgatggtgatgggagtggttcaggcctgcagccctgagccctgcctgcaggctgtgaagatgacagacctttctgataatcccatccatgaaagtatgtgggaactggaggtagaagatttacacaggaatattccttagagtatgttggaactgtcgttaaaaacaaccaaaatcccgaaactatttagaagcttataatgatgtggrtttcatggacacttttcaatgcgtatttttcaaatgcttctcagagagccttgctttggttgaccaaggagtccggatgtaggaatgtttaaatcctcggatacttcagtgacacagcctctgctgccccttgctttgcctgtgtttgctgatgaaaagcagatgcttgtgtttcattttccttcctggtttgtgtgtgttaattctctctctctctctcagacacagaagtctcatgttgcattttccaaattttatgagtgatgatactttttccattactgctgcgtccctgttttacaatgcaaaatttaagtacggtcgttgcccatggtgattaaagtgtggttatgggcaggaagacagactgtgtaaaaaaggaatgacatcctggctcctcatcttcttcatcagcaactaccataaccagtttgcgagtcaaatggcatttcctaacggcaggcatggcggcccctgaaagacaacagctccctttctgcttcggacaccactcaaacatttagacgca

SEQ ID NO: 668414 - DNA, 950 bp, Homo sapiens
aattagccaggcatagtggcaggcacctgtaatcccagctactcagaaggctgaggcacaagaatcacttaaactcaggaggtggaggctgcaatgagccgagattgtgccactgcactccagcctgggcgacatagcaagactctgtctcaaaagaagaaaaaaaaaaagaacattactatgggcttttcttctttttctaggaaagtatgtgatggtgatgggagtggttcaggcctgcagccctgagccctgcctgcaggctgtgaagatgacagacctttctgataatcccatccatgaaagtatgtgggaactggaggtagaagatttacacaggaatattccttagagtatgttggaactgtcgttaaaaacaaccaaaatcccgaaactatttagaagcttataatgatgtggatttcatggacacttttcaatgcgtatttttcaaatgcttctcagagagccttgctttggttgaccaaggagtccggatgtaggaatgtttaaatcctcggatacttcagtgacacagcctctgctgccccttgctttgcctgtgtttgctgatgaaaagcagatgcttgtgtttcattttccttcctggtttgtgtgtgttaattctctctctctctctcagacacagaagtctcatgttgcattttccaaattttatgagtgatgatactttttccattactgctgcgtccctgttttacaatgcaaaatttaagtacggtcrttgcccatggtgattaaagtgtggttatgggcaggaagacagactgtgtaaaaaaggaatgacatcctggctcctcatcttcttcatcagcaactaccataaccagtttgcgagtcaaatggcatttcctaacggcaggcatggcggcccctgaaagacaacagctccctttctgcttcggacaccactcaaacatttagacgca

SEQ ID NO: 668415 - DNA, 1404 bp, Homo sapiens
aagaagatggatctgtggcctctctgtactgttgagccaatgggaagcttaaaggcactttgtgattcacagattctgtcaaggcccctggatggccttgtctgtacaaagacacttcagaattcagtcagtgggtatgggacgcctcccaggatgcaaagagcttagatattggctttctagccatgggcattatgctaagggctgtgtgtgatgtacctcaaaaaatagccatttaagccatacttgggccctggcaacagagggtgcaaattcttgaaagaaattgttttgagaaggcagagcttgagttcaggcagaatttcttgcagggatcattctggttgcgtggcattttgatagactttgggcaactcagatacaggcagtgagagagggaagtaaataggaccttctkgcgagatgcctgagaaagacccagtgatgacttcatcagtagaccttttgattctgtttgcgtcattatttggtcattgtagagcaatggttcttaggctttaatctctaggtaaaacagaggtgtgtttagtctgtccatgttctctgttttctaagtaaggcaggaggtgaggtcctctgcaggaaataaaggtgatggactggttaggaaacttcaggagacttcagggtttggaacagttgcctatgtgggtggaataagaaataaactggggaagaatgagagaattgtctaacttcactgaaggcctggctgagatcaaagagaatttgcagggctgaccctcagagaagacatgcagtaactcttaaggaatatccgagaactatttttgatttgtgcttttaaaatatgatgctttaagatttgttttggcaagatatgaatggcaagataagaattcagaactagaggtcagccccctatctccaagtctgttatacttccatatgggaaagagaaatgaggacctgcttcttagggtttgaagtggaaactatacgacagaaggattttctaaagaactctcctcagattcttatattgacaaggcagccttggatatgggaccttagagaagcatgatattttaactttcttgttaatttttttaaaccagaagttaagaattttggtcattggctcatgcagtcaacaaatcattcatgaagtattaattaagcaagtaattcctggtgtgtgcctatctctgtgctggttgctatgggtcaaactcagataagatgactatccttggcattcttagcaatccaaagaattagtgaaatataaagcagtttgtcgtgcagttaaaaactgtggactctagactgtgagtgctaagggagtgagagaaataaaggtcattaaggggcttggctggtcagacctttgtggaaaaggcatgtcttcgtgtgggccat

SEQ ID NO: 668416 - DNA, 603 bp, Homo sapiens
ggggaattttcttccagcaagggatagaaatattcactaagaagtcttacatgttgaggtcagtatgtcttaggcaaataaactctgaccatacgaccaagttagaagtctcttccctcttatctgtccttttataaatgtattcttccatccaaaagtagcaactggagtctcccagttatctctctgttctgagcattcctgatttccatcttggagctagctacatattattgaatggttagtactaaaagycagatactgtgctaatatttttttctgataacaagtcctatgagatactttaaataatattatccctacttggttgatgataaaactgatatggtgagagcttaagtaaaaggctcagagtcatacaaagacagagctaggatatgaacctggagttgtcactctaaagccctagactctctcccatgacgatttcaactatgggatttctgcccctattacacaataagtagaaataagtctgcccaacatttctcctggcagtaagaacattttgctcacaattttgaacgaacaattattctgttttaaagtatccatgtgactcattccctcagctcctacatc

SEQ ID NO: 668417 - DNA, 657 bp, Homo sapiens
tgctgtataatctgtagcacgaatttactataatttattcscatgctcccttatcgatgggcatgtaaattgtgttaattttatatgatataatgagtatccttatatgtatatcttggcacagtttttcgagtgtatccataaagtttcttgcaatgaaattatagggcaacaagggtgtggtggctcttgtctgtaatttcaacactttgagaggctacggcaggaggattacttgaggccaggagtttgagaccagcgtggacaacatagtgagccctcacctctactaaaaattaaaaaaaaaaaaaagaaaaagtttggtatggtgatatgtacctgtagtcccagatacccaggaggctgaggtgggaggatcatttgaacctgggatgtcaaggctacagtgagctatgactgtgccactgcactgcagcctggatgacacagtgagaccctgtctcaaaaaaaaaaaaaaaaattacaggccaaatccatatgcttttaaaggatatttttgaattgttctcaaaaagaggcttcaccaaattaccatccagggtatacaagatacccatttctccatgtccttaccaacagtggctctcatcaagccttggtggaaatgctctcatactgatactttaacgactaaaa

SEQ ID NO: 668418 - DNA, 1001 bp, Homo sapiens
ccataggtgacattgccacggcaaaattattaataaccccctttcactcacccaaaaaattccaagttggacaatatattatatggccaccctaatattaacaaaagctctgaaaataatatcctgcctttctgcatatatataaagaatctcaaatctgctgagtagaggccagactctgcaaagccggctggtgcctgtgctttcaggggccactggagccttatcatatcagtttctggtaatcatgtgtaaagtgcattgcaaacggcgagcctaaaatcacctcccatatgcagccatcgactctgcctgcgcytaatcacagaaggctaccgcaagcccagagttttcaccagagtatcccccatcactctaaaatacagcagcctcaagaaatagcagttgttttctccagtttctataactgctgtgtattatgtgtcgcactgaaaattagaaagataggtactcctgaaaaatccaaagcttagattttttctcatttttactttcagttagaataacgagctctttcttccactccactgcataagagatgacaattaaaagctgactttttctctgcaaagtacttcactgttttcaacaccaagttttatgaaagagcaaaaaaaaagagattagtgtattgttctatatacataccatcacactgtccattttaatatttgaagccttaaagtaatgagtaggctttgcgttttgttttgtaaattctgaagcatttgtgtgtgtgcgtgtgtgtgcatatacatatgtctacatatggatagataaatggaataataaaatccatttaaataaaaagttagaagatatataaaaaagaataagacctgctctgtgttattcagacatttttaacctaataggggtggcaatgaacaaataattcaggacaagagaaaatgttaaactgtgcagattaaaagaccaaagctctatccaatagtgtcatatgatacagacatcaagga

SEQ ID NO: 668419 - DNA, 1001 bp, Homo sapiens
ccataggtgacattgccacggcaaaattattaataaccccctttcactcacccaaaaaattccaagttggacaatatattatatggccaccctaatattaacaaaagctctgaaaataatatcctgcctttctgcatatatataaagaatctcaaatctgctgagtagaggccagactctgcaaagccggctggtgcctgtgctttcaggggccactggagccttatcatatcagtttctggtaatcatgtgtaaagtgcattgcaaacggcgagcctaaaatcacctcccatatgcagccatcgactctgcctgcgcctaatcacagaaggctaccgcaagcccagagttttcaccagagtatcccccatcactctaaaatacagcagcctcaagaaatagcagttgttttctccagtttctataactgctgtgtattatgtgtcgcactgaaaattagaaagataggtactcctgaaaaatccaaagcttagattttttytcatttttactttcagttagaataacgagctctttcttccactccactgcataagagatgacaattaaaagctgactttttctctgcaaagtacttcactgttttcaacaccaagttttatgaaagagcaaaaaaaaagagattagtgtattgttctatatacataccatcacactgtccattttaatatttgaagccttaaagtaatgagtaggctttgcgttttgttttgtaaattctgaagcatttgtgtgtgtgcgtgtgtgtgcatatacatatgtctacatatggatagataaatggaataataaaatccatttaaataaaaagttagaagatatataaaaaagaataagacctgctctgtgttattcagacatttttaacctaataggggtggcaatgaacaaataattcaggacaagagaaaatgttaaactgtgcagattaaaagaccaaagctctatccaatagtgtcatatgatacagacatcaagga

SEQ ID NO: 668420 - DNA, 1001 bp, Homo sapiens
ccataggtgacattgccacggcaaaattattaataaccccctttcactcacccaaaaaattccaagttggacaatatattatatggccaccctaatattaacaaaagctctgaaaataatatcctgcctttctgcatatatataaagaatctcaaatctgctgagtagaggccagactctgcaaagccggctggtgcctgtgctttcaggggccactggagccttatcatatcagtttctggtaatcatgtgtaaagtgcattgcaaacggcgagcctaaaatcacctcccatatgcagccatcgactctgcctgcgcctaatcacagaaggctaccgcaagcccagagttttcaccagagtatcccccatcactctaaaatacagcagcctcaagaaatagcagttgttttctccagtttctataactgctgtgtattatgtgtcgcactgaaaattagaaagataggtactcctgaaaaatccaaagcttagattttttctcatttttactttcagttagaataacgagctctttcttccactccactgcataagagatgacaattaaaagctgactttttctctgcaaagtacttcastgttttcaacaccaagttttatgaaagagcaaaaaaaaagagattagtgtattgttctatatacataccatcacactgtccattttaatatttgaagccttaaagtaatgagtaggctttgcgttttgttttgtaaattctgaagcatttgtgtgtgtgcgtgtgtgtgcatatacatatgtctacatatggatagataaatggaataataaaatccatttaaataaaaagttagaagatatataaaaaagaataagacctgctctgtgttattcagacatttttaacctaataggggtggcaatgaacaaataattcaggacaagagaaaatgttaaactgtgcagattaaaagaccaaagctctatccaatagtgtcatatgatacagacatcaagga

SEQ ID NO: 668421 - DNA, 641 bp, Homo sapiens
ttccacaaaagaatagaatatgttaagagcgattaaattgtattctccccttctcctagcctctttcaaaagaagacgtaagacatctggtgtcaagaagaataaatacaataccattaaagaattataaacagaaccagagccagagaaggtaggaggaagaaaatgtactaaccattgagacaattgtagttgtcgtgatcttaacatgaaaactggcacaaagcctcttggcagcagggcaaaaggaaaatacgttcaatgatatagtcctgctattggaaaaaaggaagcattctgattttttgggaggataaagtcatatgtgggaccatatataaaagcacccaattttttttacatttccctaatagacaatgtccttggcaagcagttggggttatgcaatataaaatataggtgacctttgactttttcatctttagttctcatattgcctctacctctgaggcagttactttagctttcaatctgttccatctattgccatcgttctagtctgtgctcttgaccgctactaatgaggttacaattaacaacccaytggtctccttgcatccagttctcctgttcaccaacttaccttttacactgccaccagaaagatgttcctaaaccaa

SEQ ID NO: 668422 - DNA, 2454 bp, Homo sapiens
aggtttaatccaataagatggaagtcagagaaacaaaatgatccctgaggttaaaagcacagtcagaaggaacacctcgagaaaaaccctgcaactatgagcataggtgaaacctaagggcttcaggaaatagaaaatatctgccttcaaatagcttggatttaagagatgcaagtcagaatactcattaaactgctataattttagttcaacctcagtgactcaacacacacagtgataatcttctatgtttagttcagtccctagtgcacggatttcccagtgattacaatgccttttttgaaatttgtctagttggaatcccaaagaaaggtcataatgtgctaactctttcaaaatgggttttaacattgcgttattgtgatacctaacctccttgttcttttaaatattgtggcatagacaccttttttatcctgggctataatgggaaatatttttggagttaggctaggctggccaaccctcatattaaagcttaaagacaatgtaagtttaaaggaatgtaagcattaaggaaatataagccaagtccctcagctcatgccacaggagcattttccttccggtgctgtttcagttccttgagaagttaaacgtgctttgtttcaatattgtgatgtaaccttgtcatcagtaaaagcaatctttgatgtcagctcagtattccacatatctcatagtgctgaaaatgtccttggtgagcagctccccaggcctctgtgtggagtccctgagggatggaatgactgccatgcataaattggctctgctgaatggtaacacttctggcccatgtgggaaatgtggatacgtatcagcagtagtccttctgaggattgatatcctggactggtggaaggcggggatcttcccctcaatgtaatcttagctatatctgtcctggagtttatctatactcataattggaccagggtttgttttggggactaaagattggaacagaatgagaaatgttccaattttactggtggtgttttattatcactccatttattggtttgaaaagtgtcatcagtaaatcaactaatcccaggccagcttgaggatgtgatatatgaaacaatttagaaatcagcaaggtgcacctagaattatattaaatttaaattttactgtaaaactattatcctcyctaaacactcacttacaataaatacttacggggggacctgcatttactggtcactgagcataaaggcagattaggggaactagctataaatctggtaaataagatcatggaggccgggcgtggtggctcatgcctgtaatcccagcactttgggaggccgaggtggacagatcatgaggtcaggagatcgagactatcctggctaacatggtgaaaccccgtctctgctaaaaatacaaaaaattagcagggcacggtggcgggtgcctgtagtcccagctactcgggaggctgaggcaggagaatggtgtgaacctgggagacggagcttgcagtgagccgagatcgcgccactgcactccagcctgggtgacagagcaagactctgtctcaaaaaaaaaaaaaaagatcatggaagcccagatcgcctttgataatctagaagacccattcttctcaactttataattcaaggaaagcttaggaactttatagacgcaagttccttatcttgtttttttgtagataacacttgtgattaagaagttcaaattttaacacatctagtaaagattttctgacatcaaaatgttgatgctctgttgagcccttctcttcactaacttgttagacctaactcagtaagcctagagtaattcttcctcttttagacaacatacctctatgtcttcaaaaccacaaaccaggcagtttattgaatgtccccttaccctggccacttacaccacttgtttcattagcaaagggtaggctggaggttctcaagctaacacatgatgaaggagcaggaagcctttaaccatgactctgatatccttgaccactgttaagttttcttatcaccttgagaataaatctgtccagaaaatgatgtaggttcccactactgtcatctgtactgattcttccttagcctctgatttggtataacatgagtgaagatgcattgacctgagttaccaatgtctttactcaatttgttcttatttatttttattttttaaattttttgtagagacaggatttgctatgttgcccagactggtctcaaactcatggcctcaattgatcctctcacctcagcctcccaaagtgttgacattacaggcatgagccaccatgcccaacttgaatttgttctttaacaacaatatgatggtcagtttggtgcagacagttatgtgactcataaacatgaagtgagaaatggagctgtcttctgaacgtgattgtttctaacttatatcgtagtgact

SEQ ID NO: 668423 - DNA, 2454 bp, Homo sapiens
aggtttaatccaataagatggaagtcagagaaacaaaatgatccctgaggttaaaagcacagtcagaaggaacacctcgagaaaaaccctgcaactatgagcataggtgaaacctaagggcttcaggaaatagaaaatatctgccttcaaatagcttggatttaagagatgcaagtcagaatactcattaaactgctataattttagttcaacctcagtgactcaacacacacagtgataatcttctatgtttagttcagtccctagtgcacggatttcccagtgattacaatgccttttttgaaatttgtctagttggaatcccaaagaaaggtcataatgtgctaactctttcaaaatgggttttaacattgcgttattgtgatacctaacctccttgttcttttaaatattgtggcatagacaccttttttatcctgggctataatgggaaatatttttggagttaggctaggctggccaaccctcatattaaagcttaaagacaatgtaagtttaaaggaatgtaagcattaaggaaatataagccaagtccctcagctcatgccacaggagcattttccttccggtgctgtttcagttccttgagaagttaaacgtgctttgtttcaatattgtgatgtaaccttgtcatcagtaaaagcaatctttgatgtcagctcagtattccacatatctcatagtgctgaaaatgtccttggtgagcagctccccaggcctctgtgtggagtccctgagggatggaatgactgccatgcataaattggctctgctgaatggtaacacttctggcccatgtgggaaatgtggatacgtatcagcagtagtccttctgaggattgatatcctggactggtggaaggcggggatcttcccctcaatgtaatcttagctatatctgtcctggagtttatctatactcataattggaccagggtttgttttggggactaaagattggaacagaatgagaaatgttccaattttactggtggtgttttattatcactccatttattggtttgaaaagtgtcatcagtaaatcaactaatcccaggccagcttgaggatgtgatatatgaaacaatttagaaatcagcaaggtgcacctagaattatattaaatttaaattttactgtaaaactattatcctctctaaacactcacttacaataaatacttacggggggacctgcatttactggtcactgagcataaaggcagattaggggaactagctataaatctggtaaataagatcatggaggccgggcgtggtggctcatgcctgtaatcccagcactttgggaggccgaggtggacagatcatgaggtcaggagatcgagactatcctggctaacatggtgaaaccccgtctctgctaaaaatacaaaaaattagcmgggcacggtggcgggtgcctgtagtcccagctactcgggaggctgaggcaggagaatggtgtgaacctgggagacggagcttgcagtgagccgagatcgcgccactgcactccagcctgggtgacagagcaagactctgtctcaaaaaaaaaaaaaaagatcatggaagcccagatcgcctttgataatctagaagacccattcttctcaactttataattcaaggaaagcttaggaactttatagacgcaagttccttatcttgtttttttgtagataacacttgtgattaagaagttcaaattttaacacatctagtaaagattttctgacatcaaaatgttgatgctctgttgagcccttctcttcactaacttgttagacctaactcagtaagcctagagtaattcttcctcttttagacaacatacctctatgtcttcaaaaccacaaaccaggcagtttattgaatgtccccttaccctggccacttacaccacttgtttcattagcaaagggtaggctggaggttctcaagctaacacatgatgaaggagcaggaagcctttaaccatgactctgatatccttgaccactgttaagttttcttatcaccttgagaataaatctgtccagaaaatgatgtaggttcccactactgtcatctgtactgattcttccttagcctctgatttggtataacatgagtgaagatgcattgacctgagttaccaatgtctttactcaatttgttcttatttatttttattttttaaattttttgtagagacaggatttgctatgttgcccagactggtctcaaactcatggcctcaattgatcctctcacctcagcctcccaaagtgttgacattacaggcatgagccaccatgcccaacttgaatttgttctttaacaacaatatgatggtcagtttggtgcagacagttatgtgactcataaacatgaagtgagaaatggagctgtcttctgaacgtgattgtttctaacttatatcgtagtgact

SEQ ID NO: 668424 - DNA, 692 bp, Homo sapiens
catgctaakcactgatgaatcccctaatgattttggtaaaaatcattaagttaaggtggatacacatcttgtcatatgatcaaatggtttcgcgaaaaatcaataatcagacaacaagatgtgcgaactcgatattttacacgactctctttaccaattctgccccgaattacacttaaaacgactcaacagcttaacgttggcttgccacgcattacttgactgtaaaactctcactcttaccgaacttggccgtaacctgccaaccaaagcgagaacaaaacataacatcaaacgaatcgaccgattgttaggtaatcgtcacctccacaaagagcgactcgctgtataccgttggcatgctagctttatctgttcgggcaatacgatgcccattgtacttgttgactggtctgatattcgtgagcaaaaacgacttatggtattgcgagcttcagtcgcactacacggtcgttctgttactctttatgagaaagcgttcccgctttcagagcaatgttcaaagaaagctcatgaccaatttctagccgaccttgcgagcattctaccgagtaacaccacaccgctcattgtcagtgatgctggctttaaagtgccatggtataaatccgttgagaagctgggttggtactggttaagtcgagtaagaggaaaagtacaatatgcagacc

SEQ ID NO: 668425 - DNA, 625 bp, Homo sapiens
tccttttgccttacctacaaacaaccttatgttaccaaatttcgctttaggaaatatttaattattcatatcaaaattagaatttaaactcattctttattaaactctgtgttaactatattggtgtttacatgtcttctggcttttattataaagcaacttgatgatggcttcacacaagcccctgtaccttcctccctatgattccctaaagcaattacaagaaaaagtaccactttgtctcaacctaacatcattttttgcaaagtcccagggataaatgattaatgttagcattagatggggagacatctaccccaacctccctctgataccttcctttctataagayaaaaccaggactgttcatatgatacccacagaattaagataaaattggtggtcaaagaaggaagtctggctaaagactttagtgaagacactttggttgaagaaatgggacaaatagggccattccatgccaatgccaatagtttccctggtgctccagtcactgcggtgacagcactgcaatggtattaggaccctcagaaccataggcagtgcttttaagacaggtgtgccggttaatggctgttaattgcataagacacttaaaagtaat

SEQ ID NO: 668426 - DNA, 608 bp, Homo sapiens
cactatatatatacacacatatatacacacacacatatatatacacatacatcatgggatactacatatatatacacacggaataattcacacacatacgtgtatatatatatatatacgacgacacatgtgtatgtatacacacacacacacacaatggaatactacatatatatacacacatggaatatacatatatatacacacacaccatggaatactactcagccataaaaaggaatgaaataatggcattcacagcaacctggatggaattggagattactattctaagtgaagtaactcaggaatggaaaactaaacgtcatatgttctcactcataagtgggagctaagttatgaggatgcaaaggcagactcaggggtaagtgtgggaggggggtaagggataagactacacactgggtacagtgtacactactcaggtgatgcgtgcaccaaaaactcagaaatcaccactgaagaacttattcatgtaagcaaacaccacctgttccctaaaaatttattgaaataraaaagaaaaatatatgattcttcaaagatttagtacaaaataaaagtaatttttctattaattacaggtt

SEQ ID NO: 668427 - DNA, 2333 bp, Homo sapiens
  misc_feature 705, 706, 707, 708, 709, 710, 711, 712, 713, 714, 715, 716,717, 718, 719, 720, 721, 722, 723, 724, 725, 726, 727, 728,729, 730, 731, 732, 733, 734, 735, 736, 737, 738, 739, 740,741, 742, 743, 744, 745, 746, 747, 748, 749, 750, 751: n = A,T,C or G
  misc_feature 752, 753, 754, 755, 756, 757, 758, 759, 760, 761, 762, 763,764, 765, 766, 767, 768, 769, 770, 771, 772, 773, 774, 775,776, 777, 778, 779, 780, 781, 782, 783, 784, 785, 786, 787,788, 789, 790, 791, 792, 793, 794, 795, 796, 797, 798: n = A,T,C or G
  misc_feature 799, 800, 801, 802, 803, 804: n = A,T,C or G
ctctcttacaattttctaagagttgttcttagtattctcaccacacacatacagggcaaccatgtgtagtgaaaggtgtgttaatttgattggtgatcattacactgtgtatacaaatatcaaatcattacattgtacaccttaaatagatacaatttttatatgtcaactatacctcaataagctgagaggaaaaaaagaaagacatcaaggaaaaaacccacaagggtgaacttgtgagaggtggaaggaaactaaagccaaagcaagatcttgaagagcctgtgtggcattcctacctacagcaccaaaggctttataaaggcctgcatgtgggagggaggtaaataatttttagtctccttggctccacttgcttcaaaacattcttcagagtatttctaaagtaacttctggctgggttcagtggctcacacctgtaatctcagcactttgggaggccaaggcaggagaacagcttgaagccagcagttcaaagccagcctgggcaacataatgagacctgcctctacagaaaataataataattagcaaggcagggtggctgatgcttgtagtcccagctactcgcgaggctgaggcaggaggatcacttgagcccaggagctctgaggctgcagtgagctatgattgcaccactgcactgcagccttgggcaatagagtgataccctgtcaggaaggnnnnnnnnnnnnnnnnnnnnnnnnnnnnnnnnnnnnnnnnnnnnnnnnnnnnnnnnnnnnnnnnnnnnnnnnnnnnnnnnnnnnnnnnnnnnnnnnnnnnggtgcacatgtgtagtcccagctacttgagaggctgagatgagaggattgcttgaggccagggggcgaaggttgcagtgagccgagatcacaccactgcactccagcctgggcgacagagcgagagtccatctcaaaaaacaaaaaacaaaaaacaaaaaaaaaaatttacagtgaaatgtgaggttttcacaaataaccctgagaaacaaaaatcaacttaatagaatcctaaatttgttatgccatcatgaatttctgcctccatgggggaatgctatgtgagttagatctgtcagagagatatcaggcacctgggctttctggcattctgcccttgagagaatcatgaacctttcagtattagagaagaatccttagagatagttttttcactgaacatttcttgaacttctatttttgaacatttcctagaaattaatagaatgaagcttaaaaagattaagtgactgcgtacatggccacagaattgggaacagtagtctttggcttcaaactcaagatttctagcttataggtacttacttaccaaacactaaggaatcaggtgtatcatgcatcatgtcaggtgctgagggtacagaaatgcctacaacacagtgcctgcctttcagaatattgttgggagagctgaattgcagtggcccagactgctcctgatgggtatgtcaagaatgcaaggctctgactgctctttgtctgaatttctcatagttgtgtttccagcaagcaaccctgagggatgaggtaatatctcccccagggttgcttctacttactcaaggaacttactcttactgaaaaaggaacactgagctgagggcatgcactcagctcagtgttcctttctggtaacaaaggaacactcagctcagtgttccttccctgtaataaagcccacagcatgtacaggactctttgaattaccactctgagacgggggcaatgaggaaccaacaaaaattaacatgaagtttgactactccttttgccagagacaccttttgtctctggcccaggtgtctcatgtcttctgctagcacccatgaaacagtaacaggctaacctgttagcttacagataaggtggaatctcagaccctgcatagttattggcaaatatctcttgtgaggtgatatagatgtgaggaaaccaacaaatayagttcagtgtgacaggtacagagtgctgtgggatacagaatgctgtgggataacccaggaaaggttcagctggtcaaggtcaaggaggcttttctgattccactgctcttgaggtgaaaatattggttggttcatctcttgagggtagatcttttcattgttagtgtatgacacaggacatggcacatggttcatgatgacagagcttgctgaatgagtgaatgaactgttatttgtggttattgggtgtgatttactgcatcaaaggtccctatgtttgctactaacgtttgtctcatttttaaagaccgaagtcctgggaagatgtttgttcttcaatgaaaag

SEQ ID NO: 668428 - DNA, 2333 bp, Homo sapiens
  misc_feature 705, 706, 707, 708, 709, 710, 711, 712, 713, 714, 715, 716,717, 718, 719, 720, 721, 722, 723, 724, 725, 726, 727, 728,729, 730, 731, 732, 733, 734, 735, 736, 737, 738, 739, 740,741, 742, 743, 744, 745, 746, 747, 748, 749, 750, 751: n = A,T,C or G
  misc_feature 752, 753, 754, 755, 756, 757, 758, 759, 760, 761, 762, 763,764, 765, 766, 767, 768, 769, 770, 771, 772, 773, 774, 775,776, 777, 778, 779, 780, 781, 782, 783, 784, 785, 786, 787,788, 789, 790, 791, 792, 793, 794, 795, 796, 797, 798: n = A,T,C or G
  misc_feature 799, 800, 801, 802, 803, 804: n = A,T,C or G
ctctcttacaattttctaagagttgttcttagtattctcaccacacacatacagggcaaccatgtgtagtgaaaggtgtgttaatttgattggtgatcattacactgtgtatacaaatatcaaatcattacattgtacaccttaaatagatacaatttttatatgtcaactatacctcaataagctgagaggaaaaaaagaaagacatcaaggaaaaaacccacaagggtgaacttgtgagaggtggaaggaaactaaagccaaagcaagatcttgaagagcctgtgtggcattcctacctacagcaccaaaggctttataaaggcctgcatgtgggagggaggtaaataatttttagtctccttggctccacttgcttcaaaacattcttcagagtatttctaaagtaacttctggctgggttcagtggctcacacctgtaatctcagcactttgggaggccaaggcaggagaacagcttgaagccagcagttcaaagccagcctgggcaacataatgagacctgcctctacagaaaataataataattagcaaggcagggtggctgatgcttgtagtcccagctactcgcgaggctgaggcaggaggatcacttgagcccaggagctctgaggctgcagtgagctatgattgcaccactgcactgcagccttgggcaatagagtgataccctgtcaggaaggnnnnnnnnnnnnnnnnnnnnnnnnnnnnnnnnnnnnnnnnnnnnnnnnnnnnnnnnnnnnnnnnnnnnnnnnnnnnnnnnnnnnnnnnnnnnnnnnnnnnggtgcacatgtgtagtcccagctacttgagaggctgagatgagaggattgcttgaggccagggggcgaaggttgcagtgagccgagatcacaccactgcactccagcctgggcgacagagcgagagtccatctcaaaaaacaaaaaacaaaaaacaaaaaaaaaaatttacagtgaaatgtgaggttttcacaaataaccctgagaaacaaaaatcaacttaatagaatcctaaatttgttatgccatcatgaatttctgcctccatgggggaatgctatgtgagttagatctgtcagagagatatcaggcacctgggctttctggcattctgcccttgagagaatcatgaacctttcagtattagagaagaatccttagagatagttttttcactgaacatttcttgaacttctatttttgaacatttcctagaaattaatagaatgaagcttaaaaagattaagtgactgcgtacatggccacagaattgggaacagtagtctttggcttcaaactcaagatttctagcttataggtacttacttaccaaacactaaggaatcaggtgtatcatgcatcatgtcaggtgctgagggtacagaaatgcctacaacacagtgcctgcctttcagaatattgttgggagagctgaattgcagtggcccagactgctcctgatgggtatgtcaagaatgcaaggctctgactgctctttgtctgaatttctcatagttgtgtttccagcaagcaaccctgagggatgaggtaatatctcccccagggttgcttctacttactcaaggaacttactcttactgaaaaaggaacactgagctgagggcatgcactcagctcagtgttcctttctggtaacaaaggaacactcagctcagtgttccttccctgtaataaagcccacagcatgtacaggactctttgaattaccactctgagacgggggcaatgaggaaccaacaaaaattaacatgaagtttgactactccttttgccagagacaccttttgtctctggcccaggtgtctcatgtcttctgctagcacccatgaaacagtaacaggctaacctgttagcttacagataaggtggaatctcagaccctgcatagttattggcaaatatctcttgtgaggtgatatagatgtgaggaaaccaacaaatacagttcagtgtgrcaggtacagagtgctgtgggatacagaatgctgtgggataacccaggaaaggttcagctggtcaaggtcaaggaggcttttctgattccactgctcttgaggtgaaaatattggttggttcatctcttgagggtagatcttttcattgttagtgtatgacacaggacatggcacatggttcatgatgacagagcttgctgaatgagtgaatgaactgttatttgtggttattgggtgtgatttactgcatcaaaggtccctatgtttgctactaacgtttgtctcatttttaaagaccgaagtcctgggaagatgtttgttcttcaatgaaaag

SEQ ID NO: 668429 - DNA, 2333 bp, Homo sapiens
  misc_feature 705, 706, 707, 708, 709, 710, 711, 712, 713, 714, 715, 716,717, 718, 719, 720, 721, 722, 723, 724, 725, 726, 727, 728,729, 730, 731, 732, 733, 734, 735, 736, 737, 738, 739, 740,741, 742, 743, 744, 745, 746, 747, 748, 749, 750, 751: n = A,T,C or G
  misc_feature 752, 753, 754, 755, 756, 757, 758, 759, 760, 761, 762, 763,764, 765, 766, 767, 768, 769, 770, 771, 772, 773, 774, 775,776, 777, 778, 779, 780, 781, 782, 783, 784, 785, 786, 787,788, 789, 790, 791, 792, 793, 794, 795, 796, 797, 798: n = A,T,C or G
  misc_feature 799, 800, 801, 802, 803, 804: n = A,T,C or G
ctctcttacaattttctaagagttgttcttagtattctcaccacacacatacagggcaaccatgtgtagtgaaaggtgtgttaatttgattggtgatcattacactgtgtatacaaatatcaaatcattacattgtacaccttaaatagatacaatttttatatgtcaactatacctcaataagctgagaggaaaaaaagaaagacatcaaggaaaaaacccacaagggtgaacttgtgagaggtggaaggaaactaaagccaaagcaagatcttgaagagcctgtgtggcattcctacctacagcaccaaaggctttataaaggcctgcatgtgggagggaggtaaataatttttagtctccttggctccacttgcttcaaaacattcttcagagtatttctaaagtaacttctggctgggttcagtggctcacacctgtaatctcagcactttgggaggccaaggcaggagaacagcttgaagccagcagttcaaagccagcctgggcaacataatgagacctgcctctacagaaaataataataattagcaaggcagggtggctgatgcttgtagtcccagctactcgcgaggctgaggcaggaggatcacttgagcccaggagctctgaggctgcagtgagctatgattgcaccactgcactgcagccttgggcaatagagtgataccctgtcaggaaggnnnnnnnnnnnnnnnnnnnnnnnnnnnnnnnnnnnnnnnnnnnnnnnnnnnnnnnnnnnnnnnnnnnnnnnnnnnnnnnnnnnnnnnnnnnnnnnnnnnnggtgcacatgtgtagtcccagctacttgagaggctgagatgagaggattgcttgaggccagggggcgaaggttgcagtgagccgagatcacaccactgcactccagcctgggcgacagagcgagagtccatctcaaaaaacaaaaaacaaaaaacaaaaaaaaaaatttacagtgaaatgtgaggttttcacaaataaccctgagaaacaaaaatcaacttaatagaatcctaaatttgttatgccatcatgaatttctgcctccatgggggaatgctatgtgagttagatctgtcagagagatatcaggcacctgggctttctggcattctgcccttgagagaatcatgaacctttcagtattagagaagaatccttagagatagttttttcactgaacatttcttgaacttctatttttgaacatttcctagaaattaatagaatgaagcttaaaaagattaagtgactgcgtacatggccacagaattgggaacagtagtctttggcttcaaactcaagatttctagcttataggtacttacttaccaaacactaaggaatcaggtgtatcatgcatcatgtcaggtgctgagggtacagaaatgcctacaacacagtgcctgcctttcagaatattgttgggagagctgaattgcagtggcccagactgctcctgatgggtatgtcaagaatgcaaggctctgactgctctttgtctgaatttctcatagttgtgtttccagcaagcaaccctgagggatgaggtaatatctcccccagggttgcttctacttactcaaggaacttactcttactgaaaaaggaacactgagctgagggcatgcactcagctcagtgttcctttctggtaacaaaggaacactcagctcagtgttccttccctgtaataaagcccacagcatgtacaggactctttgaattaccactctgagacgggggcaatgaggaaccaacaaaaattaacatgaagtttgactactccttttgccagagacaccttttgtctctggcccaggtgtctcatgtcttctgctagcacccatgaaacagtaacaggctaacctgttagcttacagataaggtggaatctcagaccctgcatagttattggcaaatatctcttgtgaggtgatatagatgtgaggaaaccaacaaatacagttcagtgtgacaggtacagagtgctgtgggatacagaatgctgtgggataacccaggaaaggttcagctggtcaaggtcaaggaggcttttctgattccactgctcttgaggtgaaaatattggttggttcatctcttgagggtagatcttttcattgttagtgtatgacacaggacatggcacatggttcatgatgacagagcttgctgaatgagtgaatraactgttatttgtggttattgggtgtgatttactgcatcaaaggtccctatgtttgctactaacgtttgtctcatttttaaagaccgaagtcctgggaagatgtttgttcttcaatgaaaag

SEQ ID NO: 668430 - DNA, 642 bp, Homo sapiens
ttactgcacagtggtttttaaaactcaaacttctcttcctaattctctgttcttggctggcataagagagcctcaagagaaaggaggaaaaaacaacacttattctaaaatataacttcctcttgcataccagatactatggtagccactgggcattatttttttaatcatttaaacctgattttccagataaggaaacagagactctgaaggttaactgaactacccaaagtcataccttgcaggtggtygagctggaattagagcctgggtctcccaacccatgcttctcactcctcccaggctccccacctcaccctgctcctattacccagttccccgaacccccaggccacctcgtttatataaaaaaatgcaagagctcttgcatacgtaaaaaaattcattgataacaaatgattaaaatgattctcctcattacacatataaaacagtgcttaatttggaggtgccacatgggattgaaagccattgttcttggtacctaaatggcccatgcctgctgtatatcctcatgttctttccctgtcccttccctgtcctttcacgaataccctcttctatcttctttatcctcccgcatcttcctttcttgtagttcaaaaacatccacaccacata

SEQ ID NO: 668431 - DNA, 642 bp, Homo sapiens
ttactgcacagtggtttttaaaactcaaacttctcttcctaattctctgttcttggctggcataagagagcctcaagagaaaggaggaaaaaacaacacttattctaaaatataacttcctcttgcataccagatactatggtagccactgggcattatttttttaatcatttaaacctgattttccagataaggaaacagagactctgaaggttaactgaactacccaaagtcataccttgcaggtggttgagctggaattagagcctgggtctcccaacccatgcttctcactcctcccaggcyccccacctcaccctgctcctattacccagttccccgaacccccaggccacctcgtttatataaaaaaatgcaagagctcttgcatacgtaaaaaaattcattgataacaaatgattaaaatgattctcctcattacacatataaaacagtgcttaatttggaggtgccacatgggattgaaagccattgttcttggtacctaaatggcccatgcctgctgtatatcctcatgttctttccctgtcccttccctgtcctttcacgaataccctcttctatcttctttatcctcccgcatcttcctttcttgtagttcaaaaacatccacaccacata

SEQ ID NO: 668432 - DNA, 825 bp, Homo sapiens
aaaaaggaagtttacgcaacccgctgcgtcccctccaccgccgcgcaccccgtctcgcagctggcgcggtgtttgctggtgacatgaactcaaccagcctccaccatctggggatcggggcgacatccttggtctggtttgcaagaggacccgcacgcctccagctggggcggaattggaagattcagaaaggaaagttggggaggcggggaaggaagggtgcaaaagtgacactgtgccagggtctccagggccgcggagctccgggacaggcagcgccttccgagctgcacaaacgcgtggggcggggcgtctcyggatccggaagttgcctctgccctcaccaaagatggcggccccggcgccgctcgcccacctctcgtaaccaatggaaccgcggcgctcggccgattctcgcaggcgccctcagatctacgctctctgatgcaacgccggaatcgcggaaaccgccggtgcacgttggagtcataagacggcgtcggtgttgcagtctgtgtccttggaggtgaccagggccactgcaggcatggtgctaggtgggtgagactcagtgtatggcgcggtgttccctgcctggggcaggaactctgctccagccgggtttcggcgctttccttagtgcctaccagagtgggcgccccgcgaatgtttggggaccgattgcagggagggagggagggagggtcctggcctttgctgggcccgggacttgaagggccaggccgggcttccccgagtccgtcgttcccccgggctgcgatggcggtggctccgggcccttcccctgccccgctgcgaaacctc

SEQ ID NO: 668433 - DNA, 825 bp, Homo sapiens
aaaaaggaagtttacgcaacccgctgcgtcccctccaccgccgcgcaccccgtctcgcagctggcgcggtgtttgctggtgacatgaactcaaccagcctccaccatctggggatcggggcgacatccttggtctggtttgcaagaggacccgcacgcctccagctggggcggaattggaagattcagaaaggaaagttggggaggcggggaaggaagggtgcaaaagtgacactgtgccagggtctccagggccgcggagctccgggacaggcagcgccttccgagctgcacaaacgcgtggggcggggcgtctctggatccggaagttgcctctgccctcaccaaagatggcggccccggcgccgctcgcccacctctcgtaaccaatggaaccgcggcgctcggccgattctcgcagrcgccctcagatctacgctctctgatgcaacgccggaatcgcggaaaccgccggtgcacgttggagtcataagacggcgtcggtgttgcagtctgtgtccttggaggtgaccagggccactgcaggcatggtgctaggtgggtgagactcagtgtatggcgcggtgttccctgcctggggcaggaactctgctccagccgggtttcggcgctttccttagtgcctaccagagtgggcgccccgcgaatgtttggggaccgattgcagggagggagggagggagggtcctggcctttgctgggcccgggacttgaagggccaggccgggcttccccgagtccgtcgttcccccgggctgcgatggcggtggctccgggcccttcccctgccccgctgcgaaacctc

SEQ ID NO: 668434 - DNA, 644 bp, Homo sapiens
ggcttcagctaacgctgacgttcgtagttcctgtaggacctgaacaaatgtgtttcattgtggtatctgatagttgttaactcaggagctgagtattctaaacaacaaaaagtaaacaatctagacctttactggtttagtcagttttaggggctgaccaattgcttttccaggcagatctaataatcctaacatttactgagcatgtactttatgtcaagcacaaatctgaatgcttkatgaatattaaagcacaacactataggattgtgctgttatttccacttcacagataagtaaactgagacacaaataaatggtttaaaaaacacggctaaactcacaaccatctggtttgagagcctgtgctgttaacccctaatgtccgtattctttctcaaatctaaccagtatttcccttgcagcagagagtagaaaagtgaatccagattcactaatgctagattataaaaatggtttaacaaagctcttacattgtccaccctaatggagatactgattctggaggagactaatagtagaaacaaagaaacttaagctctaacctcttgcctggttttccaagaatgggtgcattcacaattattttcaattcctaatgtcaaaaatagtagttttaaagt

SEQ ID NO: 668435 - DNA, 1538 bp, Homo sapiens
cctgcctgcatccaatttgcgttctcttgttcctgggcctcacaacagtgagtggtcatgacagcgatgatgtctacgggcaggggagctatgagacgaagaagtgcatgcatgttcctgaggctgcagccacaagacagagctgccaggcctccgtatggcaaagcaaacacaaggagtaaaaaatcataaaataatggtgctttgcattctgcatgattccacatacttcgtatcactggacatctgtgtgggctagtttgtgtctgtccctctctcatccattaccctcttctgttccttcccacaagtgggtgcttgacacacaattctgtataaacaacctctactcttctcccttccctgcctaccatgtgggtcagttgttcctggacagtttaccctgcttcaggcaacccccccacatctctccattaaaccaaatccaccctargtgccattcatttggtttctaggtagtcaggaacaaacaatttggccttattcataaactgaaagaatattagcatcatttagataacaaccattttaaagggggcctgatagaaataatgccctgaattaataagtctactccaaggagcagctcccctggtgtgcttccgggagtcgggggctgtggtgaggggatgtcagggcagataggctatttcaggtaggattgttcaatttcaatgtgtctccattacttactcttctaggggttaatttcttctatggtaagatcatagaaatcatgaaaaatccttacaaatccataaaataatgaaacaaatcttgaatcctaccattatccagcccaaagacaatgtcccttaccccacaggcataccacgtgcattactggaggcaaccaatgagtcctggggcagagccaaagaaaaacaagattaacactgggaaagaaagcattcttactctggattccctggtctatgccctttcaactattccttcttggcaaatcttgactttgttgtaaagaatctagttttttcctgctctcaaatatgcttacccttttctaccccattttctgttctgttagcaggtacagtgaagacacattttggaatgaataggagtagacttggattgttgaagggtaaatgtgcttggttataaaaacagttgtgaaaagtgcatttgattacacggtagaattatgtgcaaacagcacacaatttttcatttgtcttacaggtagttttcattgcaaagaacttgttgcaagcagattaaaaaggtactattttcctgcgctatttaatggtacacagttatctttttttttaattgctttattgaggtaattgcacataccataaaatccacatttcaagtgcacagttcaggtagttttcgtaaatctacaaccattaccacaatccaattttagaacatttatatcactgcaaagagatctcttgtgcccctttgcagtcattccccatatctacccccagctctagaccactgattatctgtatcgatttgccttttctagatatcttaca

SEQ ID NO: 668436 - DNA, 1081 bp, Homo sapiens
gaatgcttttcttgtaaatgattctaggtttacaaaagattatcacatttgtccagcaagggaaggaaaggatgctgcatgaatattaaagaggcattgtagatatcacacrtttcaatcttcttgggcttgttccagtctgatagccccataaaattaccatggtgccagtctttgagccttaactttatccattagtacaatttaactggtaccacaatttgctcatcaatatgattagattctgcacctgaactggagggttcacaaagtgtgcaggctgttggaagaaagctcttcccacacccagtttacatgatagctttgtatttccttctgcgcattaagcagggcaatcctggcctggcatttatccctttctcaatgtatggtccacccactgccatgagaaactaccagtgagcttaccttcaaagggcacaaattctgagacccaagagaccacatgcggtaaattcattaactcctttgttagtacatgccattggatattagcattttatcttccacttgaaggagaatctctcactgtcatccatctaggaactatggaaacactaactccaaattcaccacattttattataagggtctcacttgggtaatcccatgcccagcataaaatttctactagaatcctttgtttgcactttcacttaactcatttatttaatttgttcttgttagattagacccgctcttgaggctatcatgaccttttttagatttgattcttttttttttttttgagactgagtctccctctgtcgcccaggctggagtgcagtggtgcgatctcggctcactgcgagctccgcctcccacgttcactccattttcctgcctcagcctccggagtagctgggagtacaggcgcccgctaccacgcccggctaattttttgtatttttagtagagacggggtttcactgggttagccaggatggtctcaatctcctgacctcgtgatccacctgccttggcctcccaaagtgctgggattacaggcgtgagccactgctcccggccagattttgattcttaaatatctcataattaa

SEQ ID NO: 668437 - DNA, 619 bp, Homo sapiens
tgtgcctgttggccatttgtacrtcttctttggataaatgtccatacaagtcctttgcccatttttaaatgagatgtttgtcttttgttgttgagctgtaaaagttctttatatattctggatactagatctttatcatttatatgatttgcaaataattctatgttgtctttttacttccttggtaatgtcttttgatgaataaaagcttttgaatccaatttacttcttcttttgttgcttgtgcatttggtgtcatatttaagaaatcattgccaaattcaagattgtgaagtctacccttatgtttttttcctaaggatattacaattttagctcttaaatttaggtctttgatccattttgagttaatttttgtatatggtgtgaggttagagtccaactgtattcttctgcatgtgaatactctgaactttttagaatcctatttcctctttctgaaatacatttcttaaaagtttgttcagaaatgatttcttggtaataatttctacgtgtttttttggtaatgtctttattaccactgtattctggcttccattgctgttactgagaaacttgacatcatttttccacctttgtaaattttctacctctt

SEQ ID NO: 668438 - DNA, 580 bp, Homo sapiens
ggatccaggaggaagtactcatctgggactactctagagctcttcaaatatattggcttaatgagagagtctcgttttctttgcagaaagcccagagcttaatcttcgaattccagtgctggcactgacattttccccaaggtaatcctagccttttcgtttgtttaaactgttcatcattccagttttagttgtttttcattttctatttttggcaaatggggatattccttatttcttgtcagtcagtgtgatatcatagaaagatacttggcctttgttcctgrtttctggcacacagttcccaaaactcttagaatttcctgagtgataaagggtgataggagtattttttgttctagtgacatgactttttgtgggcttctaggtagcttcaggagggtggctgttccagaaaaaccagccttgattagaagcttggaacattccacccacctccctctaatctctagcacagggaaaggagctggagaatgaattgattgctggtggccaatgatttaatcattgcccacagataaaacttccataagaaaccctaaatgatgacatttggaga

SEQ ID NO: 668439 - DNA, 580 bp, Homo sapiens
ggatccaggaggaagtactcatctgggactactctagagctcttcaaatatattggcttaatgagagagtctcgttttctttgcagaaagcccagagcttaatcttcgaattccagtgctggcactgacattttccccaaggtaatcctagccttttcgtttgtttaaactgttcatcattccagttttagttgtttttcattttctatttttggcaaatggggatattccttatttcttgtcagtcagtgtgatatcatagaaagatacttggcctttgttcctgatttctggcacacagttcccaaaactcttagaatttcctgagtgataaagggtgataggagtattttttgttctagtgacatgactttttgtgggcttctaggtagcttcaggakggtggctgttccagaaaaaccagccttgattagaagcttggaacattccacccacctccctctaatctctagcacagggaaaggagctggagaatgaattgattgctggtggccaatgatttaatcattgcccacagataaaacttccataagaaaccctaaatgatgacatttggaga

SEQ ID NO: 668440 - DNA, 673 bp, Homo sapiens
ttccagatgcttggaaggctgaggcaggaggatcacttgaacctgggtgttcaaggcagcagggagctatgatcacgctactgcactacagcttgggaagcagagtgagacattccctctctctctgtctttttttttttaagttgtggtccattgaccagtggcatcagcatcacctgggagcatctcataaatgcagaacctcagggtcttctgcagacattctcattcagaatctgcactttaggaggatcccccggtaatctgttgtttggcattaatatttgagaaacattgatatggaaagcctttcctaacctcctaaccatggtctccacccatctcaatggggtgagttaggtggcccatatttggtttgcttttcatcccccytgcatggcaatccattgaagattgcaataaactttcattcatttccacatccccagattctagcacagtgcttgacacaagattttaactttgggaattgtttcattttccaatacaatgatttgtagatgaagaattgcaatgagaatcttcttgtgcactcagaaaggttgctctccaccatgggactacagtttgttagagggtcccctttcgttgcagtctttcttataaaaaacatgcttggtggggaatgcttctctgtgaataacttctggaa

SEQ ID NO: 668441 - DNA, 675 bp, Homo sapiens
tcttgaactcctgacctcaagtgatctacctgcctcggcctcccaaagtgctgggattagaggcgtgagccaccatggctggccaacatatataatttttatgaaataggaaaagctttctttaaacaaatattgaaaacacaaaatttgaattaaaattaaaatcatatatttaaagctaaacttgcaaagaaaagaaaagctatgtcattgactatgagaaaatatttccaatcatggaacataatttagtgtaaagataatattaagaatgtcaacaatcaataaagtattgaatttggaaatctataaatggaatatttasaaaaagaaaaaaacaggacttctaaaaagcatataaaaatgattccacagccattatcagagaaatccaaaaaaagcacaataataacacataatttctcattgaattagttggcaaaaaagataataaagataatgtctgaaattatcaataattggcaaggatgtggagtgatggaagctctcaatcatatcgtgggttggtaatccacatggacacaactgctttgaagaaccatttggaatatctactaaaagtgaaatgcaggtaacctggaccgcaggaattctgctcctatatgcatgtctaaacaaagtcttgcccgtgtttataagatgttaactatagct

SEQ ID NO: 668442 - DNA, 518 bp, Homo sapiens
tctgtctcaaaaaagaaaaaacaaaagaacaactcctcaaaatcttcctaagattttatccccaggcaaatgcaaagacatgttcttgattttatattaaaaactcttgtgcaccattctaacgtattgtgcacacacttcattcttgtaatttaaaatgttgaactctgaagttttgtcatagtaatagctaaagggtatgtgtttaaattcaggaacagattaacgcacttaccaaacctccattgcttaaaagtaattataagttttctagattractgccaatataatataggccccaaagaaatcacccctctttactgagacagaacaataaattggttttcctgaataccgggggtaaagaatccaagttcttgaccttgaatatttcactggatcgtattctatgcagtagggaacaatcaggatgacatttgctgaaatgtgtgagatttataacataatagcttgagcatatgtgccaaaaaatagaaatcttaaatcctatcaaatc

SEQ ID NO: 668443 - DNA, 627 bp, Homo sapiens
gacggcaccactggctgcaagccatcctgagaccatgctgcttccctcccaggactgtcacatccaccgcatctggtttacaagccaaacactgatatcctgtccttgggtaaaccccaacattcctgtcagatggtttcactgtcttaggaattcagtacttagaaggatattgaaagtatagcccaaggctaaatgagacttggaatttccttaattgaattggggacttcagcaccacagacagatgtttttggcatagtctacttgatgcagccctcataaacaagcatcacacacaaactgtcagagttctaagtccctgctacttatgaccttggacacgagtactgccatctttcctccagattaagaatgaaagaaagacactcaagaataacgaactaagggacttgccttaccagatttcaagatttattaggtagacccatattcttgatacagaagtggcttttgggtcactggggataggattaatttaaataaatggtgccaagacaattgtctatccacacaaagatattccactggatatcccartgggatatccagggaaatgtgtgaatcactattcttatctcacataaaaataaattccaggtgcac

SEQ ID NO: 668444 - DNA, 590 bp, Homo sapiens
aagtctggtatcttcacataatggaaaattaggtagcagtgaaaagtaaatgtaaatatagacacaaggataatcttagaaacataatgttgaatagaaagcaagtttcaaaggactaccatcaatatgtcttttttaaactcaaaatcaagcagaatgaaacaacatattgcttaataattcacacagatgaggaggtgaaactatactttaaaagttcagggaatgataagcataaaattcaaaatagtggttatttttatggaagagcagggccgtggagtctgttggaggaggagaatgcagagagcatctatcttattggtaaaactctgatttttaatttgggtggtggcttcagcagtgtgtgtttcattagtatgctttatttgttaccttgttatatagactctacatatatttattaatacacttattaaatatatatactaaaatttaaaatactaagaaagaatgtgagggaaagccatctctggtcccaaatcttattatcttccctgaaatacacttgccctttgggggcatgttgagattgattaaggccagatmaattcaaattgtaaaatcat

SEQ ID NO: 668445 - DNA, 972 bp, Homo sapiens
gcagttattatgcccatgtcctcagggtggaggaagggggaggtccagagattcgtacttccaccccttcggctacaattatatcatgcaaaggaggctgggaatcccagctgcaaaggaggctaggaaattgattatttttgttttctcacttctagggtaaagaagaaggaagaaagaatttggaatgggtgtttactgagcaaatttattgtacctgccacagagagctgaggtgacagcacaaaatcaagtacaaaacaaagtggttgattttagatgcaagtattccaatatttctttccaatctctccttaaactaatttggggtatgggggggatttacccatctggtatcttcatccccaagaacaaagtttctagaccgtacggaaggaaacgagaatcaacaagagtgggcatcattcccaagtttctctgggctggccgtggcccaggattttgaatgtgcgatacactgccattttccattttcagaaagtctcacttttaaaagtgtatattaaaatgcacatgcacagatacacattattgctcgatttgaaaactatctgttttcaagttctaaatttgatcaaaagaaaacatgcacatacacacacagtattcgtgcaatattttctcagattctgaatcttgttttattataactagtatgatcatacccrtcgcatgtacaaaaagaacaaatcaaagaggtcataagaaaaatgtaactggctcttgtcagttcttttatagaatgcttcatatggagattagggcatgactatgtaacacatgagggctgaagtacaatttaaattctggtggcctgacactatttcccagaaaagaacaagacgattgcctgtccgttcaaggatggtggcaactccacagatccttagcaccaagagaatggtggcagaaacaagtctggtcctgtaccttcaaggtacaataccacac

SEQ ID NO: 668446 - DNA, 972 bp, Homo sapiens
gcagttattatgcccatgtcctcagggtggaggaagggggaggtccagagattcgtacttccaccccttcggctacaattatatcatgcaaaggaggctgggaatcccagctgcaaaggaggctaggaaattgattatttttgttttctcacttctagggtaaagaagaaggaagaaagaatttggaatgggtgtttactgagcaaatttattgtacctgccacagagagctgaggtgacagcacaaaatcaagtacaaaacaaagtggttgattttagatgcaagtattccaatatttctttccaatctctccttaaactaatttggggtatgggggggatttacccatctggtatcttcatccccaagaacaaagtttctagaccgtacggaaggaaacgagaatcaacaagagtgggcatcattcccaagtttctctgggctggccgtggcccaggattttgaatgtgcgatacactgccattttccattttcagaaagtctcacttttaaaagtgtatattaaaatgcacatgcacagatacacattattgctcgatttgaaaactatctgttttcaagttctaaatttgatcaaaagaaaacatgcacatacacacacagtattcgtgcaatattttctcagattctgaatcttgttttattataactagtatgatcatacccatcgcatgtacaaaaagaacaaatcaaagaggtcataagaaaaatgtaactggctcttgtcagttcttttatagaatgcttcatatggagattagggcatgactatgtaacacatgagggctgaagtacaatttaaattctggtggcctgacactatttcccrgaaaagaacaagacgattgcctgtccgttcaaggatggtggcaactccacagatccttagcaccaagagaatggtggcagaaacaagtctggtcctgtaccttcaaggtacaataccacac

SEQ ID NO: 668447 - DNA, 1486 bp, Homo sapiens
tgacaaatgtggctgcctgaaaaacagacaagagacacaaagggcatccctgtcttctctgtctttacctgggaactaaaagaaagatggcgatttctctgtacacgtgctggtctgtaacctccacagctgccagctctaaagaaaagggcagcactcatctgctttatgaagagttgaaaagattcatgtaattttcctggggtcccaagctttctttcttttttttttttkggcattacccataatgtatttgtccatgggataaactgagatgccttcccccaacaattacatttgcttaaaggaaaacacagctgccttccttgaatattaagatgcaactgggactagtgagaccaaagatttcaaagggaaggaaagtttttatagcataaaagatactctattatatcaaagtgcattgagattaaaaaaaaaatgaggcaaagtgatgactattctccttagggacaaaaggtccaattgagaaagaagctctaggtgccactttccagaagagccacctgccactacttggagctattgcagatattcaggagtcagaatttcagactcctgccacctctggggttcatgggggagactgtgcacacatgtctcccctgaggcaaagccaacaggtaattactcgatcactgacaccttgggataactgaacatgaaatcaatttcttaatggttctctcttaaagaaccagcatcacactgctagctactgcacctgtagtcccagctactcaggaggctgagacaggaggatcacttgacccaggaggatcacttgacccaggaggtccacttgacccaggaggtcaaggctgcagtgagctatgatcatgccactgtattccagcctgagtgacagagtgagaccctgtctcaaaaaaaaaataaaaataaaaataaaagaaagaaagaaagaaaaaaggaaagctttggagaaatatgtgctaacccaagcaaaagcaagtgagtcacccattcctttgggagtgtattatattgctatgagggcccaccccagccaaactatggaaagtagcaagagatgatgctgaacctaattaccattagttattatttgctatggttacaattgcaccgaataacgctgctgccagcagtgctgttttatgtgatatcttcttcatgtggcaaccttttcataaatcaaagcaaaagccaataccagacagtttcttgtacagcctgcctgacaataaaagttaacactgaaccttagctgttatcaatcttcataaatgtgtccacgacgtggcaagactgctccacattacggtggggctgccactaatgcaagcaaggtagtgacccactaggttaatgggacttgacaatcagtccagttttaattgagccagaaaaaggaatggttctcttatccttaaagtacacaggaattttctcctctatgtcttagtttcatcagtgctttgctcag

SEQ ID NO: 668448 - DNA, 596 bp, Homo sapiens
tggagtctcactctcgcccaggctggagttcagtggygtgatcttggctcactgcaacctccacctcccgagttcaagggattctcctgactcagcctcccaagtagctgggactacaggagtgcaccaccatgcccggctaatttttgtatttttagtagagacgggatttcaccatgttggccaggctggtctcaaactcctggcctcaagttgactctcttggtagcttggaactctcaaatctgtagaaatcaggtcctgcttcatagtgtttatcgagtatctcccttcaagggaagttgctagacattcacctgagatgcttacacaacatttttcagaagggataaattaatttgccaacttatgttcctctcactcatgtatgagagcatctataataattcacctcatctctattctttctggatgtagtcactcaaagcaagaaccaccacagagccaaaactttgctaatttgattgttagggggaaaaataacatcacagttttttctacttttatttccttgatttaccatgtggttgggcattttcttaaatgttaattacctgtatgtttttattctattc

SEQ ID NO: 668449 - DNA, 596 bp, Homo sapiens
tggagtctcactctcgcccaggctggagttcagtggcgtgatcttggctcactgcaacctccacctcccgagttcaagggattctcctgactcagcctcccaagtagctgggactacaggagtrcaccaccatgcccggctaatttttgtatttttagtagagacgggatttcaccatgttggccaggctggtctcaaactcctggcctcaagttgactctcttggtagcttggaactctcaaatctgtagaaatcaggtcctgcttcatagtgtttatcgagtatctcccttcaagggaagttgctagacattcacctgagatgcttacacaacatttttcagaagggataaattaatttgccaacttatgttcctctcactcatgtatgagagcatctataataattcacctcatctctattctttctggatgtagtcactcaaagcaagaaccaccacagagccaaaactttgctaatttgattgttagggggaaaaataacatcacagttttttctacttttatttccttgatttaccatgtggttgggcattttcttaaatgttaattacctgtatgtttttattctattc

SEQ ID NO: 668450 - DNA, 1449 bp, Homo sapiens
attatagtttccaaactcctaatggactgaatattttacccctttgaaaactaacaagattccagtttccagctataaacctctaagtcattttgtaattaactgccttgaaagctgtaatcaagggttttccatgaggtattgccaaaggcttgatgggagctaacgtgagtcacctcaattctcagacagactgagtgatcatgatagcctacgctgtactgtgcaagttgggtaaagcttaggaaactatcaaggctgaaagataattttcaaaagtaagtttagaaaataggaaggttagtataaatctgcctttctctaaggcccaaactaatagtcttcctgaggtataaatatattttcctactaatggcaggtttctaccttaatatttatctgagatttctgcaaatctttcctaaattgctagtcagtatctaacacacagcatgctagatttgcaaccagacctttaaatataacaaatgatactgtccttattttttttaaagagtagaatgaattggccgggcgtggtggctcacacctgtaatcccagcactttgggaggccgaggttcgcggatcagctgaggtccagaacttgagaccggcctgaccaacatggagaaaccctgtcactactaaaaatacaaaatcagccgggtgtggtggcgcatgcctgtaatcccagctactcgaaaggctgaggcaggagaatcgcttgaacccaggaggcggaggttgcggtgagccaagtttgcgccattgcactccagccaagagcaacaagagcgaaactccgtctcaaaaaaaaaaaaaaaaaaaaaaattgtctgaaaacgtgtttgtgcttgggtggaattaggaaaccttgattatgtctcacaatgtcttcaaatatgtgatgaacactcaaaagaaaatggggaaatgaagaacgacaatttcatgaaattagattactccaaactttcccatctaaagacccctttcaacactgttaagacactgatatagtaaatgatctttgtcaatggacacagccttgtggttagtctaactgacctcaaagtccctataagcactatgtcttatacacagtagatattcaatagcaccatcatagaatgaatgaatgttaaggcttctatgccaaaaatactgtcgaaggagatggggagagagaaaaatcagtgagaagcctatatttgtgctactcaaaagtgtcacctatgggccagtgccagtccacaactataactgatccacaacaagaagcttacatcagaatgtaaatcarctctatcactaagcaaactgcagttcagctgatgttttggggaagactttcttgatgaaagaagcgttgagcagacagattctggagtaagcttcctatctccttatggacctataaaaatagtttgcagaccagccactttga

SEQ ID NO: 668451 - DNA, 635 bp, Homo sapiens
gaacttttatgatgggcatagggactgctgcaatgggatttccatggtgagagactggactcaactcagagtacagcaaggaaaggcagagatgttatagccaaagagcaggctgaggggaaggrgatggaaaaaactgaaaggaagctttaggagtaagtgggggattctggctaaactgacctaacaggcttcttgctgatggcaggcctgggtgatctgatatcacctgtggaatggtggaggatgcggaacctgatcaatatcaagggtgatcagaactttgagggtgggagattctcactgaatcaacttggcaggatttttgctaaaactgggcaatgcaaagacagacgcacatgtggaaccccacaagctgagacctccttggtgagaggattcagaagagactcactaaagttcagtcaaccctttgtcacatccttacactaaagacaattcactcttaattggaaattcccatttatctgggcagcctatttttatttgctaaatctcagaagcagtagggcccaagaaggatttctacaggggccaggagatggtgtcatcccagaggctggaaggggaaggtcagtggtggccctgaaaatggggccatgggctgaactgca

SEQ ID NO: 668452 - DNA, 689 bp, Homo sapiens
aaatatctccagacatttctttatgttccctgaaaggcaaaaccacttcttgtgtagaaccattgcctaatattgaatttgtctttgctcttcatagccataatatttcctccaattttttgataaattagtaaatttgctgcttacaacattgttaatggcaataccaacttcagcatccctaagatttgaaaatatgccatgattttatcacttccgtctcctctatatttccaacaatctgacaaattatttarataatatcctaatagttctcttgaatttatttttgcacttttgagcatagatcccatcctcatttggactgttgcaattgcatgctcatctggactttctacttgtgatttctaaccatgtccacttattttttacattgccatcagagctttctctccagagcacacatctgatgacccggctgcagtgtcatacttctgcaatggtttcctgggtatcaatatccatagtaactcctcagctagtattcagtgtcttcatccatccatttatttaaaatatattttgtaatcgtcaggcactgttctaaatttttttttgatttactgatgaacaaaactgaatgaaaattcttcccccatggtccttacactgaagtaggacagagaaataatacaaatacacaaataatttatagaaaatattaaagg

SEQ ID NO: 668453 - DNA, 689 bp, Homo sapiens
aaatatctccagacatttctttatgttccctgaaaggcaaaaccacttcttgtgtagaaccattgcctaatattgaatttgtctttgctcttcatagccataatatttcctccaattttttgataaattagtaaatttgctgcttacaacattgttaatggcaataccaacttcagcatccctaagatttgaaaatatgccatgattttatcacttccgtctcctctatatttccaacaatctgacaaattatttaaataatatcctaatagttctcttgaatttatttttgcacttttgagcatagatcccatcctcatttggactgttgcaattgcatgctcatctggactttctacttgtgatttctaaccatgtccacttattttttacattgccatcagagctttctctccagagcacacatctgatgacccggctgcagtgtcatacttctgcaatggtttcctgggtatcaatatccatagtaactcctcagctagtattcagtgtcttcatccatccatttatttaaaatatattttgtaatcgtcaggcactgttctaaatttttttttgatttactgatgaacaaaactgaatgaaaattcttcccccayggtccttacactgaagtaggacagagaaataatacaaatacacaaataatttatagaaaatattaaagg

SEQ ID NO: 668454 - DNA, 651 bp, Homo sapiens
tttctgtggcagagtctcgatctgaggcccagactggagtacagtggcacgatctcggctcactgcaacctccgcctcctgggttcaagcgattctcctgtatcagttctcaartagctgggattacaggcaccagctaccacgccctgctaattttttctatttttagcagagacagggtttgccgcgttggccaggctagtctccaactcctgacctcagctgattagcccgcttcggcctcccaaagtgttgggattacaggcgcgagccactgcacctggccctagttcaagtctttttaagccaaggtcaaggcctacttggggagcagtctctgacgatcctagctagagtttgttcaaggcagattatttgttggtagtctgaggcatgcctggcttctagtctgctttttagacaaccaccaggttagtgcgatgggattttgagccatcctggtaaattctttgttcagtacctcattctctatactttccagcaatttcctaaagaagactcacaattttttaaaaacaagctagccaaaaagataattctggtatattaatataacatctctgcctcatagtcataatatgttgaaaggggaatgggcaagttaaagtctagggagcgctttagtctgca

SEQ ID NO: 668455 - DNA, 651 bp, Homo sapiens
tttctgtggcagagtctcgatctgaggcccagactggagtacagtggcacgatctcggctcactgcaacctccgcctcctgggttcaagcgattctcctgtatcagttctcaagtagctgggattacaggcaccmgctaccacgccctgctaattttttctatttttagcagagacagggtttgccgcgttggccaggctagtctccaactcctgacctcagctgattagcccgcttcggcctcccaaagtgttgggattacaggcgcgagccactgcacctggccctagttcaagtctttttaagccaaggtcaaggcctacttggggagcagtctctgacgatcctagctagagtttgttcaaggcagattatttgttggtagtctgaggcatgcctggcttctagtctgctttttagacaaccaccaggttagtgcgatgggattttgagccatcctggtaaattctttgttcagtacctcattctctatactttccagcaatttcctaaagaagactcacaattttttaaaaacaagctagccaaaaagataattctggtatattaatataacatctctgcctcatagtcataatatgttgaaaggggaatgggcaagttaaagtctagggagcgctttagtctgca

SEQ ID NO: 668456 - DNA, 651 bp, Homo sapiens
tttctgtggcagagtctcgatctgaggcccagactggagtacagtggcacgatctcggctcactgcaacctccgcctcctgggttcaagcgattctcctgtatcagttctcaagtagctgggattacaggcaccagctaccacgccctgctaattttttctatttttagcagagacagggtttgccgygttggccaggctagtctccaactcctgacctcagctgattagcccgcttcggcctcccaaagtgttgggattacaggcgcgagccactgcacctggccctagttcaagtctttttaagccaaggtcaaggcctacttggggagcagtctctgacgatcctagctagagtttgttcaaggcagattatttgttggtagtctgaggcatgcctggcttctagtctgctttttagacaaccaccaggttagtgcgatgggattttgagccatcctggtaaattctttgttcagtacctcattctctatactttccagcaatttcctaaagaagactcacaattttttaaaaacaagctagccaaaaagataattctggtatattaatataacatctctgcctcatagtcataatatgttgaaaggggaatgggcaagttaaagtctagggagcgctttagtctgca

SEQ ID NO: 668457 - DNA, 641 bp, Homo sapiens
cagatttgaggcatgtgttagatatctcataggagatattgcataccatgaatctgaagttgaagggaattgtttgggctggaatatatcaccatacatatatgtcattggtacacagatggtatatgaagccatgagactaaagataagcagtgtgatgagtgttgatagagaaatctagcagagaaggatcaatgctagagttctaggatagttcaatgttaagaagttgaagggaagaaaaccacaagctattgaatgttaggtaaaatacttaactattctgatattgatgactttgtataggatatgtctgtctgcttcatagtattggcatgtagttaggattaatgtggttatgcctatagtgtgttcagcatggagcctggaacagaataagaacacaatatggagagacaatgaggatgatgaccatgatggtgatgatgataatgatagaaataaaggaggaggatcgataaagcaataataataatamtaataataagtataaaatcaacaggaaaagtgagaaaggggttttatctgtccgataggcttttgtaagtgccagttacttttgctagatgttttgtggactcaacctcatctaaattttacaataaccttgtaaaatgcaa

SEQ ID NO: 668458 - DNA, 1323 bp, Homo sapiens
ggcatagtaccaaggcattcaacaagtgcaaagaaagaactaggtatttccagcttacctcaggggccatccagaacggggtgccaacagatgtgtttctccgcagacgtgtactggtgagttgagctgaaacacctataaggaaagagtatcagaattcaaaagtgagcaaagtatgatgctagaccagcaatcggcagactttttccacaaaggccaaataagtactttaggctttgtgggccatatggtctctgtcacaactactcagttctgctgcaayagtacaaaagcagccatagtaaacacataaatgaatgaatgtggctgcattccaataaaactttatttatagatgctgaaatttgaatttcatataattttcacgtcacagaatattttgggttttttttttccaatcatttaaaaatgtaaaaaccattcctagctcataggccatatgaaaataggaggtaggtcatatttggctcactagctgtagttgccaaactacaactctggagcatttatcactctatttaaatcattaggatttttttttttccctaatggacatccctgtctatatcactgcaaaaatcaaaagaaaaatatcaacaactaggatcaatccaaaatatcatcctattatatttccaaattatttcacatgacttctttcttaataaggggcttcattttatggagaaagaagatcggctgcactatctgtaacagagcatcagtgtagacataaaaagatttcagtgccttatcttgcctagaagcctggaaacctggcaagaaagctgtgtttgtcaaatggaaaaagaaaatgactaataacattatctggggctcaatgttggggacctgaattctaatgtaactccaatgtcctttaaccaactgtcttcttcatatcacgagagcgtaaaggtccacaggattaaaaatcaatgttttccatcccaattatgctttttactaattatgtgattgcttcacctttgagcctcagttttttcatctttaaactagggataatcacaacagtcacacctaacacggagggttcttcttaagaccaaataggagaacaaatgtgaaaatgctttataaattgcaaagcattttacacacataaggtattcttttataccacacagaagtctcacatagaccttaagagaatgacaagggttgccactaatgtcattgatgacaaaaacttagaaactgaacactatgtgttcttagcaaaggacacacctttgaaacatgagcatagatttgccaaggatctgtgggtttattggggga

SEQ ID NO: 668459 - DNA, 1323 bp, Homo sapiens
ggcatagtaccaaggcattcaacaagtgcaaagaaagaactaggtatttccagcttacctcaggggccatccagaacggggtgccaacagatgtgtttctccgcagacgtgtactggtgagttgagctgaaacacctataaggaaagagtatcagaattcaaaagtgagcaaagtatgatgctagaccagcaatcggcagactttttccacaaaggccaaataagtactttaggctttgtgggccatatggtctctgtcacaactactcagttctgctgcaatagtacaaaagcagccatagtaaacacataaatgaatgaatgtggctgcattccaataaaactttatttatagatgctgaaatttgaatttcatataattttcacgtcacagaatattttgggttttttttttccaatcatttaaaaatgtaaaaaccattcctagctcataggccatatgaaaataggaggtaggtcatatttggctcactagctgtagttgccaaactacaactctggagcatttatcactctatttaaatcattaggattttttttttyccctaatggacatccctgtctatatcactgcaaaaatcaaaagaaaaatatcaacaactaggatcaatccaaaatatcatcctattatatttccaaattatttcacatgacttctttcttaataaggggcttcattttatggagaaagaagatcggctgcactatctgtaacagagcatcagtgtagacataaaaagatttcagtgccttatcttgcctagaagcctggaaacctggcaagaaagctgtgtttgtcaaatggaaaaagaaaatgactaataacattatctggggctcaatgttggggacctgaattctaatgtaactccaatgtcctttaaccaactgtcttcttcatatcacgagagcgtaaaggtccacaggattaaaaatcaatgttttccatcccaattatgctttttactaattatgtgattgcttcacctttgagcctcagttttttcatctttaaactagggataatcacaacagtcacacctaacacggagggttcttcttaagaccaaataggagaacaaatgtgaaaatgctttataaattgcaaagcattttacacacataaggtattcttttataccacacagaagtctcacatagaccttaagagaatgacaagggttgccactaatgtcattgatgacaaaaacttagaaactgaacactatgtgttcttagcaaaggacacacctttgaaacatgagcatagatttgccaaggatctgtgggtttattggggga

SEQ ID NO: 668460 - DNA, 1472 bp, Homo sapiens
tcaacttaagcatcaactcaagcatattattcttcagttcatcctatcaacttaagcattagcattcttcagattataagacactagcaagcaaatccaaagaacattttgtttgagatgctgaatgatcagcgatagagtatgagctgagaatgttttcatctgttgagttttacgtgttttctgtcatttagctccctccaaagtcacagctggtaaaaccaaatgggtcattttaccacaataagaccaacgtcacagttcaacaagcaccatttgtcctctaaggcaaagccatgcacctaattatgacacactgttaataaatttgtaatagacaaaaagaaattgactactatggatttttttttcctcaacaaagcaaaaccatttaaagggcagattgtgcatctatttcttcttttattgtttccataaagttagcattatattctagacagaaaaaatcagggcagacctcagatgaacagattgtaccatcagatcctaccacattgtctctaatgggggaaattagcagctgaacatcaacacctgtcaccatgagcagaccctggcacacacaccaggtaggaaggctgtacagttccttagagcaatctgagcctggatcaccagagaccatgtgcatgccaatgcccacagaagcataggctgacaggctccatttaaagtcaggtggatatatgaaatgccagaggagatgtagtagcagttcctgaggaagactggttatcaacaacagtgagcgctacaaaggctttatagagatcgtactaactgcaagaatagaatcacacacatgggcagagaggccccagcagtaactaccgaacattcgtcctctttcaagggcaaaagacaccacagcagcaccccctctcacacctggatggcttgggtcatgtctccactgagccagaatatggccaattgttttcaccaacctcaagatcaattgcaataattgctactgaatggattatgctgcgggtcctggcagtttgtaagggggcctaactgagcaagcacacatttatttttctgacattgtaagcatgtcttctctttaaaagggctttggacattttttcctacccggttgcctagcaaccttttgaggggacagaaataggaaggaggatactggagactaatagataagtgtttatttcgtagatttctttttcaaaaatcaatctgttgtcacttcctggggtgggagtggggtgaaggtggaggarctgtgctatattatagtgctgctactctttttttttttttttttttcgagacggagtctcgctctttcaccaggctggagcacagtggcgtgatcttggctcactgcaacctccacctcccgggttcaagcaattctcctgcctcagcctcctgagtacctgggattacaggcacgtgccaccacgcccagctaattttggtatttt

SEQ ID NO: 668461 - DNA, 1472 bp, Homo sapiens
tcaacttaagcatcaactcaagcatattattcttcagttcatcctatcaacttaagcattagcattcttcagattataagacactagcaagcaaatccaaagaacattttgtttgagatgctgaatgatcagcgatagagtatgagctgagaatgttttcatctgttgagttttacgtgttttctgtcatttagctccctccaaagtcacagctggtaaaaccaaatgggtcattttaccacaataagaccaacgtcacagttcaacaagcaccatttgtcctctaaggcaaagccatgcacctaattatgacacactgttaataaatttgtaatagacaaaaagaaattgactactatggatttttttttcctcaacaaagcaaaaccatttaaagggcagattgtgcatctatttcttcttttattgtttccataaagttagcattatattctagacagaaaaaatcagggcagacctcagatgaacagattgtaccatcagatcctaccacattgtctctaatgggggaaattagcagctgaacatcaacacctgtcaccatgagcagaccctggcacacacaccaggtaggaaggctgtacagttccttagagcaatctgagcctggatcaccagagaccatgtgcatgccaatgcccacagaagcataggctgacaggctccatttaaagtcaggtggatatatgaaatgccagaggagatgtagtagcagttcctgaggaagactggttatcaacaacagtgagcgctacaaaggctttatagagatcgtactaactgcaagaatagaatcacacacatgggcagagaggccccagcagtaactaccgaacattcgtcctctttcaagggcaaaagacaccacagcagcaccccctctcacacctggatggcttgggtcatgtctccactgagccagaatatggccaattgttttcaccaacctcaagatcaattgcaataattgctactgaatggattatgctgcgggtcctggcagtttgtaagggggcctaactgagcaagcacacatttatttttctgacattgtaagcatgtcttctctttaaaagggctttggacattttttcctacccggttgcctagcaaccttttgaggggacagaaataggaaggaggatactggagactaatagataagtgtttatttcgtagatttctttttcaaaaatcaatctgttgtcacttcctggggtgggagtggggtgaaggtggaggaactgtgctatattatagtgctgctactctttttttttttttttttttcgagacggagtctcgctctttcaccaggctggagcacagtggcrtgatcttggctcactgcaacctccacctcccgggttcaagcaattctcctgcctcagcctcctgagtacctgggattacaggcacgtgccaccacgcccagctaattttggtatttt

SEQ ID NO: 668462 - DNA, 636 bp, Homo sapiens
ttacccagtctaatctaattctttgcgtatgtattttttatttgaggtgatgatttatgagtgaaagtgcatgttcaaaatgctaactttttaattgccaaatataaaataaaaataaaatataaagcacaattagaaattttttacaaagaatatttttggaaagaaaaagcatataaataataatggcaacttattggatatttttcactttatatgaatattgtctatgtttttaatgtgcattttgaggataaggaaaaaccgggagaggcaagatggatgcccttgatacctgagagagaataaatttcagtgatttctccagtgctagcacgtatcagaagcccaaccagcagttcttcctagaactgccattgcagataaagtttatggagtgaagttgcatcataagtgcatttattaactttttaatgttcaattttaggctytcagcaactttatgctcttctctcttttttgtctgtaattaaaaacactaattttattttgcatatttgttctttgtcatatattgtatcttaactgaagtttgagcacataaagcagttatactgagagaagagagacagaccctctcatattgttttatattgttttatactcagaaaagaa

SEQ ID NO: 668463 - DNA, 636 bp, Homo sapiens
ttacccagtctaatctaattctttgcgtatgtattttttatttgaggtgatgatttatgagtgaaagtgcatgttcaaaatgctaactttttaattgccaaatataaaataaaaataaaatataaagcacaattagaaattttttacaaagaatatttttggaaagaaaaagcatataaataataatggcaacttattggatatttttcactttatatgaatattgtctatgtttttaatgtgcattttgaggataaggaaaaaccgggagaggcaagatggatgcccttgatacctgagagagaataaatttcagtgatttctccagtgctagcacgtatcagaagcccaaccagcagttcttcctagaactgccattgcagataaagtttatggagtgaagttgcatcataagtgcatttattaactttttaatgttcaattttaggctctcagcaactttatgctcttctctcttttttgtctgtaattaaaaacactaattttattttgcatatttgttctttgtcatatattgtatcttaactgaagtttgagyacataaagcagttatactgagagaagagagacagaccctctcatattgttttatattgttttatactcagaaaagaa

SEQ ID NO: 668464 - DNA, 1021 bp, Homo sapiens
ttttcccattaatatatcaaagtatgaaacaccattaaaaatggaaatccaaaatgaatctggtaagttttaatatctaatttttagaacattaaaaaattcaaatgggttaattcctttctagcatttaaacagcacagaaacatatctctcaaaccaaaagtcaacatcttagttaataatggatttctacaaccattgctaataaaaatcaagaaaaaagacaagtatctstcacaaacactataaaattttgcattgtttttgaagtattagccactgtgattagacaaaaaaacatagaaataaacactgggaagatggtgaatataaaataaatagtggaatgatttattcctggaaaatcaaagtttaacaatgaaaaaaattaagttgattcattgaggagctgagtataaaattagcatctagaaatcaagcaatttcaaaatatatttttctatatgttaaaagtaatcagccagaaagaaaatagcattttaataggaattaaagagagtaaaatgcccaaagctaaacctaacgagaacagagcagaatgtataaaagtaaaatcttaaaatcaatggattaaatgaaaagagaccaaaaaaatgcaaaaccatataccttatgcttggatagaaaaccttactgtgaagatgtcaattcttcctaaatttagtctgaaagtaaataattgtttttttttgagacagagtcttgctctgtggcccaggctggagtgcaatggtgtgatctcagctcactgcaacctctgcctcccaggttcaagcaattttcttgcctgagcctcccaagtaactgggattacaggtgcatgccaccacgcccagctaatttttttgtattttagtagagacggggtttcacagtgttgcccaggctggtcttgaactcctgagctcaggcaatccacccgccttggcctcccaaagtcctagattacaggcatgagccacagcgcccagccgctttgtttttttttaagaatttgaca

SEQ ID NO: 668465 - DNA, 1021 bp, Homo sapiens
ttttcccattaatatatcaaagtatgaaacaccattaaaaatggaaatccaaaatgaatctggtaagttttaatatctaatttttagaacattaaaaaattcaaatgggttaattcctttctagcatttaaacagcacagaaacatatctctcaaaccaaaagtcaacatcttagttaataatggatttctacaaccattgctaataaaaatcaagaaaaaagacaagtatctctcacaaacactataaaattttgcattgtttttgaagtattagccactgtgattagacaaaaaaamatagaaataaacactgggaagatggtgaatataaaataaatagtggaatgatttattcctggaaaatcaaagtttaacaatgaaaaaaattaagttgattcattgaggagctgagtataaaattagcatctagaaatcaagcaatttcaaaatatatttttctatatgttaaaagtaatcagccagaaagaaaatagcattttaataggaattaaagagagtaaaatgcccaaagctaaacctaacgagaacagagcagaatgtataaaagtaaaatcttaaaatcaatggattaaatgaaaagagaccaaaaaaatgcaaaaccatataccttatgcttggatagaaaaccttactgtgaagatgtcaattcttcctaaatttagtctgaaagtaaataattgtttttttttgagacagagtcttgctctgtggcccaggctggagtgcaatggtgtgatctcagctcactgcaacctctgcctcccaggttcaagcaattttcttgcctgagcctcccaagtaactgggattacaggtgcatgccaccacgcccagctaatttttttgtattttagtagagacggggtttcacagtgttgcccaggctggtcttgaactcctgagctcaggcaatccacccgccttggcctcccaaagtcctagattacaggcatgagccacagcgcccagccgctttgtttttttttaagaatttgaca

SEQ ID NO: 668466 - DNA, 1021 bp, Homo sapiens
ttttcccattaatatatcaaagtatgaaacaccattaaaaatggaaatccaaaatgaatctggtaagttttaatatctaatttttagaacattaaaaaattcaaatgggttaattcctttctagcatttaaacagcacagaaacatatctctcaaaccaaaagtcaacatcttagttaataatggatttctacaaccattgctaataaaaatcaagaaaaaagacaagtatctctcacaaacactataaaattttgcattgtttttgaagtattagccactgtgattagacaaaaaaacatagaaataaacactgggaagatggtgaatataaaataaatagtggaatgatttattcctggaaaatcaaagtttaacaatgaaaaaaattaagttgattcattgaggagctgagtataaaattagcatctagaaatcaagcaatttcaaaatatatttttctatatgttaaaagtaatcagccagaaagaaaatagcattttaataggaattaaagagagtaaaatgcccaaagctaaacctaacgagaacagakcagaatgtataaaagtaaaatcttaaaatcaatggattaaatgaaaagagaccaaaaaaatgcaaaaccatataccttatgcttggatagaaaaccttactgtgaagatgtcaattcttcctaaatttagtctgaaagtaaataattgtttttttttgagacagagtcttgctctgtggcccaggctggagtgcaatggtgtgatctcagctcactgcaacctctgcctcccaggttcaagcaattttcttgcctgagcctcccaagtaactgggattacaggtgcatgccaccacgcccagctaatttttttgtattttagtagagacggggtttcacagtgttgcccaggctggtcttgaactcctgagctcaggcaatccacccgccttggcctcccaaagtcctagattacaggcatgagccacagcgcccagccgctttgtttttttttaagaatttgaca

SEQ ID NO: 668467 - DNA, 621 bp, Homo sapiens
tactgctagagtaattaaaacattatgccacaggggtagaaataagtagtcagatcgttagactagaaaccaaaagtagactcaaatacacaaagaaatagggtttatgataaaaatcacattacaaatcaataggcaaaagatggactaaataatactgttcaataaattatgctggcttaacttgctggctgttcaaaaaaaagttaagccagattgctacctcattcctttctccaaatagagtatggtggctcaaaattttttaaaaaaatatagctaaatacattatagtcttggtgtaggcaagaaatattttcaagtagaatagaaaactcacaagccctaagaaaaaaattgataaacataattgcatacaagtaaaaaggtctctacaaccaaaagaattgttgtaagtactaacatttttccaaaaaataaatagaaaagaaggtttgyatcaggagctaattttctatcaagagtatatacaataaaaaagaaaaagactcaaaaaatttaaatgtataaaagatgctaaatctcactagtaaattttaaacggcaaatcaaactaatgagataccatttgtctcctatcacactgtcaagatttttaga

SEQ ID NO: 668468 - DNA, 917 bp, Homo sapiens
agatataaagaatagtattatgcatgtgtttagtggcttctaagcatcttttttttaacttcagtcatttaactttatcaatttcaagattccttcaagaattgaatagtaatataatttggttagggattttgtcatttgcttataaaataatgaattacataatactcatgaactctcccagctacaatgcatttataaaccagaatagaaagtagttgttaaaaaaacaacaacgtccaagatgctggggatataaaaatattggaaaaacagctttgtccctcagttagtcaaagtttaatatgatggtggtgatggatagatatatatgtatgcaattaatagctaccaagagatttcttggtttgtgtggttatgtaagtataaacaaaatgctatgtatatatagtactgggaaagtgctatggaaaaacaggaatgtaagaagttaattatgaaatgagcttttaggaaagcttctcaaaagagttaacatttgagctgagccctgattgatgagtaaaatttaaagagcactaaagatcctaggcaagtgccaatacaaacaaartctttaataatgttactagaaggaaagctctatgaaggcagagtccttgtcctgttgcatgtgactgacatatagtgggtgctcaaaaaatatttgtcatgtaaatgaataaataataaaaatggcatgtaaacaatctggttattgagaaatagttcactttcttcttgcatggtttagatttggtggtggtgaggacattcttttcaattatccttggaatagctaaagaacatagatcatttctataatatacaagtgtatgaaaggtttgtgtaaatataatttattgaaatatctgggaaaaggtatatagaaagaaataattattagaacctttaaa

SEQ ID NO: 668469 - DNA, 1308 bp, Homo sapiens
tttgtaatgatctaatttacacagtactcaatatttgggaaattctaatctcccyaacgtgaggaagtggttgaggattagcaaagcaataagtgtttagcaaattgctaatatagtacaagtgaagaacttcagaatctgcttgaattctgttaaatgcagcaactaaataaatgccacctcaccattttggatgcagtagtgattattcctccaaagcatccagctaacaaatgaactttattccctgggccacacagatccagtttgtaatttacagatatctcaccttccatggagaattcacatcagtagaaattatattaagaatacctcacagctgcaaatacaaagctgcagctttacttagaatgttatttgcattaaaaaatcaatttttatagctctaagattctagagaagctatattctatttaatacacataaacaatacaaaaatgatagtaaaagtttaaaacttagacatctgttttttaaataaattaaagttttaaaacacgcataaaaattcatcgcactgaaaaaaggaagcaaacagctttaaaggagtagttggttaaaaacatattaaaaaaccacgcaagtctccaaggaacaaagtttgacttttgtaaaacagtggaaaattttaccttaattttatcaatgtaattcacttctctgtgattgaacacttcatgggctccattttgcaaaacaatcttttgtccttcctcagtaccagcagtgcccaaaatctttaagccataagctctagcaatttggcatgctgctaatccaacctgaaaaacaaatataacccaagagttatatattctctacactcctgtaaacacttaaatacatacaatgaacttaagattcctataggacccaccctaactttaaggaacttaagagtgtaaatgaagaaataagaaaaacagctaactttaattgagcatttaaaatattccaggaaccatactaaataatttctacatattgttttattctatcctcacaatgaccctataaagtagatactattattgtccctattgtacagataagaaagttgaagcttcaaattataagtaatttggccaagtcatatgcggagatggaaacaggagttagaccagtctgactgcagaacttgagtttttaaccactgcatcaagatgtttgcagggtttaaagatgatcagaacatgctctctgacttctttgtgcatatgaaattctaaataacaaatgtaaggcctccaccatttaagtagaagagataggtatatgggcaaatta

SEQ ID NO: 668470 - DNA, 1308 bp, Homo sapiens
tttgtaatgatctaatttacacagtactcaatatttgggaaattctaatctccccaacgtgaggaagtggttgaggattagcaaagcaataagtgtttagcaaattgctaatatagtacaagtgaagaacttcagaatctgcttgaattctgttaaatgcagcaactaaataaatgccacctcaccattttggatgcagtagtgattattcctccaaagcatccagctaacaaatgaactttattccctgggccacacagatccagtttgtaatttacagatatctcaccttccatggagaattcacatcagtagaaattatattaagaatacctcacagctgcaaatacaaagctgcagctttacttagaatgttatttgcattaaaaaatcaatttttatagctctaagattctagagaagctatattctatttaatacacataaacaatacaaaaatgatagtaaaagtttaaaacttagacatctgttttttaaataaattaaagttttaaaacacgcataaaaattcatcrcactgaaaaaaggaagcaaacagctttaaaggagtagttggttaaaaacatattaaaaaaccacgcaagtctccaaggaacaaagtttgacttttgtaaaacagtggaaaattttaccttaattttatcaatgtaattcacttctctgtgattgaacacttcatgggctccattttgcaaaacaatcttttgtccttcctcagtaccagcagtgcccaaaatctttaagccataagctctagcaatttggcatgctgctaatccaacctgaaaaacaaatataacccaagagttatatattctctacactcctgtaaacacttaaatacatacaatgaacttaagattcctataggacccaccctaactttaaggaacttaagagtgtaaatgaagaaataagaaaaacagctaactttaattgagcatttaaaatattccaggaaccatactaaataatttctacatattgttttattctatcctcacaatgaccctataaagtagatactattattgtccctattgtacagataagaaagttgaagcttcaaattataagtaatttggccaagtcatatgcggagatggaaacaggagttagaccagtctgactgcagaacttgagtttttaaccactgcatcaagatgtttgcagggtttaaagatgatcagaacatgctctctgacttctttgtgcatatgaaattctaaataacaaatgtaaggcctccaccatttaagtagaagagataggtatatgggcaaatta

SEQ ID NO: 668471 - DNA, 586 bp, Homo sapiens
ctactttaaacaaaatcaatgtggttttaatttacttctgaagattctgcaataatgtttgactttcaagataactatgaaccttctgaggaatgtttagtgtgaatttattcaagcaagaaaaaagtagtttattatggcacagtagccttccaacgtctagaaatcagttaagatctctacagaaatacgtatcagtggtcactttttaaaacagctttaatatctatttatattatgggttaatactacccattaggtaccattgcaatttatgcttagtggctctttattcatgctactggggagggaaaactctaatatatatcattatattgttaaattttcggtkaatattttctccttgcatcactaaactaatatgaaacttttttttaaattttatagtccagagacgtaaaaatagtaattaaaaattatcttttaagctgcagctgagtattcttttagaaatgacctttaagattgcttattgatcaaatatgggttcttattccattgcagcataataaaaacattattgtccctcagatattgtttttttgcctcatatcgctatttcttc

SEQ ID NO: 668472 - DNA, 669 bp, Homo sapiens
aagagtgtcagcaccaggtgtgtggatatgtgtttagaggtgaggatgtggcccggatggagaatactgagagcagggagactctgtgagacatgttaacayggtatgggcgataggattgcatgttgaagggtcatggtttgttgactcctgtgttcttctgtggacatctctggcctctttgcacggtgatctctcatgtcctgacctctgacccattctcagtctggagaagaaaggccacgtgtacctggttggctggcagaccctgggcatcattgccatcatggatggagtagagtgcatccacacctttggtgctggtgggaccccagtccagatgttcttcctgcttcctcctgatcccaaccattcgggctgctctccaaacactgtcctactcccaacccatgggtgttcctcagtgtcccaccttccctatctaaataggcacttcagtcaaattcttcttccttagaaccccaactcagtccttgatcccttctcagctcccacccctgtgcttaactatggcctcccacaagggctactcctcactctacgccccacttgccacttttcctcccagtcccattttctccccctgaagcctagaaccttcctttcctatatagccaatcactcctctctccttgttcttaaacttcc

SEQ ID NO: 668473 - DNA, 597 bp, Homo sapiens
ttggttttgggttttttcttttttgagacatagcctcgctctgtcactcmggctgaagttaagtggtgtgatgtagtctcactgcaacctccacctcccaggttcaagtgattctcctgcctcagcctactaagtagctgagattagagacacccaacaccacacccagctaatttttgtatttttactagagatgggattttgccatgttgtccaggctggtctcgaactcctgaccacaagtgatccactgccatggcctcccaaagtgctgggattacaggcgtgagccaccacgcccagccatgttcatagttcttatacagtgatacaactaaaaacttttttaagtgaatgcaaatgaaactaaaattccaaaatactcataaaatgaagtgaacattaatttgtgtggttatgttgttttcttgaaactgaattgtcaacttacaatgtgaatataggactggctgctaataacatagttcctttctaattaaaatagagctgtgtgccatgtgatgattcagctctcccaccacttttctctgtccaaactactgtgaaaccttcattcccatgggcaagcacacagtg

SEQ ID NO: 668474 - DNA, 587 bp, Homo sapiens
tggaactttctaagtggaatggtttctttgcctctgtgtggcaagtttctgctctgtgcatttcatatctcttctctggcacttttccctttcatcttaccttctggctaaaagagtaacttctagctcaaatttaattaataaatttaaaattttaatttgaggaaggctatgttttatagtgtaaccttattaaacaccatctatttcactgggctgtagccatctcagtttttctgattaaattgcttaaggtctgcttatgttctctgcaatgtggtctgttctttgagtcatattgttgtccaccttgatttagtgccattgtccctkcatgtccatgtattcattttgtttaccgtttaccaaaaaaaaagttacagccgggggcggtggcttttgtctgtaatcccagcactttaggaggctgaggtggatggatcacctgaggtcaggagttcgtgaccagcctgaccaacatggcgaaaccccacctctactaaaaatacaaaaattagctgggtgtggtggtgcacacctgtaatcccagctacatgggaggctcaggcaggagaatcacttgaacc

SEQ ID NO: 668475 - DNA, 587 bp, Homo sapiens
tggaactttctaagtggaatggtttctttgcctctgtgtggcaagtttctgctctgtgcatttcatatctcttctctggcacttttccctttcatcttaccttctggctaaaagagtaacttctagctcaaatttaattaataaatttaaaattttaatttgaggaaggctatgttttatagtgtaaccttattaaacaccatctatttcactgggctgtagccatctcagtttttctgattaaattgcttaaggtctgcttatgttctctgcaatgtggtctgttctttgagtcatattgttgtccaccttgatttagtgccattgtccctgcatgtccatgtattcattttgtttaccgtttaccaaaaaaaawgttacagccgggggcggtggcttttgtctgtaatcccagcactttaggaggctgaggtggatggatcacctgaggtcaggagttcgtgaccagcctgaccaacatggcgaaaccccacctctactaaaaatacaaaaattagctgggtgtggtggtgcacacctgtaatcccagctacatgggaggctcaggcaggagaatcacttgaacc

SEQ ID NO: 668476 - DNA, 587 bp, Homo sapiens
tggaactttctaagtggaatggtttctttgcctctgtgtggcaagtttctgctctgtgcatttcatatctcttctctggcacttttccctttcatcttaccttctggctaaaagagtaacttctagctcaaatttaattaataaatttaaaattttaatttgaggaaggctatgttttatagtgtaaccttattaaacaccatctatttcactgggctgtagccatctcagtttttctgattaaattgcttaaggtctgcttatgttctctgcaatgtggtctgttctttgagtcatattgttgtccaccttgatttagtgccattgtccctgcatgtccatgtattcattttgtttaccgtttaccaaaaaaaaagttacagccgggggcggtggcttwtgtctgtaatcccagcactttaggaggctgaggtggatggatcacctgaggtcaggagttcgtgaccagcctgaccaacatggcgaaaccccacctctactaaaaatacaaaaattagctgggtgtggtggtgcacacctgtaatcccagctacatgggaggctcaggcaggagaatcacttgaacc

SEQ ID NO: 668477 - DNA, 623 bp, Homo sapiens
gtcagtgcccaaaattggcatgatactttaagggtgtgaccaatttctaagtttagcagaaggatattttcccagctcctggatgtcagagacctattaatatatttcactatcacagttagctttataaaaacagccatactatactgctgactcatactcagctggtggtctcaagcctaaccagtttattaaactagaaatgatgtccaataygttagatgacagaaaaaaatatttgaaaagttcctgggattttgaaccctgggccaaaatttgaagcttatcaggaagaccacgaaaagctcatcatttatgtttaaaaaaaaaaccaacaatatgagtacaagataaggatgatttcccttaacacataaacattgaaactttttggattaccatgatttaatattggcaacaatattgcacaatgtaatgtgcaaaattcattacattttttgacagccatttcacattgttgccaatgtgaaaaaaaaattaatggctaactgttcacagtctctcccttttctccttcagccaaggaaagttctttcttggcaagttcagttccttggccttgttaagagattgatggatcgagtaagagggaaaaggtttga

SEQ ID NO: 668478 - DNA, 2764 bp, Homo sapiens
tgcaaactaaactgaccgaagtgcattaatgagccagtgagtttattgctgcaaacctggagcttcatcttgctgggaacctggggtgatgagtgagaaaaatgggtatttttactctaactcccatccctcattggctgggagctactcccaaggggtgtgacactcccagaacttctggccttccttcaatgcatactgggacaatgttcttgggaagaatcctgggcattggagtttggagaaggacctcattggcatacactgtaatggaggcagcagagtggccatgggtggagcgtggcagtgtctgctccagttctgtcatcaataaaggatccagactgagacctaatgaacaatgtacacttaactgagggcagtcacaggcagtcctctacaccactgggaagtaggatcatctttatgttgtgtcagtaatcaatatttctgtcactatcaatttctcacatagctattagatctctttcagtctttggagtttttaaaatttttttcctcttcctggaaaaaaaaaatattgagtttaaaggagacctttttagtaacaatcatacatgtcctgacttactaagatactgagatgtctacagggctaggtaggatttggaatacatatggctagaaattttaattgatttttataaattattattaattgaaataaattcattttcttatctcagaagtgataatcaagcggattttggcatcccccccttttttaaaagttttatcttatatcctctgccccattttcaagaccattcatgaggaacaagcataaataattgccgtttatagtaagtgcttaaacagacaccatcgcatggtttcaggcacataactgaagtgttctttgtgagtaatgaaataagggctgaaaattgaagattgttaaaaacgataattatttttaaaactggaaaaattcgatgagatgtaaatgttatctggagtattataagtctacaaatattagcatagggtttgaaaatgtgttttggagacaatactgtatccagaaatgcaaactaaattgaccaattatcaatgtccaaactctcttagcccttctaaccaaaggctataaaggcagtgtttatacacaagttataggaaaaatttaaaaggaaaaatatttgatgttgctattcatagtgttccttttgttgaaagcccaagttcacattgttaagaccgactggcatggttctcagggacagttcagctcttgtgtgtgtccttggtcaagagagggattagagacctgaggagtcagacccagttttgctttgttaaatagctctcttctcatgaaaggaaaggtcagtagtaagaacacaattatctttgcttcaaccctaaaccttgaccagtctgttaactactgaaagcttgagtcagaaacagcttcctcccactcatggttttatagaaattgtttaatagggtacttacttcaacaatgtatttgaattgcagtgtgagtatgaacaagtatgaacgtgtctttttagtacctgttcatggaaggaagaaaccatagtagcctacagccactgggaacatagctccctctcttcctctaatgttgcatggctgtccattctaaggagcaataatgtgaagtctaggactagagaaaacagactaacttgatgatattctataggttttaggcaaaattatttacttgggggtagctattattaatagaattatttgcatttaacagaagatgtcgtgtcctttgctccctgagatttaacttccctgtatcaaattgagcagccaccagctttcatcaaatttcaccagatttcatcaaatcttactgagttctcctctatgtcagaatctggtgtagactctggagctacttacagaatggtttcttgttttacagcctctgtgcccaggtttatgtggaaacaaaatcataatatgagtgtgatgagggtgaagaagtgaaggaaggaaggagggagggagatgcaaactcactaggcttagacacacttgggtgggtgtttctctaataaatcccttccttctctactgcagagcagtgcagaaaagcgatctgaagaaccctctgacataaagccagtagaccctcatccacatcttgcttcttctccttgaactgacagaaagtcacatacaagccccccagtgtttcaactcaacattttttgtttctccaagccaccactgctgttgtaaaacctacttaatcttactactggcttccaactctcacttccatcaataattactacccagagacaagaactaatccacataggaagaccttggaagcttttattgttcaacacaaaagcaagactaccaaagttcatttgtaagaggaaagcagaacttagtggtgacttttcaaagatgttttaggactagtcctaaaatgaggcatcaaccaatatcttggttcatctaagaaagtccctcagtagaacactgtcaggtattatctctatgaatacccttactcagataaccatatgacaaacttgctcaggaaataayaaagtgtttctttttagaactatgggattggtctcaaccaatataactaaattattaaagtatggagtggcactagatgcagagaacatttcttacccaaagtgtcatgatatcaaagatgaccaatgttctgggtactagaaatgtagtggagaaccagaaagacaggatccttctctcctgcagactatgt

SEQ ID NO: 668479 - DNA, 1252 bp, Homo sapiens
agagttttgaaaataatactagctacaaaaataaatcaaattactttttaaaaaggaatagactttatcattccttttctagcaataccattccacaccgaagagaaagtaaaatactaatatcaacagaaaaaaagccatgactaggctgacatgaaaataaaaatataatacactgtaaaaataaaataaactgcaagaactcttggaggtaactaagctccaatgtcaattttcactctaatattttctgccaaatattgggattctgagctgctttctgttgtctgcatggtacgatgggagattgggggcacgaggggaagcctaggaactctccacggggagattttaatatgagaccattgcataaagcttacatattcaggataagaataaggaaggagggacacattgtaccatagagtggacataaatcatgccctcggtgctaagtggagaaatctatcatttcagtttatgctaccagtgttgcttgaaaagcctcaagcaaaaaaatttaagaaaggacctagattggtaggtcctgggactggtagtatcccaaggtgacttaaacagtaatcctctccaaggaaatgcatcatcaactatgatgtttgagtactctccacatgaaaatccaaggaatataggtgtattcttaaaaatgcaaaccacaaaaagacacatgacaccatgagtaagagccagcaaaatctgaaagaaaagatttcagatattgaaatctaatccaatatattaaatcataakgtttaatatgttaaaaatcatgtaagagatgcttgaagatataatccaaaagaaaatgaaaaacaagaaaaattgatgaagtagaattttgaaaaatgcaaaccataataattgaagttaagaacccaatgaatgaattggacaggattttaaactgcagagaactaatacagtccaagattttccaaagaaagtatttagaaggcatcacaaagaagaaacagatggcagatatcaaagagatgtggaacatagattaagaaggttcctgcactgactgggaagacattaaaagtgacaatattagactgtggcacataacgctgttaactctaagatgacaactaaaagaatagcaagagtgtttcaattcctagcaagtggaggaaagatacagaagaaataaaaagacacggaacaagcaagtaaacactactattaataaattacagatttaaatctaaatgcaatcgtaagc

SEQ ID NO: 668480 - DNA, 1252 bp, Homo sapiens
agagttttgaaaataatactagctacaaaaataaatcaaattactttttaaaaaggaatagactttatcattccttttctagcaataccattccacaccgaagagaaagtaaaatactaatatcaacagaaaaaaagccatgactaggctgacatgaaaataaaaatataatacactgtaaaaataaaataaactgcaagaactcttggaggtaactaagctccaatgtcaattttcactctaatattttctgccaaatattgggattctgagctgctttctgttgtctgcatggtacgatgggagattgggggcacgaggggaagcctaggaactctccacggggagattttaatatgagaccattgcataaagcttacatattcaggataagaataaggaaggagggacacattgtaccatagagtggacataaatcatgccctcggtgctaagtggagaaatctatcatttcagtttatgctaccagtgttgcttgaaaagcctcaagcaaaaaaatttaagaaaggacctagattggtaggtcctgggactggtagtatcccaaggtgacttaaacagtaatcctctccaaggaaatgcatcatcaactatgatgtttgagtactctccacatgaaaatccaaggaatataggtgtattcttaaaaatgcaaaccacaaaaagacacatgacaccatgagtaagagccagcaaaatctgaaagaaaagatttcagatattgaaatctaatccaatatattaaatcataatgtttaatatgttaaaaatcatgtaagagatgcttgaagatataatccaaaagaaaatgaaaarcaagaaaaattgatgaagtagaattttgaaaaatgcaaaccataataattgaagttaagaacccaatgaatgaattggacaggattttaaactgcagagaactaatacagtccaagattttccaaagaaagtatttagaaggcatcacaaagaagaaacagatggcagatatcaaagagatgtggaacatagattaagaaggttcctgcactgactgggaagacattaaaagtgacaatattagactgtggcacataacgctgttaactctaagatgacaactaaaagaatagcaagagtgtttcaattcctagcaagtggaggaaagatacagaagaaataaaaagacacggaacaagcaagtaaacactactattaataaattacagatttaaatctaaatgcaatcgtaagc

SEQ ID NO: 668481 - DNA, 2290 bp, Homo sapiens
tgtccaagcctctccagttgaagacacagatggcctttgggaagttttctagagcccctgctacagaattttatttttcctttttaaaattttttggagaagggagagaaaaattttgcttattacataggcagcacctgtttaccatgcatccctaatttctggtgtcataactaattatttgatggctccgagaggaacttcccattcattatatgtcatttagcagcaaataacttaaagcaaagcaatagttcgacaaaatatatgctgcattaagttggatgtgaagttatgaggggagagaaacagacaactctcacactgtagagttttaaaaatatatttgtttaaaataactaattgctgtgagtgccagyagagttgcaaaggtgtgggttgtcagaatctggatattcttatctcttcggtcaccctactgccaaattactaagaaatatgatgagaacacgctttatagtcaagaaggtgattttcaagaaataagactaatgttgaggttaaattgatttattgaaaatctggaataaacactttcttaattttcttatggagagccctgacctctgggaataaaaggttttgggttttgttttttctgtatccaccctaaattacctgtctgatcgtaaagaggcttttgtgacacataattattttatctaaagacattctgaggtttttttttttttggttgttttcttcttgtatctccttataaaaatattcaaatggtagaccctgggttaaaggactttctattaggttaacatattagattgccaatatattatttttttacttacaaaagtgtcagttttatgcagtttaacttaatactggtcttgaagccagttactggccaaagtatgagataaaccatctttatttatagacaacaatcatataatcctggatttctactgattcccactatagcttgctggtttagtagccatttgagctcaatatcattaactataaatacctcaagcagcagacataatagggatttgagaacatggctggtacagtagaaaacaaaactgtcaaaacaaccagttgaatatcttgtctcaacactaaattgggctggtttacacacctaataagaccaatcatgttccaactggtcagagagaggatcaaaagccaactcattacaaagtggtctgttcagtggtcagcaataaatctactcaatatggttgtgaacttggttgagttgagcatcaaaaactacttatggtgggagtgctgatggtaaaaggacaaatctactggagtaactagagtttctcattactcacatattatcaccactagcagaaatggtggaaagctcttaactgcgagtttctcatcttacttgttgagaataatcacttgtacccaaattcagatattgttgccttggtactaacatactggaatggtagaattcaaagaagcagataatctggaaggaaatacaactatggctaacaatggctaccttctccaggtgcatggaggaatcatacctgccagcttctctgagagaagaaggggtactggatcctgaattacaactgaagctcattctttcacaaacagcaacaagataaatgagggtcaaataatctagcactgtgtgaaatttcaaaactcaacacttccacccagagttaaagatggtcaaatagagaaaacagaagagtgaaccaaagttcaattggaagtagaaccactaagataaagatagatagatatctcatagttatatgtatgtgtgtatatctataaaatagctataaatacatataaatataatatatggttatatctatatgatatatagttataagttagttatcaatagatatatagatccattatatatagatataactataattatagatataaccatatagttatataactacatatagatataactagttatatagatatacatagatatatagataactatatagttatataactatatggataactatatatatataaaaccattacatataactatatagttaatatcaacttaatacatagatcttgaagccagttactggccaaagcattagataaaccatcttcgtttatagacaacaaccatataatccttggtttctactgattctccctatggcttgctggtttagtaaccatttgagctcaatgtgtctatctacctatctataactacttctcaataaataggttcatcttaagtggaaacatgtaagtcgtagaattctaa

SEQ ID NO: 668482 - DNA, 652 bp, Homo sapiens
taatatataatatatgtaatatatattatrcactgtataatatatttttatatattatatattgtatattttatagattatatattatatatatatataaggtaattcattaagtactttgatcttcccaacagcctaataaggaatgttaaatacacctaatttccaaatgagaagccggtctcacagaaatgtaaaacacagcatctgcagtccatgctcacagaggggaagagtgaatgttggtaacagtgcaaccattgccagagtcaatccctgcctttgcagtctaccaccctatacaacccggaaggaatatggcattaggattgcttggccaaaccccaggagtgattggtttacactcttgtcatgtggctgagaatcagttgtttcagcctgaacctcttggatcagccctagaacattggaaaataataggacctgggttgaaacagccccattcatctctatcaggctggtttaagcatctgagagacagtagccagggctgtgctgtttgtacccgtgacttctcctattgtgttaagagtcatttgtaatgccctagggcatcctaaaaaaaaacatgcccacagaagccgacagaaaagtgaggaaggaactgaatgctatcatttgcagtcgcttc

SEQ ID NO: 668483 - DNA, 652 bp, Homo sapiens
taatatataatatatgtaatatatattatacactgtataatatatttttatatattatatattgtatattttatagattatatattatatatatatataaggtaattcattaagtactttgatcttcccaacagcctaataaggaatgttaaatacacctaatttccaaatgagaagccggtctcacagaaatgtaaaacacagcatctgcagtccatgctcacagaggggaagagtgaatgttggtaacagtgcaaccattgccagagtcaatccctgcctttgcagtctaccaccctatacaacccggaaggaatatggcattaggattgctwggccaaaccccaggagtgattggtttacactcttgtcatgtggctgagaatcagttgtttcagcctgaacctcttggatcagccctagaacattggaaaataataggacctgggttgaaacagccccattcatctctatcaggctggtttaagcatctgagagacagtagccagggctgtgctgtttgtacccgtgacttctcctattgtgttaagagtcatttgtaatgccctagggcatcctaaaaaaaaacatgcccacagaagccgacagaaaagtgaggaaggaactgaatgctatcatttgcagtcgcttc

SEQ ID NO: 668484 - DNA, 652 bp, Homo sapiens
taatatataatatatgtaatatatattatacactgtataatatatttttatatattatatattgtatattttatagattatatattatatatatatataaggtaattcattaagtactttgatcttcccaacagcctaataaggaatgttaaatacacctaatttccaaatgagaagccggtctcacagaaatgtaaaacacagcatctgcagtccatgctcacagaggggaagagtgaatgttggtaacagtgcaaccattgccagagtcaatccctgcctttgcagtctaccaccctatacaacccggaaggaatatggcattaggattgcttggccaaaccccaggagtgattggtttacactcttgtcatgtggctgagaatcagttgtttcagcctgaacctcttggatcagccctagaacattggaaaataataggrcctgggttgaaacagccccattcatctctatcaggctggtttaagcatctgagagacagtagccagggctgtgctgtttgtacccgtgacttctcctattgtgttaagagtcatttgtaatgccctagggcatcctaaaaaaaaacatgcccacagaagccgacagaaaagtgaggaaggaactgaatgctatcatttgcagtcgcttc

SEQ ID NO: 668485 - DNA, 628 bp, Homo sapiens
atgacatcacagaatacagacttcatggcatcacgttgtgagttctgtgtggagcattttaagaggaatctgtctgcgtaccctaagtgatggaaaagccgcttgtagattcatgggagtcctgacgggtggctgcacttaggtgagaaatgagttaaatgcaatcaccctaccagttgtgggggtcggggggtgcgggtggtggtggtgggggggcgcggggggagggcggcaagctccaggctggccatgactcacctacatagagacaagcacacacttacaagccaagaagcgagtttggcaagtttggccgagagcaacaaagggatggaatgcttccagaaggagctctctgaagtgcctgaagggcaagactgagagtgactgagggasagctgcattcagagcagctagtgttcagtcttggaagatgccacggggtctttcttttaaatctctgcagtttcagaaagcaggctacacctggcacttgtgatagccagagcaaaggaagctggtggagaaagaaatgtgtctgtaacacagagttccaaaaacagcattctgccagctctcaatcctgccctttcctgattgtgacttgagagagaacgaagttgccctg

SEQ ID NO: 668486 - DNA, 589 bp, Homo sapiens
cgaatgcccctgccaaacccagccacctgttaatgaagctcagctcctcccctcttcccttctcatttcatggaaatggagagtgcaggactgagatttatgcattgggaatgaagcaggagggtttttccaagcgctggccagaacgctgaaatcaaacctgtttcagtgaaaagtgcaytgttgctcttgtttaagaggcattcacaggcaataagcaaatcacctcaggatgaatacatttggttcctgattctgaatctgtggaaagattgttaaaatataaagcaatatacaccagttactgacccactgggaaattctgtagctccataaagcacgttaaaacattgtagttatttcagtaagtctgtgtttgcaggctgagatgctacggaatcgggcagggaaggagaatgccttgcaattagatgaatttgccaagagattttaagtggcatgaaatgcctggtatcagcctctgggaatcagcgtaacattcttccctgttggagtttattccactaggatgttatcatcggtgccctagcaggactcccagaacccttgggaagtatttttggatgca

SEQ ID NO: 668487 - DNA, 589 bp, Homo sapiens
cgaatgcccctgccaaacccagccacctgttaatgaagctcagctcctcccctcttcccttctcatttcatggaaatggagagtgcaggactgagatttatgcattgggaatgaagcaggagggtttttccaagcgctggccagaacgctgaaatcaaacctgtttcagtgaaaagtgcattgttgctcttgtttaagaggcattcacaggcaataagcaaatcacctcaggatgaatacatttggttcctgattctgaatctgtggaaagattgttaaaatataaagcaatatacaccagttactgacccactgggaaattctgtagctccataaagcacgttaaaacattgtagttatttcagtaagtctgtgtttgcaggctgagatgctacggaatcgggcagggaaggagaatgccttgcaattagatgaattygccaagagattttaagtggcatgaaatgcctggtatcagcctctgggaatcagcgtaacattcttccctgttggagtttattccactaggatgttatcatcggtgccctagcaggactcccagaacccttgggaagtatttttggatgca

SEQ ID NO: 668488 - DNA, 724 bp, Homo sapiens
aggaagcttggtagtaaacctcctcctattctctttcctctgactcagaaacgtgattttccagaaagcagggactgcgttagcctaggtctagaaacaaggatcaggaaagaaaagccctttcagcccctattcctaccctagatggggatgtggtcagaggaaaacacaagacttgttgtctgagccccctgagagtttgggattgtttgttcctgaacgaacttagcctgtactgactgatacacagcccactgtcctctgggaggaagyatctccatacccagtccaagcagaagtgaggtgtgagaaaataaatggagagttttcatgtctgatcctgaagtgcttggttagttctcaggaataacatcctcagctttttacgtcagcatagaaccaagattaatgggtgctgatcctggtgtgaccattacagactcaggcacttgctgaaaccctcaggagccttatgggatgaagaatcagaattgggcatgatataggatgcactcctcatgagacagggagaatgatcttgtaaggttactcagaaacttttcttttttttttttttttttgagactctgtcacccaggcaggagtgcaatggtgtggtctcggctcactgcaacctccgcctcccggcttcaagtgattctcctgcctcagcctcccaggtagctgggattacaggtgcgtgtcaccacacccagctaatttt

SEQ ID NO: 668489 - DNA, 592 bp, Homo sapiens
tcatatattgcataaattgttttttgtaaggaaacctgmcatctgcatttgaaagctacgcaaatccaaatataaaaaataatccaaaggaaagtctaggaccatattttcagagagatatatatcctgaaacaccttggacagcttacataatctatacagaggccagcacatggcttactttttaaaatatctcctggtgcagatatgaaagccaccatcagcaccaataaggctacggtgccacagtctggtacacagctccttcttgttccctcagacatgataaaggcgaatcagccatgaccgttgctctttgatcgtattactctttcgtcatgtgctccctgcttttattgtcttgtcttaactttcctttccttccttccttcttccgtttgttcatatttacatatttatctgatattttttacttacaaggcatctttcacgttatcttgttttattcttgagtgaagcaagtatcatcacaacttttaaaagttagaaaactgagacctgaaatgctacgtgacctgttcaggacttcagagtaaggggatgaacaggagcttcattttaagttttctga

SEQ ID NO: 668490 - DNA, 592 bp, Homo sapiens
tcatatattgcataaattgttttttgtaaggaaacctgccatctgcatttgaaagctacgcaaatccaaatataaaaaataatccaaaggaaagtctaggaccatattttcagagagatatatatcctgaaacaccttggacagcttayataatctatacagaggccagcacatggcttactttttaaaatatctcctggtgcagatatgaaagccaccatcagcaccaataaggctacggtgccacagtctggtacacagctccttcttgttccctcagacatgataaaggcgaatcagccatgaccgttgctctttgatcgtattactctttcgtcatgtgctccctgcttttattgtcttgtcttaactttcctttccttccttccttcttccgtttgttcatatttacatatttatctgatattttttacttacaaggcatctttcacgttatcttgttttattcttgagtgaagcaagtatcatcacaacttttaaaagttagaaaactgagacctgaaatgctacgtgacctgttcaggacttcagagtaaggggatgaacaggagcttcattttaagttttctga

SEQ ID NO: 668491 - DNA, 634 bp, Homo sapiens
actagaatcccttctacctcaccctgcctctaaaatggcctgaacagctcaatccatctccctgcatttgtgttaaacagatgatataaatgtttaaaatatcacaattcctttcttttatcatgaaagcaaagagatgctggctatcataggtttttcacatcagcaatttctatttgaaacctatttcactattatattaygccattttaatgaaatatatcaaacctagagacaggaagagaaaatagcaaccacccatatactcattattcagttttatcaaaccataacattttgtcatatttaactttagtttaaaaaaaaaacattataaatacatttgaaacatggtttccacccctccctaataccatttcccacttcctagaaaaacattatcctgaagttgatgtgcactttttgaaaatgtatttatattaaaaatacagaagattagctagtggtttcttatatattacatgaactatgcgtttggcaatatggcagtcaagatattctaaaaaaccttgctaaaacagagcaggagaggcttaataaattacaacaagattctctttaaatacatatttgagttcaggcataagtaggggaaatctggagtatgaaaaaa

SEQ ID NO: 668492 - DNA, 634 bp, Homo sapiens
actagaatcccttctacctcaccctgcctctaaaatggcctgaacagctcaatccatctccctgcatttgtgttaaacagatgatataaatgtttaaaatatcacaattcctttcttttatcatgaaagcaaagagatgctggctatcataggtttttcacatcagcaatttctatttgaaacctatttcactattatattatgccattttaatgaaatatatcaaacctagagacaggaagagaaaatagcaaccacccatatactcattattcagttttatcaaaccataacattttgtcatatttaactttagtttaaaaaaaaaacattataaatmcatttgaaacatggtttccacccctccctaataccatttcccacttcctagaaaaacattatcctgaagttgatgtgcactttttgaaaatgtatttatattaaaaatacagaagattagctagtggtttcttatatattacatgaactatgcgtttggcaatatggcagtcaagatattctaaaaaaccttgctaaaacagagcaggagaggcttaataaattacaacaagattctctttaaatacatatttgagttcaggcataagtaggggaaatctggagtatgaaaaaa

SEQ ID NO: 668493 - DNA, 1036 bp, Homo sapiens
accaatcagtggccaggcacagtggctcacacctgtagtcccagcactttcagaggccgaggcaggtggattccttgaagtcaggagctcaagaccagcctggccaacatggtgagactctgtctctactaaaaatacaaaaattagcccagtgtggtggtgcatgcctgtaatcccagctactcagaaggctgaggcaggagaatcgcttgaacctatgaggcagaggttgaagcgagccaagatcacaccattgcactccagcctgggtgacagagcgagactctgtctcaaaaccaatcagcacartgttgacggtcattcagctagaaaagagaactagagcagggccttgcagaataagcctggctaaactaagaaacggcaaaaaaaagagagaggcctacaaggtgacagtcctactctcctacaaaagacgcagatcatccttttttagacaatggaatatggtttctgtaccacttcgaatggcaaaatgagtgtgacgtcaaaagttaacgagcatcaagaaaaaaaatctttttatattgcagttatttaaggacaccaaatgcttttttttttaaaaaaaacactgtcctttactaacaacacagatgtttcaaagtgacacttgaaagagaaaacaaacagcccctactccatgtcacttacagaaggtacaagaaaaacagcagagtttccataagatatcacccagttcgacattttctaattaggtactcagattataaaacctgagtaataaaaccttcatagttttactgtaatttttatatgtacatatatgtacacacacaagcatgtgtcacttaaggaagaggatacactctgaaaaatgcttcattacgcaattttgtcattgtgcgaacaccatggagtgtagtcacgcaaacctagatggtatagcccactatgcacacctaggctatgaagtatagcctattgtgcctagtctacaaatctataacagcatgttaccatactgaatactgtaggcaactgtaacacaaat

SEQ ID NO: 668494 - DNA, 610 bp, Homo sapiens
gctcacgcctgtaatcccagcactttgggatgccaaggcgggtggatcacttgaggtcaggagttcaagaccggtctgaccaacatggtgaaaccctatctctactaacaatactaaaaattagccaggtgtggtggtgcatgcctgtaatcccagctacttgggaggctgaggcaagagaattgcttgaaccygggaggaggaggttgcagtaagccgagagagtgccattgcactccagcctgggtgacagagcgagactccgtctcaaaaacaaaaaaaagccatttctgaaaatgatttgaagttctagtactgaacattcagataaaattttagttgtcatgtgaagtttgtgctacatgtgggaaaactttaaattgtattggccaggtttttgccttaactctccagcaactttctatagttagaatacactatttattcagatttgtgctctactgtaatgtctgctattataaaatcatatctatttatatttctattctttttacaacctgcattttaaaactataatgtatgtcttgattttatgggcctttaaaaggctatacagatacaggcacgctataaaataataagaccagtg

SEQ ID NO: 668495 - DNA, 1020 bp, Homo sapiens
  misc_feature 241, 242, 243, 244, 245, 246, 247, 248, 249, 250, 251, 252,253, 254, 255, 256, 257, 258, 259, 260, 261, 262, 263, 264,265, 266, 267, 268, 269, 270, 271, 272, 273, 274, 275, 276,277, 278, 279, 280, 281, 282, 283, 284, 285, 286, 287: n = A,T,C or G
  misc_feature 288, 289, 290, 291, 292, 293, 294, 295, 296, 297, 298, 299,300, 301, 302, 303, 304, 305, 306, 307, 308, 309, 310, 311,312, 313, 314, 315, 316, 317, 318, 319, 320, 321, 322, 323,324, 325, 326, 327, 328, 329, 330, 331, 332, 333, 334: n = A,T,C or G
  misc_feature 335, 336, 337, 338, 339, 340: n = A,T,C or G
caccacaccacacctattccaaaactgaccacatagttggaagtaaagcactcctcagcaaatgtaaaagaacagaaattataacaaactgtctctcagaccacagtgcaatcagactagaactcaggattaagaaactcactcaaaactgctcaactacatgggaaactgaacaacctagtcctgaatgactactgggtacataacgaaatgaaggcagaaataaagattttctttgaannnnnnnnnnnnnnnnnnnnnnnnnnnnnnnnnnnnnnnnnnnnnnnnnnnnnnnnnnnnnnnnnnnnnnnnnnnnnnnnnnnnnnnnnnnnnnnnnnnnaaccatttaaccacctttttttttttttttttttttttttcagaatagccagtgtttcctagtaatttattttctaaaaacataaagatccccagaagcgtgataccaggcactctttgtcactgccacaacctttgttccatatgtttgaaatttaccatatgctttgttgaactmtgaatatcttttcagaacttatgtaagtaaattaacatcttggtaatgcactttaactgagacaggtctcagttaatttagaaagttcagtttgccatggttgagatgggcacctacaacacagcctcaggaggtctcgatgacatgtgcccaaggtggtcagagcacagtttggttttatacattttggggagacttgagacattgatcaacatatgtaagatgaacattggttctgtctggaaagactggacaactcgaagcaagggtgggacaactggaagcagggagggggtttccaggtcataggtaggtaagagacaaacagttgcattcttttgagtttctgattagcctctccaaaggaggcaatcagatatgcatttatctcagtgagcagaggggtgacttttaatagaatgggaggcaggtttgacctaagcagctgccagcttcacttttagcttagtgattttggggacttcagatttatttttctttca

SEQ ID NO: 668496 - DNA, 1020 bp, Homo sapiens
  misc_feature 241, 242, 243, 244, 245, 246, 247, 248, 249, 250, 251, 252,253, 254, 255, 256, 257, 258, 259, 260, 261, 262, 263, 264,265, 266, 267, 268, 269, 270, 271, 272, 273, 274, 275, 276,277, 278, 279, 280, 281, 282, 283, 284, 285, 286, 287: n = A,T,C or G
  misc_feature 288, 289, 290, 291, 292, 293, 294, 295, 296, 297, 298, 299,300, 301, 302, 303, 304, 305, 306, 307, 308, 309, 310, 311,312, 313, 314, 315, 316, 317, 318, 319, 320, 321, 322, 323,324, 325, 326, 327, 328, 329, 330, 331, 332, 333, 334: n = A,T,C or G
  misc_feature 335, 336, 337, 338, 339, 340: n = A,T,C or G
caccacaccacacctattccaaaactgaccacatagttggaagtaaagcactcctcagcaaatgtaaaagaacagaaattataacaaactgtctctcagaccacagtgcaatcagactagaactcaggattaagaaactcactcaaaactgctcaactacatgggaaactgaacaacctagtcctgaatgactactgggtacataacgaaatgaaggcagaaataaagattttctttgaannnnnnnnnnnnnnnnnnnnnnnnnnnnnnnnnnnnnnnnnnnnnnnnnnnnnnnnnnnnnnnnnnnnnnnnnnnnnnnnnnnnnnnnnnnnnnnnnnnnaaccatttaaccacctttttttttttttttttttttttttcagaatagccagtgtttcctagtaatttattttctaaaaacataaagatccccagaagcgtgataccaggcactctttgtcactgccacaacctttgttccatatgtttgaaatttaccatatgctttgttgaactctgaatatcttttcagaacttatgtaagtaaattaacatcttggtaatgcactttaactgagacaggtctcagttaatttagaaagttcagtttgccatggttgagatgggcacctacaacacagcctcaggaggtctcratgacatgtgcccaaggtggtcagagcacagtttggttttatacattttggggagacttgagacattgatcaacatatgtaagatgaacattggttctgtctggaaagactggacaactcgaagcaagggtgggacaactggaagcagggagggggtttccaggtcataggtaggtaagagacaaacagttgcattcttttgagtttctgattagcctctccaaaggaggcaatcagatatgcatttatctcagtgagcagaggggtgacttttaatagaatgggaggcaggtttgacctaagcagctgccagcttcacttttagcttagtgattttggggacttcagatttatttttctttca

SEQ ID NO: 668497 - DNA, 3497 bp, Homo sapiens
ctaccactcagggaaattctaaggattttaggagctctgggctaggaaccaaggacaaaaaccagatatatttctcattatgtcataacccagtgggttcttcttatctgctttccatgaaaaaaccagtgcactgagaacagcaggtgttgcaagaaagacagagtttaattatcacagggccagccaggcaaggagaataggagaaatttctcaaatccacttccctgagaattcagaggctggggattttaaggatactttggcctgcagagggctggggaactgaaactattgactagagatgaaatcactgtgatgtctgaattgtctgagtcagcttgtgagatggggggtctcaggactaggcagtgtgtcttggtttgccaaaatgcttaatctgaaaaatacctcaaagaccagttctttaggttacacaatagtaatgttatctataggagtagttggggaagtaataattcttgtgacctctggttacgtgactctggagctgaaagcaacttgtagaaaagcaagctaaataagcagtgaatagttacgtttaaccatgcccattctttaggaaagttcagctcctgccataattctaaccttgtgaccttttgttaacctttcaaatacagtttcaatttttcaacaaggaagggaacaggaaaggactattatggctttcacacaggaatgagcaaaagcaatctagactggtagaagcaagatggagtcagttaagttaggtttcccttactactataatatttgcagttttaattataccacagtacctctatccaatttagcatcaaatgcatctcagttggttcttgtttaattatttatttgacttgtcaagcttatatttgttgttaataattcagggaaaatgctatcccaagctgctatataaaatgacagacataaactattaatcagcttatttttctcctaaaagtagtagaaaatttataatcaccctgtttcataacactgtttttcaaatctcttgactattccaggaattaaaagaaaaaagacagaagtgggacaccttggggagtcagtactaatatacagttttgttttaatcatttaaaatctataagaagatgtatttcaggggaaggatgatattgaataacctaaaaggattatattgaaaaacctaaaattttagtttataaatgtcaaatctgaaaaatactgtatctcttttttttgaaaaacagctaaaaagaaaacatcaaaaggaattaaaaggcaaagcagatcctctttgtcagttgtgtttaactgtgctattgccttttcttgggcaactaattacatgatattactttagtatttcccccccactttttgcacctgcttttgcaactgcgcttgcctgtgaaatggccttatcagacccagctaaattaccgcacacagagggggacttctctgttcaccccagtgcagagcagttacttcctatccttctatgaattatttattatctgcttctcttttatttggccctttgttgaaggcctatgttattgtgactatttcttgcttatctgtgtaaaattgataatatcttaatttcattttgttatctattttaaatgtgtatatgtatatatgtgtatgtgcatgtgctcatatatgtgagttgatgtatatttcagtgtgagctggcatacactaattccctcctctacatcccaccctccttaccagttagttagcattgaggtgttgtggtactctgggtaaaattggaaattaatgaaaattttatggtcttatatcaaggattgcaagggaatgtatatagatcataacataggcacatactgtgtattaacagaaatatgtgtttgaataatgaaaattttgagtcctaattctggggcataatcttgcaggtcagttttggcatgtttagactattacccaataactagaactgtggataagcactggttgacctttgaaaatgttgtcatactcctttttgctgacatggttgtagtaaaattacaatgtggcttaacatttaagaacatggatttaaacaagagactctctttaaaaagattgccaaattacctttgtaattttttaaccttcacaagactttagttttcttattttaaaataggatgttaataatacaaactcactgggatgttatgaaaattaaatgaaagaaagtgtgcaaagtgtctagcatggttagtgctcattatatacacctgttgttattaagtattaacctttgggttgttaatgtgatggttggacatcctctgatttatactgaatttttgttggtttaaaatagataaggataaaggacatattcattattgctttcgcaaaggaaactttcagaggggttaaaaagataatgaggttttcctcaccttttgctctaagattcattgatcacaggtattatcatccaagtgtgaacaaactttctatgtgacttgtaatatccctaactgattataactaataaaaaattaagggattataaaattaaaatatttagttgtagaacataaagaattattgtttaaaaccaaacaaaaaggataatagaagagttggaaatgggaaagaagtagcactattgcagaaacgtattatatataatgtaatttatttatttatttcagacagagtctcactctattgctcaggctggagtgcagtggcctgatctgggctcactgcaacctccacctcccggttcaagtgattytcctggagtacaggctcatgccaccacgcctggctaatttttgtatttttacaaaatacaaaacatgggttttcaccatgttgcccaggctggtcctgaactcctgagctcaagtgatctgcccaccttggcctcccaaagtgctgagattacaggtgtgagccactgcatctggccaatgtatgccacttaaacctgccttgaaaaccagttcctgggactgatcttcatgtaatggtaacatgttccctcaaatggaaagataattaattacagagtttcagctcactggtgaattacaactgggaatgtctgattcagtcactatggccattggatatgtcatgaacccttaaacaaaatttcctctaaaataatttgattaactgatcccctgcagtagatttaggagaaactaagttagtcaggagaaaatttttctcactttttaaactcccatttccagcttactactcattttagatttagttagaagaagaatttgaaaggtgtgatacatgtaattaattcaacaaacatgtgtagagtactgaggattaaaaactgttacagacccaataaatacataggtgaccaagaaaaacaatctctgctctagcagagcttagatttcagaaaaggtagagggaaaattaataatactttaaaagtttaaaagacaatttaggtagtgataattaaaaaaatgaaaagaaagacctga

SEQ ID NO: 668498 - DNA, 1048 bp, Homo sapiens
cagttgaatgagagcagtgttatagaataacttttagtcagaaccagtaagtatattgttcttttatacataatattgcatgaaataaactgtgatggatgtatttaataggctgcattaaaatagtaaagcagagttgggtgtgttagctcactcctgtaatccctgcactttgggaagctgtggtgggaggatcacttaaacctagcagtttgagaccggcttgggcaacagagggagaccccatgtatccagaaaaaaaaattatatataaatatatatataagttatccaggcatggtggcatgtttctttgtaaccccaccttcttgggaagctgaggcaggaagatcacatgaaccgaggagttggaggttgcagtgagctgtgattgtatcactgcactccagtctgggtgacagagtgagaccctgactcaaaacaaaaacaaaaacaaaaacacaaaacagtaaagcagtaatatcagaaagcagcttcttattctacttttggtcctcaaacctgttcttttgtatttctttttgcaaccmaatggaaatatctctggcgaatttcatagttttccaatcatttgagactgtaacagacctattttatttttaggtatttaacataccagcataataattattgtttgcccacttactttagaatcttagagagggttcttgtagtatttgtccttttctttctctctccctgctcaacttcctctcctcacttactcctctgacttttcctccccactcaggacactaggctgtggcaaggagaaaggatgagacttagctagtaatattaacacttgtcacttggtgaaatgttctgcttcatgagaagcattccaatgctggctcatttagggaaatattattgttttgtttttctgagatttctgagattacctccacaccacacagtaaaattatttgatgtagattaaaaaataaggtggaattgcacttgattctgtagctattccctctccaccttgccctgctattgcccttctacctagattgtctcc

SEQ ID NO: 668499 - DNA, 1048 bp, Homo sapiens
cagttgaatgagagcagtgttatagaataacttttagtcagaaccagtaagtatattgttcttttatacataatattgcatgaaataaactgtgatggatgtatttaataggctgcattaaaatagtaaagcagagttgggtgtgttagctcactcctgtaatccctgcactttgggaagctgtggtgggaggatcacttaaacctagcagtttgagaccggcttgggcaacagagggagaccccatgtatccagaaaaaaaaattatatataaatatatatataagttatccaggcatggtggcatgtttctttgtaaccccaccttcttgggaagctgaggcaggaagatcacatgaaccgaggagttggaggttgcagtgagctgtgattgtatcactgcactccagtctgggtgacagagtgagaccctgactcaaaacaaaaacaaaaacaaaaacacaaaacagtaaagcagtaatatcagaaagcagcttcttattctacttttggtcctcaaacctgttcttttgtatttctttttgcaaccaaatggaaatatctctggcgratttcatagttttccaatcatttgagactgtaacagacctattttatttttaggtatttaacataccagcataataattattgtttgcccacttactttagaatcttagagagggttcttgtagtatttgtccttttctttctctctccctgctcaacttcctctcctcacttactcctctgacttttcctccccactcaggacactaggctgtggcaaggagaaaggatgagacttagctagtaatattaacacttgtcacttggtgaaatgttctgcttcatgagaagcattccaatgctggctcatttagggaaatattattgttttgtttttctgagatttctgagattacctccacaccacacagtaaaattatttgatgtagattaaaaaataaggtggaattgcacttgattctgtagctattccctctccaccttgccctgctattgcccttctacctagattgtctcc

SEQ ID NO: 668500 - DNA, 601 bp, Homo sapiens
gcaggagcaagagagagcaagcagggaggtactacacacttttatattactagatcttatgagaactcaatcgctatcacaaggacagtaccaaggggaatggtgctaaaccattcatgagaaattcacctccatggtccactcacctcccactaggccctaactccatcattggggattacawttcaatatgagatttgggcaggcacacacaggatctatgttctgatgatacatagatgtgataagtgctaaacactggtgattcagaattggtaaaactcaattcgtgtcctcaaggagtgcaccatcttttatggtagtcagctgtgagccaataatgcaaatgtcctgtgatgggtgaagtcactcaaaaggtgtgtaccagcgactgaagtggaaaccagtagctaatattatgcttacatttgacctgcaggctgcaaggcacaaataggtactctcttgccaagttcattaaataaacgggatagccctgagttccacgtctgcggatttctttgcttttgttgactgtgttttcaaaatgtgagttgcaaaatgaaaatataagtgccttctattttggggaagagagaga

SEQ ID NO: 668501 - DNA, 601 bp, Homo sapiens
gcaggagcaagagagagcaagcagggaggtactacacacttttatattactagatcttatgagaactcaatcgctatcacaaggacagtaccaaggggaatggtgctaaaccattcatgagaaattcacctccatggtccactcacctcccactaggccctaactccatcattggggattacaattcaatatgagatttgggcaggcacacacaggatctatgttctgatgatacatagatgtgataagtgctaaacactggtgattcagaattggtaaaactcaattcgtgtcctcaaggagtgcaccatcttttatggtagtcagctgtgagccaataatgcaaatgtcctgtgatgggtgaagtcactcaaaaggtgtgtaccagcgactgaagtggaaaccagtagctaatattatgcttacatttkacctgcaggctgcaaggcacaaataggtactctcttgccaagttcattaaataaacgggatagccctgagttccacgtctgcggatttctttgcttttgttgactgtgttttcaaaatgtgagttgcaaaatgaaaatataagtgccttctattttggggaagagagaga

SEQ ID NO: 668502 - DNA, 1039 bp, Homo sapiens
ttttttttttttgcataagaagttagtttgcctctgccctatagatactgagtccttaaatggaatgaggtctgttttagcaaatcagctatttagtaagtggagtttttctagtttctcattttttcttctactggaaagtgttcaagaatgaggctatttttcttcatcatggccatatttgctgcaattataagacaatgacaaaaatttccattcagcttttactcagaatcaataatgcccattaagtttactgctaaaaccagtgggattctggggattcaagttgcaagagcagcataatattatcctttgcctggcactatattaactatttatgaccttatctctaatctgtcctctactttgttataatagaaaataactagcctggtgtcaaatacagagtcacatatctgaattcaaactctccaattcacacggtttataggaatcagaaaatttactattcccaaaattagggaataatagcctctgtcctccagataatcctacagctttccttccctggatcaaatcccgagaatgtgtatgtgaactgtaaatacttgtgacatcatttttccatcatatataaatttcagcttcaaatcacgtgataatctttagatgacactggtagaaaatcagcctgtttatataaaggtagagattatgaaatggaccaattttagaaaataaccaaacacattttattattcattattttaaatgattcacttrcattctttgtataattgaacaattaaaatattctacattgtgaaatgtgcacaggggtttccataatagaggaggtttcatttcagaaatgtatattttctacatcaatttagtagttgatccagtcagcaaatttgtattgaattttgggctcatcctttgtatcagaccctgagaataaagggcaattttgcccaagttattattcttagtctttgaaacactgggggagagagtaatttttctttgttcacttgagatcgtattgggaatttttgcatattaattttca

SEQ ID NO: 668503 - DNA, 622 bp, Homo sapiens
cgttctttcttctgttttgtcaaggactatattcgacctatcgtaaactaaaaataaaatcctaaggccccccactgactgaatgaagcttcttggccaagggtaacctcaraaaaaccttaaaaactgaattcccagtcgggcacggtggctcacgcctgtaatcccagcactttgggaggccaaggcgggtggatcacctgaggtcaggagttggagaaccagcctggccaacatggagaaaccccgtctctactaaaaatacaaaaattagctgggcatagtggcgtgggcctgtaatcccagctactccggaggctgagacacgataatcgcttgaacccaggaggcggaggtttcagtgagctgagatcacagcactgcactccagcttgggcaacagagtgagactccgtctcaaaaacaacaacaacaacaaaaactgaattcctggccatgatggtaagggaagtcagacacacctcataccccattctttttggagtttaggcacaaatgactggaattaacattaaaacagagatcatcagtctaatgcaatagattctgtgtggcaataagacaccagattataaacaggacccaaggccatgctaggcaa

SEQ ID NO: 668504 - DNA, 539 bp, Homo sapiens
taaaacacatagtttcggccgggcgcggtggctcacgcttgtaatcccagcactctgggaggcccaggcaggtggatcacgaggtcaggagatcaagaccgtcctggctaacaaaatgaaaccccatctctactaaaaatacaaaaattagccgggcgtgatggcgggcgcctgtagtcgggaggttgaggcaggagaatggcgtgaacccgggaggcggagcttgcagtgagccgagattgtgccactgcactccagcctgggcgacagagcgagactccrtcaaacaacaacaacaacaacaacaaaacacatagtttcctacattagttatgtttctgagggttttcagttcctctccagtttttccatactcctttgcataccaagagattgggaagccaacaagctgtgttccccagatgcagtattagatgacttcctgataggctctgatatgggaggttcctgcgggtgccgggaggtgggaggaatgaggaaaccatgtgtgtttctgctctgatcaccctcagaatggg

SEQ ID NO: 668505 - DNA, 1804 bp, Homo sapiens
tattcattacacattaaaacaagacctctcatatctctctgattagttgaatctccatattagagtttattttattactgtgtatctcttctacattctacttgtagtaatggagtaattccaaatttgtatttgcgtaagaaattactggattcacatctggtttccctcattccaactaaactcaaactccaagcatacaagagctgggtctacgcttgctcattctttaacaccagaaactggcatgttacctgcagattctatgattgcttgttgttgctgtatttcttagattctctgttggactcatctgttattccatttctgtctagtattttctcgtttaatcaagaagcacttgattatattttgccacatggaatagcaagtttttgcattattcttctgttttcaagattttgttggctattcttgcaaatatttttcagatgaacatcatcatttttactgayacgaaaatactaaaacaataaatgcagtgaaagaaatagaaactattaggctttgaataatcactaattttttatatgctgtattattttagtgaagacaatattttcaagcagtcccttagtatttggcatttgatttgtttacagtttttttatattatcaacattgtgaccatatgcatgtgtaatgtagatatatatatatatttatttatctatactttatgaggcttagatatattaaaaaaaaattatatctggggagagactgcctcttctggggctagttcatacttagaggtggcaagggacctgcccagctgaagcatgcctttcagatgcaaactaaccaatcctgcaccccttacccaacacacctcttttacctgttgcatacaacctaaaggcaatattcctctgccttggtcatcctgcggacacttcccaggcaactagagaccaccatatatcctaaagcccaccaaaatcattcaaaccagacaatcttgaaatacttagcctgccctgccatgtctttctatggaaaccccaatagaggccatggcctaagctctctccccactcctgtcttctgcctcctgactaccctggtgtttgacactgtaactttgggtggtatgtggcaacctcctctctgggacccatgagtcttcttcttccttccaaatctggctcttgtttcttctgtggcagcaaagatttcactataccatattccaacttgtacattcttagaacagcatgtatcttcacattctctctctctctatatatatatatttaagctaatctatattaaataattaaataggctaggcacggtggctcaagcctgtaatcccagcattttgggaggccgggggtcgggggggggtggtgggtcatgaggtcaggagttcgagaccagcctgatcaatgtggtgaaaccccgtctctactaaaaatacaaaaaaaattagtcgggcgtggtggtgtgtgcctgtggtctcagctaccagggagggccgaggcagaagaattgcttcaacccgggaggcggaggttgcagtgagccgagattgtaccaccacactccagcctgggtgacagagcaagactccacctcaaaaaaaaaaaaacaaaaaaaattaaataaactaacatatgtgtatattagtttaaattccaaaaagtatgattgctactaatacattggtttttgtattaatatcacaaaaagaaaattagtagagagaatttgaaatacagagctccaattaagatgacacattttagaagtgatatggcctttaaataatattttgagt

SEQ ID NO: 668506 - DNA, 586 bp, Homo sapiens
caagggaaccaggttagccatggcttgagtaaattgattatttctttctctcatcatgatcaattttgcatcaatgaactgcactgaggatgttgcaattcagtttgattattatgctggctaaagtcattgctccactccagggactgatcatttcagtcacaggaacattactgttgcctgctcgattctttttagatatgagagggaagcaaattgctttgactgaacctgaggatgccccaggcttcctacatgtgaagtcagcattgctccctcccaggaagtaggcaaaattctctgggtaccaaaatatttttaatcagaagggagtttcctagtccctctagaaatccctctagattcccccctttctcctgatatttgccctgtatctcgtttttttgttttgttttgttttgagatggtgtctcrttctgttactcaggctggagtgcattggtgcgatcttggctcactgcatcctccgcctcccgggttcaagcaattctcctgcctcagcctcccgagtagctggtattacagccacccgccaccacgcccagctaatttttgtatttctagt

SEQ ID NO: 668507 - DNA, 1196 bp, Homo sapiens
tgattctgtctgtgatcaatcacgcttaacaaaggggccagtgacacagccttgttccccccagaacatcgccattctaccatccaaagcctatcagaagaygctgacattaatttcaatgaatgtccctgttcttgctggcagcttttcccaacatggatggtgctgatgagctgacggcagtgattttttttttttatttccttgatgtggtcttgggtggtaggaaccacctttgcaagaggccacccattttcctacatacatccccaaaaatgtcagcctcaactataaagctgaaaaagacatttcacatacataaaatatgtaattaaaatgatgaattattgtaagatagaatattagccttgtgacattttaatctgaacgcaagagcgagggagaaagagagcacaatctgaagcgctcaattaaatttagaatttcccccctccattgttatgaataaatagaaaagattctgtagcagccggtggaattattaattgcaactagtgtagaaggtgcatgcaccatatcatgaaatggaatatcattgttagtgactatatttcttggtaattaaggcccagactaatgatgcaagttttctccagcatgattttcatctgattatgaggctgcttcattaagagcactcagcctaacgagctgtagctgtaataaagtaattttctgtcttgtgctctgattgataaagagtttctatagctaaaaggaattgaaaatataattataattagaaatggttgaataaagttattacaggattgctgaagggtagtgcaattgacaccataatgttttttttggaagtgcgcatcttaaaattagactttataaagcaacaaaactcctttgctaataactgggccgaatgttgctgcttccataaaatgaacatttagattaaaggaaaatgagactttcccacattgttctcgacaagaaaaacatatgcaagaagaatgccgtcgcctttcttcccagcattcttccctcgtgaagtaaagcttatgaacatactttttactccatttataataattttccttctgccatatgttggaaaaagatctttttgattaaactgatgtctttttaagcatacagtataattttggagtttctccttgccaatgtgcaaagagttatgctgtctttttatatattta

SEQ ID NO: 668508 - DNA, 1196 bp, Homo sapiens
tgattctgtctgtgatcaatcacgcttaacaaaggggccagtgacacagccttgttccccccagaacatcgccattctaccatccaaagcctatcagaagatgctgacattaatttcaatgaatgtccctgttcttgytggcagcttttcccaacatggatggtgctgatgagctgacggcagtgattttttttttttatttccttgatgtggtcttgggtggtaggaaccacctttgcaagaggccacccattttcctacatacatccccaaaaatgtcagcctcaactataaagctgaaaaagacatttcacatacataaaatatgtaattaaaatgatgaattattgtaagatagaatattagccttgtgacattttaatctgaacgcaagagcgagggagaaagagagcacaatctgaagcgctcaattaaatttagaatttcccccctccattgttatgaataaatagaaaagattctgtagcagccggtggaattattaattgcaactagtgtagaaggtgcatgcaccatatcatgaaatggaatatcattgttagtgactatatttcttggtaattaaggcccagactaatgatgcaagttttctccagcatgattttcatctgattatgaggctgcttcattaagagcactcagcctaacgagctgtagctgtaataaagtaattttctgtcttgtgctctgattgataaagagtttctatagctaaaaggaattgaaaatataattataattagaaatggttgaataaagttattacaggattgctgaagggtagtgcaattgacaccataatgttttttttggaagtgcgcatcttaaaattagactttataaagcaacaaaactcctttgctaataactgggccgaatgttgctgcttccataaaatgaacatttagattaaaggaaaatgagactttcccacattgttctcgacaagaaaaacatatgcaagaagaatgccgtcgcctttcttcccagcattcttccctcgtgaagtaaagcttatgaacatactttttactccatttataataattttccttctgccatatgttggaaaaagatctttttgattaaactgatgtctttttaagcatacagtataattttggagtttctccttgccaatgtgcaaagagttatgctgtctttttatatattta

SEQ ID NO: 668509 - DNA, 651 bp, Homo sapiens
gctccaagaaatgttctagggaatcagacccccmgccaaattatctaggccaatcccagacctgtagtgtcagcatcaccacaggacttgttaggaatgcattctcaggcccacccagaactactgagtcagaatctctggggatgaggcccagccatctgtgttttcacagattctttagttgatcctgatgcatgctcaagtttgagaagcactgatctaggctagtccctggaagatctaaactgacactaattctttcagatgattataaaaattattccaagagctcatcaggacttaagtgcccttatgagacatcaaccctaatacacttcacttccctctgctgtttactgctaactataggtgtgaccatacatctttagcttaatgtttcagggtctaaacttttcatgggggaaacaagggaggaaactttgcctacaaggaggcagagttttggactgattaacttgcaactctgttacaagttaaaagtccttgatttgtcattttgagtatggctgggaagattacaacacagcaagaatacatatcaagagacactttcattacagtttttttgaactctctaaaaattgtcactctgacttatttcccccttgtgaattttctgtagagagacct

SEQ ID NO: 668510 - DNA, 577 bp, Homo sapiens
gtccatacctattcgttgaataaatgmatgaatgaatgaaacaattggcatacctaggaacatagcagctgaaattatatttcatctccagaattggccactgtttcacacaggcagtggtcacccctggggagtgaatctgtttctagattgcattcatgtaaggcatgtttggagaaggaatacagaaggcaatggtgtaagtccttgaaggtctgaggtcacatctggaaaagaatggctggactgggctgggtgagaaaatgtggttggatgcagcaaaatttttttctacatacaaagcagaatcatcactttaaaacccctgggtctactacttctttaaagctaagcaggtccttagtaaatcaggtggcctcaatatttttgtcctatatccaatatattaatagtatcacttactattttgaaggacacactattagtaatcctttgtttaatcttagcataatttactctccattttctcctaaatttggtgcagaaaactttcaaaaatgatgagaaatggaatgagttttgtcttgagaattttatctaaaaactttcaatatac

SEQ ID NO: 668511 - DNA, 577 bp, Homo sapiens
gtccatacctattcgttgaataaatgcatgaatgaatgaaacaattggcatacctaggaacatagcagctgaaattatatttcatctccagaattggccactgtttcacacaggcagtggtcacccctggggagtgaatctgtttctagattgcattcatgtaaggcatgtttggagaaggaatacagaaggcaatggtgtaagtccttgaaggtctgaggtcacatctggaaaagaatggctggactgggctgggtgagaaaatgtggttggatgcagcaaaatttttttctacatacaaagcagaatcatcactttaaaacccctgggtctactacttctttaaagctaagcaggtccttagtaaatcaggtggcctcaatatttttgtcctatatccaatatattaatagtatcacttactattttgaaggacacactattagtaatcctttgtttaatcttagcayaatttactctccattttctcctaaatttggtgcagaaaactttcaaaaatgatgagaaatggaatgagttttgtcttgagaattttatctaaaaactttcaatatac

SEQ ID NO: 668512 - DNA, 1408 bp, Homo sapiens
ggaagggagagaagagagaatgaaaggtataaaaccaacaggaaatgaataaaaataaaaacttgccattttgcccattatccacatgaatttttgaactatgtttaaaacaatatttaggtctctagtcgactaactgaaagtttaaaataagctagtgtatattgtcaaaattactcatgtaactatggtattaactaacattcttgtagttttcaacaaccaaatcattttaatgtttatcatcaaatcacatactagtgagtgcagggtagtctgttatgctgcctaatctacactaaattaaaaatgaaatcaaatctgcaaaaggctttacagttactattaccagtaaagactgttttgtttcctgacttgtggaggtttttatttccacagtgttgagggctctggcagaaagctttcttggtccaaactcaccacttatcatcacagtatttatgtgtcaggcattaaggggaatgagcatccaatcccactgcttttctgcattggttcccatgcacaagcaaatgtgctgtgttagtgattatcaaatattcttacatttgatcaaggaaatttgtgttttccaaactgtaaaacaaaaatattactatcagttgtatttttattatttatttacttagaggcagggtgttgctctgtcatcaggctgaatcatacmtcactgtagtgccagacttttgggctcagaggatcctccaacagcagcctcccaaagtactgaaattacagacctaagacattgcactcagcctcaagtttagagagaaaggctaaggaatatattgtaaactatgtaaataaacataattgcatgctctctagagagctggaagaaacccctgcaaaactgccattgtggacaaggctgctgacaacaatgtaatgcaagcaaaggagtgggtccttccccactgagccttcagatgataccagaggccagcttggcatttccactgcagctttttgagagaacatgaaacataggtgtctgcgtttgcgtgtgtgtgtgtgtgtgtgtgtgtgtgtaagcatacatacagaacctgttgaacaaactaggatcacccacacaatggaatatgatgtagctttttgtagatctggtagaattcatccgaatctatcagtttctgggctttttttttttggctggttggtcacttattactaataattccattttggaaattgaaattggtcaggttggagctgagactgtgtccacttacattctcttgtggaacacagaatggcatgcttgtaattttggctgtgatggttactggaaggtctctgcacagataggctagctttctgccagcagcaagagggcctaggactgacaatcagctcccttgatatctgctgttgaacagtg

SEQ ID NO: 668513 - DNA, 2465 bp, Homo sapiens
tgcatgttaaaatttcaaaatcccttctcaataacaaaatttaggaaaatataggaaaggtagagagaaggacagttttggtgtatgtattagttcattctcacactgctataaagaactacctgaggctgggtaatttataaagaaaagaagtttaattgactcacagttccacatggctggggaggcctcaggaaacttacaatcatggcgaaaggcaaagggcaagcaagtacatcttaccatggcgaagcaggagagagagagcaagtgaaggcagaagtgccacacttttaaaccatcagatccagatctcataaaaactcacttactatcacgagaatagaatgggggaaatctgcgcccatgatccaatcacctcccaccaggaacctcccctgacatgtggggattacaattcaacatgagatttgagtgggggcacaaatccaaaccatatcagtgtttgcctcctgtttttcctccatgcgttgatttctttttacatagttatcgtcaccctgctgtacagttttgcagcttggttttcacttaacctcatcataagcatctttatgtgttatcacatcctttttcataaacatttcaaatagttgcccaatcgtccattaagcagaggttctctggttaattatatttaatttcttctagtgagatgcttgggtgatttaatttttttatattgtaagtaacttagcaataaaaaactttgtgtctaggaaattacatatttaggatttcttttttcttggagaaattcccagaaaaaaagttgaaaagtaaagccttcttctttattataaaatgagtatattcttattataaaaagttattaaaatctgagaacatgaatttttaaatgtgataaatttgcataaacctacacacaaataggtgtgtgtaaaaactcatgaaatctgaataaggtctatagtcaagctaacagcattgcactgatgtcaactttctgggtttgatgctgtacaatattatgcttctgaatgtattcattcatactgttgtgagtagttggagaacctttgttctcattagactatcatattccattgtgtgtctataccacacaagatgtaaccattggaagaatctgggagaaggatacatggggttttctgtattatttttccaaattacagtgagtctgtgattattttaaaataaaaggttaaaaaatatgagagagagaaggaaaaaaaagcccatcactcaagcacaaaccctgttaaagttttgatatatttctcttcaaccttctgttatgcatggtcaaaaattgtaatgcaggccaggcgcagtagctcacgcctgtaatcccagtactttgggaggctgaggtggatggatcacragatcaggagatcgagaccatcctggctaacacggtgaaaccctgtttctactaaaaatacaaaaaatttgccaggcgtggtggcaggcccctgtagtccccgctacttgggaggctgaggcaggagaatggcgtgaacccaggaggcggagcttgcagtgagctgagatcacgccactgcactccagcctgggcaacagagctagactccatctcaaaaaacaaacaaacaaacaaacaaaaaacaaaacaaaaaaaacagtaatgcaaaataaaaaccattttaaggcccttgatctgtgctgtactttattaggcatagctttgagaagatactaaaataactagaagacagtgatgagttctgagaggactgtggctgctgtgcagacaggcttgaggtggctgaggaacccctaaggaaaacatgcagcgcccatcgactttccagctctgctccctgcaagccatttgttcacttgctccatgcacccgttccatttcttcactgaattgctctgaggaacctgtgaaaatgcagggttttttgacaacggtataattgctttcagggggtgtacacggaagccaaaacaaacaaacaaacaaacaaaggtcctttagctaaatgcctagctctagctcatagctgtatttgcagaaaggataccaagaaaatgactgaggtggttgcatttcattaatgccccaactcctaatgggaagcacttgagtcaacagcactggagaacacgcaaattccctttcaattccacatcttgtgcatgctcacctgccagcctcatctccatgacaaccaaagagccttcttcagaaatcagctcaaatggcactacctatgagaccctggcttcagcaagccacagggccatgacatgccccctgccctgtgccccctgccctatgctcccatatatctgacctgctgctgatgttctgtaatttttctacgtgctgggctttctccccatagaccctgaagccttgatgtgtttcttccttgttagacacctcctgcagtctcccacgcatttagaaataggttctcaacagg

SEQ ID NO: 668514 - DNA, 1123 bp, Homo sapiens
aattaatcagcagacagtatgtcggggttaggttggagaaaattaaaggcacacttgcagctcatagaaaatactgtgaacccatttggtgaaagtaacagacatgctatgaaagtcaaatggccaacctttcttcccttctactttattaactttgacatttgcatgaaaattgaatcctggtttcctgggggctcatctgctcctgcagcttccccttacctgaaggcttaatcttctgttggtgacatgataatcagttctccagcaagcaattatgatgtcacaaagaggtaattatcacttcaggtgagaaaataaacagcccacacagatgatgacttgaaatcattatgattatcttaatgtaatttttcttttgaaagatttcatatgagaaaatgactataagcctagataaagaacccataaggcaatggtagaagtgttcattctagaccttaagtcaaatatttgtacatgttccccaaatccttactgaacatttctgggatggcttctccctcctccaatgtcccctgcaaagtgtggcatactggctcccatggagacccatctgttggtcctcaatgcttttcctctttcaaagcaaaatgaacaaaatttgatctaactgaaataatrtcatggaatagtaccattaattagaagaaaaaagatttcattgcacaaaaattggagaatgtatataaaaagaaataattaaaaatagtttataatcctaccacccagaggaaaccatagtattttagttccagtcatttcttgcttcagtgtgttggtgtgtacattgtgaaatattaccacaatgaatgtgcatcatctcacatagttacttttgtgtgtgtggtgagaatgtcagcggcgtttgaaccagagcaactctaccttgagtaggggctggataaaataaggctgagacctactgggttgcattcccaggaggttaggtgttctcagtcacaggatgagacaggaggttggcacaagatacagatcacaaagaccttgctgatagaacagcaagcagtaaagaagctggccaaaaaccaccaaaaccaagatggcgatgagagtgacctctggctgtcctcactgctca

SEQ ID NO: 668515 - DNA, 1123 bp, Homo sapiens
aattaatcagcagacagtatgtcggggttaggttggagaaaattaaaggcacacttgcagctcatagaaaatactgtgaacccatttggtgaaagtaacagacatgctatgaaagtcaaatggccaacctttcttcccttctactttattaactttgacatttgcatgaaaattgaatcctggtttcctgggggctcatctgctcctgcagcttccccttacctgaaggcttaatcttctgttggtgacatgataatcagttctccagcaagcaattatgatgtcacaaagaggtaattatcacttcaggtgagaaaataaacagcccacacagatgatgacttgaaatcattatgattatcttaatgtaatttttcttttgaaagatttcatatgagaaaatgactataagcctagataaagaacccataaggcaatggtagaagtgttcattctagaccttaagtcaaatatttgtacatgttccccaaatccttactgaacatttctgggatggcttctccctcctccaatgtcccctgcaaagtgtggcatactggctcccatggagacccatctgttggtcctcaatgcttttcctctttcaaagcaaaatgaacaaaatttgatctaactgaaataatgtcatggaatagtaccattaattagaagaaaaaagatttcattgcacaaaaattggagaatgtatataaaaagaaataattaaaaatagtttataatcctaccacccagaggaaaccatagtattttagttccagtcatttcttgcttcagtgtgttggtgtgtacattgtgaaatattaccacaatgaatgtgcatcatctcacatagttacttttgtgtrtgtggtgagaatgtcagcggcgtttgaaccagagcaactctaccttgagtaggggctggataaaataaggctgagacctactgggttgcattcccaggaggttaggtgttctcagtcacaggatgagacaggaggttggcacaagatacagatcacaaagaccttgctgatagaacagcaagcagtaaagaagctggccaaaaaccaccaaaaccaagatggcgatgagagtgacctctggctgtcctcactgctca

SEQ ID NO: 668516 - DNA, 1123 bp, Homo sapiens
aattaatcagcagacagtatgtcggggttaggttggagaaaattaaaggcacacttgcagctcatagaaaatactgtgaacccatttggtgaaagtaacagacatgctatgaaagtcaaatggccaacctttcttcccttctactttattaactttgacatttgcatgaaaattgaatcctggtttcctgggggctcatctgctcctgcagcttccccttacctgaaggcttaatcttctgttggtgacatgataatcagttctccagcaagcaattatgatgtcacaaagaggtaattatcacttcaggtgagaaaataaacagcccacacagatgatgacttgaaatcattatgattatcttaatgtaatttttcttttgaaagatttcatatgagaaaatgactataagcctagataaagaacccataaggcaatggtagaagtgttcattctagaccttaagtcaaatatttgtacatgttccccaaatccttactgaacatttctgggatggcttctccctcctccaatgtcccctgcaaagtgtggcatactggctcccatggagacccatctgttggtcctcaatgcttttcctctttcaaagcaaaatgaacaaaatttgatctaactgaaataatgtcatggaatagtaccattaattagaagaaaaaagatttcattgcacaaaaattggagaatgtatataaaaagaaataattaaaaatagtttataatcctaccacccagaggaaaccatagtattttagttccagtcatttcttgcttcagtgtgttggtgtgtacattgtgaaatattaccacaatgaatgtgcatcatctcacatagttacttttgtgtgtgtggtgagaatgtcagcggcgtttgaaccagagcaactctaccttgagtaggggctggataaaataaggctgagacctactgggttgcattcccaggaggttaggtgttctcagtcacaggatgagacaggaggttggcacaagatacagatcacaaagaccttgctgatagaacagcaagcagtaaagaagctggccaaaaaccaccaaaaccaagatggcsatgagagtgacctctggctgtcctcactgctca

SEQ ID NO: 668517 - DNA, 648 bp, Homo sapiens
ttgtgtttttgtttgtttgttttttactgtttagagtttgaaaataaacgtgctgtatttgctgtgtttctgctgatgaattaggaggaggtagattgtcagagcaatgtgaaagctgcttccagggtttcatggttaggctccgtgatccatggtgtttcttcataaatgagttaatgttaagatgacttaaccttaggttgctgtgagcagtgcctgtaggcatcwttccagtttcaaagataacaagttatttttaattgccaggctttttgcccagtaccaaatggaagttttaagcctggatttttgtaatagttctaattttaagcatatttaactcttgaagatggaaaggcctgcaagatcatgcagtacaggctgttatctggaagtttagtgctcatcacctgattctgattctcaaatgggccagagcccttgaagactctgccttctcactctggctggctcttcaatgctgacctttaaaacagacaacatccagcatcaccagcaaacttgctagaatgcagattgccccagcttgctgacttcgaatctctggggtagggctctgcaaccttggtttgaagaagccctctgagtcctttttttgttccaaatcctgagaacctatgaactcct

SEQ ID NO: 668518 - DNA, 680 bp, Homo sapiens
atttctatgtggcaggtactgtgttagacctgggagtatagcactgaacaagacaaagtctccgcttcatagaatttacattttagcagtagagacctacaaaatcatttttgcaaactatccttcttatagtgataagtactacactgaagggtaaagagatgaaatgacagcaaggaggtatctctgagaagataattaccctgagaatgaagtaaaaaggaacaytccagatagaacagaagtgccaaggccctgagttgagaaggcctggtgttttcaaaaaatgacaagaatgcccagggctagtgcagagtaagatagggggtaggagagcaaggcagagaccacagagggcctggaaagcaacagtaaatactctagatgttattctacatgtgctgaaagccatatgggatgttatgactaagtgaatgatgtgatttgatttaaaaaaacaacaacactctagccactgtatatggaatgatcttggggatatgggagagaaaggagaatcaaaacacagtgaccagttgagcaactgtagtaactcaggtagaaataagaagactatcacggtagccatattggtggtgaaaaaagtgattatttttgatatttgattgctgatgactaaacaagaaaaaaaacagaataattaaggatgattccaaggt

SEQ ID NO: 668519 - DNA, 1480 bp, Homo sapiens
tgtgttctttttatgctgttggtcatcataatttttgatgtagaaactgtttatatccttgaatgcagctagttatgaagtcttccattaacctcactttgtcaggtcaaattcttacaaattctgctttgggtctaacttttagccttttagtcctctctgggctcattccatattaggttctcctcctacccaaccaggtgaaataaaaatctgttagattaggaatcagaaaagccgggttccagtgtcggttttgatagagacttgatgtgaagcctttggcaattcaaaacctccgtggcctcaactttcctacctgctaagtaaaagtggaagagagaaagcttctgattagctatgaatgccagacaggcatatccatagacactaggttctaaggccagtaacttagccatcacctacttaataccaaaattcctttagaaaaagccagtgtctctatgttcaaacaagacttcaaaattttcacccctagaagagaaagaggttgattggtttcaagttggtttcaagtcacatttgggaatayagaacttactgacctccttctctaaatctgtttgaaaaaaattacaaggccattcgagaaccaggatagtactccataggttataaatactcaataaatatttgctcaaggagtgacgaacccaagagagggagagaaacaagggaatgctagcaaaaagtgaggtagctgatgtgatagatgtcctgtccattgatgtatcacaatcacttagaaggtgccctacggaatgaataagaaaataaataaaacactaggttagattttagatttatagttctagaactttccagttttattggtgataggccttgcttctactcttccttttcatgacccagaatcagagtcacaaattttccagataaatagaattacaccaaaacaaaacaacacaagaacatctaattctctgatctaaataataactacctgggagtactacacaacttatagtggcaaatgtgtgttatctggactaggaccccatgctatggtctgaatgctttttctcctcaaaattcatatgttgaaattctaacccccaaggtgatattaaaaggtggggcttttggggagtgattaggtcatggggtaaatccctcacatatgggatcatatgcctttttaaaagaggtacctgagagctgccttgtcccttccaccatgccaagacaaagtaagaaagtgccattctatataccaggaagcaagaacctcaccagtcaatatatgtacaggcaccttgatcttgcactttctagcttccagaattgtgagaaataaatttctgttgtttataagccaccaagatttcagtatttttgttatagcagcccaaatggattaagacagtcctgtttacactgccatatacctaaatgaaaccagatattcagaagttttaaagacaagatcccccattgt

SEQ ID NO: 668520 - DNA, 1480 bp, Homo sapiens
tgtgttctttttatgctgttggtcatcataatttttgatgtagaaactgtttatatccttgaatgcagctagttatgaagtcttccattaacctcactttgtcaggtcaaattcttacaaattctgctttgggtctaacttttagccttttagtcctctctgggctcattccatattaggttctcctcctacccaaccaggtgaaataaaaatctgttagattaggaatcagaaaagccgggttccagtgtcggttttgatagagacttgatgtgaagcctttggcaattcaaaacctccgtggcctcaactttcctacctgctaagtaaaagtggaagagagaaagcttctgattagctatgaatgccagacaggcatatccatagacactaggttctaaggccagtaacttagccatcacctacttaataccaaaattcctttagaaaaagccagtgtctctatgttcaaacaagacttcaaaattttcacccctagaagagaaagaggttgattggtttcaagttggtttcaagtcacatttgggaatatagaacttactgacctccttctctaaatctgtttgaaaaaaattacaaggccattcgagaaccaggatagtactccataggttataaatactcaataaatatttgctcaaggagtgacgaacccaagagagggagagaaacaagggaatgctagcaaaaagtgaggtagctgatgtgatagatgtcctgtccattgatgtatcacaatcacttagaaggtgccctacggaatgaataagaaaataaataaaacactaggttagattttagatttatagttctagaactttccagttttattggtgataggccttgcttctactcttccttttcatgacccagaatcagagtcacaaattttccagataaatagaattacaccaaaacaaaacaacacaagaacatctaattctctgatctaaataataactacctgggagtactacacaacttatagtggcaaatgtgtgttatctggactaggaccccatgctatggtctgaatgctttttctcctcaaaattcatatgttgaaattctaacccccaaggtgatattaaaaggtggggcttttggggagtgattaggtcatggggtaaatccctcacatatgggatcatatgcctttttaaaagaggtacctgagagctgccttgtcccttccaccatgmcaagacaaagtaagaaagtgccattctatataccaggaagcaagaacctcaccagtcaatatatgtacaggcaccttgatcttgcactttctagcttccagaattgtgagaaataaatttctgttgtttataagccaccaagatttcagtatttttgttatagcagcccaaatggattaagacagtcctgtttacactgccatatacctaaatgaaaccagatattcagaagttttaaagacaagatcccccattgt

SEQ ID NO: 668521 - DNA, 1141 bp, Homo sapiens
gtttataaataccactttttcaaggccaaaaaaagcagaataaattgtaggattgaggggttaaaatacactgaaatatctacatgtaaaaaggaaaataagaggttttgactttaaatacctgaattcagtctattaattcacttaatatacagacaactaaaattaagatacattaaggtagtaagtgcaatggagaaaatggttccttctgcttgcagagatcatggttgacagtaaagggaagtcactgaggtggggttaagtggctggactacattcctactctcatccctgtccaggcttctggtcatactgactgatttacatgaggtgaagggtacctgcacaaaggtagcttttaatgtactagagcctgaaaaagagatggaaaatgcaagggatcttagccaccttaacctcaaccagctctaaggaaagcacttgagccaaatgtaagcagggaccctcttcccacttctgtgatgaatacacaatgatctggagcattgaggaccctatggatacctgctggattggcagatttttaaaaccgtgtgctagcattcaagtcggggggtggggcttaaaaaaagagaagcagcarcagaagacgtggtggataataacagtgagtaatctttatggggctcttaatataggtcagatactttccaagtactccaaatgcattaactcacttaaccctaaaacaatcaccactttccagttaacaagctgaagtttagagaagttaagcaaatagtccaaggtcatgtacctaaatggtggcaccaggattcaatcacaggtagattaagtccagggcttatgctctcaaaaacagagctaattctctctctcatgggagaatggaatcccctggggggtatgggctttttgaacccacataaaaatactctgtaggaattcccaagtatactttcagaggtagaggaatggcagagatagggagattttctgggaagctggtttcctgcttgagcagatgggacaatgtgtcagcctgatttaagtataattagtaatgagaactcattttttccacaggttgataaggcctggggatactgaagcatacgtattttatatctggggagaagggcatatagacattagc

SEQ ID NO: 668522 - DNA, 1141 bp, Homo sapiens
gtttataaataccactttttcaaggccaaaaaaagcagaataaattgtaggattgaggggttaaaatacactgaaatatctacatgtaaaaaggaaaataagaggttttgactttaaatacctgaattcagtctattaattcacttaatatacagacaactaaaattaagatacattaaggtagtaagtgcaatggagaaaatggttccttctgcttgcagagatcatggttgacagtaaagggaagtcactgaggtggggttaagtggctggactacattcctactctcatccctgtccaggcttctggtcatactgactgatttacatgaggtgaagggtacctgcacaaaggtagcttttaatgtactagagcctgaaaaagagatggaaaatgcaagggatcttagccaccttaacctcaaccagctctaaggaaagcacttgagccaaatgtaagcagggaccctcttcccacttctgtgatgaatacacaatgatctggagcattgaggaccctatggatacctgctggattggcagatttttaaaaccgtgtgctagcattcaagtcggggggtggggcttaaaaaaagagaagcagcaacagaagacgtggtggataataacagtgagtaatctttatggggctcttaatataggtcagatactttccaagtactccaaatgcattaactcacttaaccctaaaacaatcaccactttccagttaacaagctgaagtttagagaagttaagcaaatagtccaaggtcatgtacctaaatggtggcaccaggattcaawcacaggtagattaagtccagggcttatgctctcaaaaacagagctaattctctctctcatgggagaatggaatcccctggggggtatgggctttttgaacccacataaaaatactctgtaggaattcccaagtatactttcagaggtagaggaatggcagagatagggagattttctgggaagctggtttcctgcttgagcagatgggacaatgtgtcagcctgatttaagtataattagtaatgagaactcattttttccacaggttgataaggcctggggatactgaagcatacgtattttatatctggggagaagggcatatagacattagc

SEQ ID NO: 668523 - DNA, 1141 bp, Homo sapiens
gtttataaataccactttttcaaggccaaaaaaagcagaataaattgtaggattgaggggttaaaatacactgaaatatctacatgtaaaaaggaaaataagaggttttgactttaaatacctgaattcagtctattaattcacttaatatacagacaactaaaattaagatacattaaggtagtaagtgcaatggagaaaatggttccttctgcttgcagagatcatggttgacagtaaagggaagtcactgaggtggggttaagtggctggactacattcctactctcatccctgtccaggcttctggtcatactgactgatttacatgaggtgaagggtacctgcacaaaggtagcttttaatgtactagagcctgaaaaagagatggaaaatgcaagggatcttagccaccttaacctcaaccagctctaaggaaagcacttgagccaaatgtaagcagggaccctcttcccacttctgtgatgaatacacaatgatctggagcattgaggaccctatggatacctgctggattggcagatttttaaaaccgtgtgctagcattcaagtcggggggtggggcttaaaaaaagagaagcagcaacagaagacgtggtggataataacagtgagtaatctttatggggctcttaatataggtcagatactttccaagtactccaaatgcattaactcacttaaccctaaaacaatcaccactttccagttaacaagctgaagtttagagaagttaagcaaatagtccaaggtcatgtacctaaatggtggcaccaggattcaatcacaggtagwttaagtccagggcttatgctctcaaaaacagagctaattctctctctcatgggagaatggaatcccctggggggtatgggctttttgaacccacataaaaatactctgtaggaattcccaagtatactttcagaggtagaggaatggcagagatagggagattttctgggaagctggtttcctgcttgagcagatgggacaatgtgtcagcctgatttaagtataattagtaatgagaactcattttttccacaggttgataaggcctggggatactgaagcatacgtattttatatctggggagaagggcatatagacattagc

SEQ ID NO: 668524 - DNA, 1141 bp, Homo sapiens
gtttataaataccactttttcaaggccaaaaaaagcagaataaattgtaggattgaggggttaaaatacactgaaatatctacatgtaaaaaggaaaataagaggttttgactttaaatacctgaattcagtctattaattcacttaatatacagacaactaaaattaagatacattaaggtagtaagtgcaatggagaaaatggttccttctgcttgcagagatcatggttgacagtaaagggaagtcactgaggtggggttaagtggctggactacattcctactctcatccctgtccaggcttctggtcatactgactgatttacatgaggtgaagggtacctgcacaaaggtagcttttaatgtactagagcctgaaaaagagatggaaaatgcaagggatcttagccaccttaacctcaaccagctctaaggaaagcacttgagccaaatgtaagcagggaccctcttcccacttctgtgatgaatacacaatgatctggagcattgaggaccctatggatacctgctggattggcagatttttaaaaccgtgtgctagcattcaagtcggggggtggggcttaaaaaaagagaagcagcaacagaagacgtggtggataataacagtgagtaatctttatggggctcttaatataggtcagatactttccaagtactccaaatgcattaactcacttaaccctaaaacaatcaccactttccagttaacaagctgaagtttagagaagttaagcaaatagtccaaggtcatgtacctaaatggtggcaccaggattcaatcacaggtagattaagtccagggcttatgctctcaaaaacagagctaattctctctctcatgggagaatggaatcccctggggggtatgggcttttkgaacccacataaaaatactctgtaggaattcccaagtatactttcagaggtagaggaatggcagagatagggagattttctgggaagctggtttcctgcttgagcagatgggacaatgtgtcagcctgatttaagtataattagtaatgagaactcattttttccacaggttgataaggcctggggatactgaagcatacgtattttatatctggggagaagggcatatagacattagc

SEQ ID NO: 668525 - DNA, 603 bp, Homo sapiens
ggattaacttcaaatgtatgcwttatagatagatgaggcataaagtcactcatgaatttttaagggtagagaaaaaagggatagttagacatttcagactttcagtggttaaaatcctatactcaaatgtgtgtctcatttcacagattgagaaaatgaggaaaattgggagagtttcttgtgctctgaccagttctgatgagcttttggtcagtgccagctttgtctgagacagaaagccaagaaagcaaaaatcactcaagtcactgtgggaagcaaaaggtaaagattagaaacaggcatgttgggtttgtttcggatcagcacacatttggatgcttttaatactgaacatttattaaatgcaagcagctcactgagccagagagaatttggagctatttgtggcctctagctccttggtctgaaaaattggagtgaatatcagagttcattctactccaggcttaagaccttctctgaatttatgaaattggaaacataatattcgaatcatttgacacaattattcatctataacatggatgtaagtgtttttagtatcttttcccttaaagttgagtagtgtaaaagtaaagccct

SEQ ID NO: 668526 - DNA, 919 bp, Homo sapiens
ttttatccaagatttcttgctaaagaatttcattactgaccatgttttcatcacatcttcaaataaatttatagtagataaaatctcaaccttctcaagtatagaattacattttatgtacagaggyatttctctatagctaaagattgatagccagttcatatttctatcattactttaaaggagaataagtcatgtgtatataaacagttaaacttataaatacctatgaactatgtgtactacaatgctagcaaatttaggaaaagaatttactgataagtttaataatttgaaaatgaagaaatgacataatacttggtatattttctacatctggataatttgaataaattttaaaagttgatctttgttgtattaggccacttttatgttgctatagagaaatacctcagactgggtaatttataaagaaaatttataaagaaaattaaattggcttacagttccataggctatacaagcatggcaccagcctctgctcagcttctggggaggcctcagggagcttttacttatgaagacaaactgggagcagggtcatcacatggtgaaagcagaagcatgagaaagggaggtgccacacacttttcaacaatcagatctcatgtgaactcactcatcaccaagggggtggcgctaagtcattcatgagagatatgcctacatgatccatacacatcccaccaggccccacctccaccactggggattacatttcaacatgacatttgcacggacaaatatccaaattatatcacttgtctttaggtaaattcaatgcagtattgaattataagtctggaaagattcatggaagatttgtgaacctaactcagtcgattctacttattcaatatatcatatttattcaatcagtaatttttacattgaacct

SEQ ID NO: 668527 - DNA, 1080 bp, Homo sapiens
aaaaaatttcccaaaagaaattgagtttccacactgaaaagatccctagggtacccagcacaatgaatgaagaagatccaagccaacataattattatgaaatttaaaaataataaagatgatggaaacattctaaaagcatctagggagataaatagatcacaaacaaagaatcaggaatcagaattatatgtgccttctcagtagcaacactgaaacccgaaagacaatgcaggaatggtttcaacattttaatctgagagaacataatttctaatatmaaattttatacaaaaccaaactattaagtacatgtagcatgaactaaagacattttcagactgtggaattaaataataataaataaaaataatatattattataaataaacaaaaaatgtattctcaccatctcaggaagatacaaatgaatatgctctaccaacatagtaaataaaaagacagaaagccttggtgtggcactaccaacttctcacccaatatccactcctcctcttccataggaatgcaacttgaatttagtccagatagcaatgcccaaccaaaagactgtatcagaatcccctatttcatttcacaaggcataggggatgacatctaagcaaagactttttttttttttttttttttttttgagagggagtctcactctgtcacccaggctggagtgcaattgtgcgatcttggctcactgccacctccacctcccaggttcaagcaattttctgcctcagcctcccgagtagctgggataacaggcacccgccaccatgcctggctaattttttggtgtgtttttaggagggactagattgcaccatcttggcctggctggtcttgaactcctgacgtcgtgatccaacctccttggcctcccaaagtgctggaattacaggcgtgagccaccgtacccgtcctaagctgacactttcaaatagttccttcaaagagagaccaacagccgacaagaactgtttgtcttctctctacctctttcccacttcctgctttgaatatacatgtgacatctaagatccagcaaatatttcatgactttca

SEQ ID NO: 668528 - DNA, 1080 bp, Homo sapiens
aaaaaatttcccaaaagaaattgagtttccacactgaaaagatccctagggtacccagcacaatgaatgaagaagatccaagccaacataattattatgaaatttaaaaataataaagatgatggaaacattctaaaagcatctagggagataaatagatcacaaacaaagaatcaggaatcagaattatatgtgccttctcagtagcaacactgaaacccgaaagacaatgcaggaatggtttcaacattttaatctgagagaacataatttctaatatcaaattttatacaaaaccaaactattaagtacatgtagcatgaactaaagacattttcagactgtggaattaaataataataaataaaaataatatattattataaataaacaaaaaatgtattctcaccatctcaggaagatacaaatgaatatgctctaccaacatagtaaataaaaagacagaaagccttggtgtggcactaccaacttctcacccaatatccactcctcctcttccataggaatgcaacttgaatttagtccagatagcaatgcccaaccaaaagactgtatcagaatcccctatttcatttcacaaggcataggggatracatctaagcaaagactttttttttttttttttttttttttgagagggagtctcactctgtcacccaggctggagtgcaattgtgcgatcttggctcactgccacctccacctcccaggttcaagcaattttctgcctcagcctcccgagtagctgggataacaggcacccgccaccatgcctggctaattttttggtgtgtttttaggagggactagattgcaccatcttggcctggctggtcttgaactcctgacgtcgtgatccaacctccttggcctcccaaagtgctggaattacaggcgtgagccaccgtacccgtcctaagctgacactttcaaatagttccttcaaagagagaccaacagccgacaagaactgtttgtcttctctctacctctttcccacttcctgctttgaatatacatgtgacatctaagatccagcaaatatttcatgactttca

SEQ ID NO: 668529 - DNA, 1080 bp, Homo sapiens
aaaaaatttcccaaaagaaattgagtttccacactgaaaagatccctagggtacccagcacaatgaatgaagaagatccaagccaacataattattatgaaatttaaaaataataaagatgatggaaacattctaaaagcatctagggagataaatagatcacaaacaaagaatcaggaatcagaattatatgtgccttctcagtagcaacactgaaacccgaaagacaatgcaggaatggtttcaacattttaatctgagagaacataatttctaatatcaaattttatacaaaaccaaactattaagtacatgtagcatgaactaaagacattttcagactgtggaattaaataataataaataaaaataatatattattataaataaacaaaaaatgtattctcaccatctcaggaagatacaaatgaatatgctctaccaacatagtaaataaaaagacagaaagccttggtgtggcactaccaacttctcacccaatatccactcctcctcttccataggaatgcaacttgaatttagtccagatagcaatgcccaaccaaaagactgtatcagaatcccctatttcatttcacaaggcataggggatgacatctaagcaaagactttttttttttttttttttttttttgagagggagtctcactctgtcacccaggctggagtgcaattgtgcgatcttggctcactgccacctccacctcccaggttcmagcaattttctgcctcagcctcccgagtagctgggataacaggcacccgccaccatgcctggctaattttttggtgtgtttttaggagggactagattgcaccatcttggcctggctggtcttgaactcctgacgtcgtgatccaacctccttggcctcccaaagtgctggaattacaggcgtgagccaccgtacccgtcctaagctgacactttcaaatagttccttcaaagagagaccaacagccgacaagaactgtttgtcttctctctacctctttcccacttcctgctttgaatatacatgtgacatctaagatccagcaaatatttcatgactttca

SEQ ID NO: 668530 - DNA, 1080 bp, Homo sapiens
aaaaaatttcccaaaagaaattgagtttccacactgaaaagatccctagggtacccagcacaatgaatgaagaagatccaagccaacataattattatgaaatttaaaaataataaagatgatggaaacattctaaaagcatctagggagataaatagatcacaaacaaagaatcaggaatcagaattatatgtgccttctcagtagcaacactgaaacccgaaagacaatgcaggaatggtttcaacattttaatctgagagaacataatttctaatatcaaattttatacaaaaccaaactattaagtacatgtagcatgaactaaagacattttcagactgtggaattaaataataataaataaaaataatatattattataaataaacaaaaaatgtattctcaccatctcaggaagatacaaatgaatatgctctaccaacatagtaaataaaaagacagaaagccttggtgtggcactaccaacttctcacccaatatccactcctcctcttccataggaatgcaacttgaatttagtccagatagcaatgcccaaccaaaagactgtatcagaatcccctatttcatttcacaaggcataggggatgacatctaagcaaagactttttttttttttttttttttttttgagagggagtctcactctgtcacccaggctggagtgcaattgtgcgatcttggctcactgccacctccacctcccaggttcaagcaattttctgcctcagcctcccgagtagctgggataacaggcacccgccaccatgcctggctaattttttggtgtgtttttaggagggactagattgcaccatcttggcctggctggtcttgaactcctgacgtcgtgatccamcctccttggcctcccaaagtgctggaattacaggcgtgagccaccgtacccgtcctaagctgacactttcaaatagttccttcaaagagagaccaacagccgacaagaactgtttgtcttctctctacctctttcccacttcctgctttgaatatacatgtgacatctaagatccagcaaatatttcatgactttca

SEQ ID NO: 668531 - DNA, 674 bp, Homo sapiens
gtcagagaaaaagattatggtataaaaattctaagccttcctaaatttgtgtgtgaaagcaataaattgacattcccatatctttaagatttttataaaatgtaccacctaggtattcttcctgaaaaatgtatttgtacctgtccttctgttcaataagagctgaactcatattaaattgtgaggagtgttaagagaaaaaaagtcatactgtgacactaartaaatacacagaaataagtgtgatagtatgactatagttgcaatgtggaatgtaacaacttaaaaatcataaagagaatgttacagagaacaacgatgggatttaaaacctcaaattaaattaacgaagacctggaagttgcaaagaacacagagaaagtgaaaggacttaattacttggctgtcattgtaggaaacagaaagttgtttgattaatgatctttatagctagataaaggtttaggaatgtttttgaaaagtgtaagataaatcactggtagaatttaaatcatgatatattgatgtcagtgcagaaaaccaaacgtgaagtttttgagggctgagaagcgaatgggatgaaaggaagtaaagacaagtatgacaccatttgcaaggatgtctactgtgaaaattagcagaaacccagggcagggactagaggaggatgtgga

SEQ ID NO: 668532 - DNA, 674 bp, Homo sapiens
gtcagagaaaaagattatggtataaaaattctaagccttcctaaatttgtgtgtgaaagcaataaattgacattcccatatctttaagatttttataaaatgtaccacctaggtattcttcctgaaaaatgtatttgtacctgtccttctgttcaataagagctgaactcatattaaattgtgaggagtgttaagagaaaaaaagtcatactgtgacactaaataaatacacagaaataagtgtgatagtatgactatagttgcaatgtggaatgtaacaacttaaaaatcataaagagaatgttacagagaacaacgatgggatttaaaacctcaaattaaattaacgaagacctggaagttgcaaagaacacagagaaagtgaaaggacttaattacttggctgtcattgtaggaaacagaaagttgtttgattaatgatctttatagctagataaaggtttaggaatgtttttgaaaagtgtaagataaatcactggtagaatttaaatcatgatatattgatgtcagtgcagaaaaccaaacgtgaagtttttgagggctgagaagcraatgggatgaaaggaagtaaagacaagtatgacaccatttgcaaggatgtctactgtgaaaattagcagaaacccagggcagggactagaggaggatgtgga

SEQ ID NO: 668533 - DNA, 674 bp, Homo sapiens
gtcagagaaaaagattatggtataaaaattctaagccttcctaaatttgtgtgtgaaagcaataaattgacattcccatatctttaagatttttataaaatgtaccacctaggtattcttcctgaaaaatgtatttgtacctgtccttctgttcaataagagctgaactcatattaaattgtgaggagtgttaagagaaaaaaagtcatactgtgacactaaataaatacacagaaataagtgtgatagtatgactatagttgcaatgtggaatgtaacaacttaaaaatcataaagagaatgttacagagaacaacgatgggatttaaaacctcaaattaaattaacgaagacctggaagttgcaaagaacacagagaaagtgaaaggacttaattacttggctgtcattgtaggaaacagaaagttgtttgattaatgatctttatagctagataaaggtttaggaatgtttttgaaaagtgtaagataaatcactggtagaatttaaatcatgatatattgatgtcagtgcagaaaaccaaacgtgaagtttttgagggctgagaagcgaatgggatgaaaggaagtaaagacaagtatgacaccatttgcaaggatgtctacygtgaaaattagcagaaacccagggcagggactagaggaggatgtgga

SEQ ID NO: 668534 - DNA, 600 bp, Homo sapiens
tgttgtttttcaagggctgccaggagaagctgactctgatttttgaggatcagaaaaaattttatattcgttataattgggattcttatcttcttgtaaaagtgaaatataaatcaaaagctgctgttgtcttctctttgttttatcttttcctaggcaaagatggagaatatgaagagctgctcaattccagttccatctcctctttgctggatgcacagggtttcagtgatctggagaaaagtccatcacccactccagtaatgggatctcccagttgtgacccatttaacacaagtgttcccgaagaggtattaatagactttcagtatttcctttatgttgaagagactgtgttaytgaaaagttaaaacactgctcataacatgaaaaacatgggttcctttctcagttccatcaccaactcaagtgaggttatataaataaattgactttggccacttctgatggtgactctgaaagataattgaataaaattttcttctgacttctttagacttggaagaagcaactggagaggagtaaacagttatacactccttactttgcatcaaactggcaggaaaatctgtttgctgt

SEQ ID NO: 668535 - DNA, 590 bp, Homo sapiens
gagctacaagatgagatttgggtggggacacagagtcaaaccatatsattacccagaaagcatttatggtggcctaccagcttgggaagtggttaacgaaaatgacattggttaatgaaaactatagtcaaggctttgaaaaatcttgtaatgtgaaaacaactttaaaaaattataaaaacaatacagtatgggaaaattagaagctataagacaaaagggggcaatattttttaaaacctaccaagagcaaaactttagaggtagaaattagatcagtggttgccaggagcccctgggggtagggaaatggtataggctgcagaagggtaaggggagcactgtgagggacagaaataatccacatcagcactgtccaataaaaatgtaatttgagccacaagtgggaaccattaacttttatttttctataggtaaatttttaaaaagaaagagacataggaataggtaaaattaattttttgatgttttatttaacttaatatataaaatataatttcactctaaaataaatataaaattattacatatttttgcactttacacttatgacacatttgattttgtgc

SEQ ID NO: 668536 - DNA, 972 bp, Homo sapiens
gtcacctctcttcctgaggtgagacacccgggcctcaggtcatcccagccacctaccctagacctaccctctccaggggttctcacactgcaaaatcaacaggttccctctctcagtggcaaagtcaaagcattcatcctttcagtgaccagatcatggtgaaatgttaagaaacaatggtcttattcaggaattcacatgacggtataaataactaagtgtacagactagaagcagaaagcagtcagtgtaagttttctagcagggaaacctttctaaagaagcagcatgatctgagctttcacaaacaggtgggacgtagacctactaaccgatgttgtaggtaaatggaatggatggagatctgcaagggcccaggattccgaggcgttcagttctggtggttcatgaaacaggcttgaggactcttgttgatatgtgaatagagggggagaaaaagatattatctaaaaagctagacctggaatttccctcagaaagaaaacgatcttcttcaacatttcttgttgttgtttcaaaagaaaacaccactgtaggctgtatcagacacaaaactatgtattcatccagtgtgtttgattttcttctgaggcacacggggggctacgctttccagcccctttgcatttggagggggcacatgactacttctggcctccaggtctgagcagaggtgatgtgggtcccttgaggctgaaacayttataagctgcgtagtggaatgaatacttcatgatattaaagaatggttggaaatttttttgtagctaccatgagaatactgtggctgtatattttaaaagacagccatatcatttagagatatagtatgctgaaataatgatgactgaactggcactatagttgggactagtttccaaacagttggtggtgggtcagggaaaacaagagggactattagtgggtggggctattgatggaataagatta

SEQ ID NO: 668537 - DNA, 632 bp, Homo sapiens
taaattttccttccagaaattttaaactctgaattcaagttacttmcaaggaaacagttacttcaattatcatatattaaacggtgaaaatgacgacaaagaagccataggagaaaataatttcagttctcttaaccattctgcaaattaaagttagaggtgaaaggaatcaaaacagctcatgtagttttataatgagggaaaaaaatgatgcccagaaatgttacttggcctgcaaaaaggtcatgatgtttcagtgtcaaaggtcaatgagtttaagcttcatcaatttacttagaggaccttatttttattccctctatgattaatttagttggaggccctagttttttattccttctacaactaatagcaaaaatttcagacatcacccttgtctctcattaacagtcccagggaagtttcaattcattagtgatggcaggtactgaatccatttaataggcactaatcactgtgctaagcaccttaccatttttatttcatactagccctgtgagtccatacttgtccctgtcttgcaaatgaggcggaggaggtacttactcagggatctcatggctggcaagaggcaaaggtgagacccaaatctaaatccaaatcaagcattc

SEQ ID NO: 668538 - DNA, 632 bp, Homo sapiens
taaattttccttccagaaattttaaactctgaattcaagttacttccaaggaaacagttacttcaattatcatatattaaayggtgaaaatgacgacaaagaagccataggagaaaataatttcagttctcttaaccattctgcaaattaaagttagaggtgaaaggaatcaaaacagctcatgtagttttataatgagggaaaaaaatgatgcccagaaatgttacttggcctgcaaaaaggtcatgatgtttcagtgtcaaaggtcaatgagtttaagcttcatcaatttacttagaggaccttatttttattccctctatgattaatttagttggaggccctagttttttattccttctacaactaatagcaaaaatttcagacatcacccttgtctctcattaacagtcccagggaagtttcaattcattagtgatggcaggtactgaatccatttaataggcactaatcactgtgctaagcaccttaccatttttatttcatactagccctgtgagtccatacttgtccctgtcttgcaaatgaggcggaggaggtacttactcagggatctcatggctggcaagaggcaaaggtgagacccaaatctaaatccaaatcaagcattc

SEQ ID NO: 668539 - DNA, 632 bp, Homo sapiens
taaattttccttccagaaattttaaactctgaattcaagttacttccaaggaaacagttacttcaattatcatatattaaacggtgaaaatgacgacaaagaagccataggagaaaataatttcagttctcttaaccattctgcaaattaaagttagaggtgaaaggaatcaaaacagctcatgtagttttataatgagggaaaaaaatgatgcccagaaatgttacttggcctgcaaaaaggtcatgatgtttcagtgtcaaaggtcaatgagtttaagcttcatcaatttacttagaggaccttatttttattccctctatgattaatttagttggaggccctagttttttattccttctacaactaatagcaaaaayttcagacatcacccttgtctctcattaacagtcccagggaagtttcaattcattagtgatggcaggtactgaatccatttaataggcactaatcactgtgctaagcaccttaccatttttatttcatactagccctgtgagtccatacttgtccctgtcttgcaaatgaggcggaggaggtacttactcagggatctcatggctggcaagaggcaaaggtgagacccaaatctaaatccaaatcaagcattc

SEQ ID NO: 668540 - DNA, 632 bp, Homo sapiens
taaattttccttccagaaattttaaactctgaattcaagttacttccaaggaaacagttacttcaattatcatatattaaacggtgaaaatgacgacaaagaagccataggagaaaataatttcagttctcttaaccattctgcaaattaaagttagaggtgaaaggaatcaaaacagctcatgtagttttataatgagggaaaaaaatgatgcccagaaatgttacttggcctgcaaaaaggtcatgatgtttcagtgtcaaaggtcaatgagtttaagcttcatcaatttacttagaggaccttatttttattccctctatgattaatttagttggaggccctagttttttattccttctacaactaatagcaaaaatttcagacatcacccttgtctctcattaacagtcccagggaagtttcaattcattagtgatggcaggtactgaatccatttaataggcactaatcactgtgctaagcaccttaccatttttatttcatactagycctgtgagtccatacttgtccctgtcttgcaaatgaggcggaggaggtacttactcagggatctcatggctggcaagaggcaaaggtgagacccaaatctaaatccaaatcaagcattc

SEQ ID NO: 668541 - DNA, 632 bp, Homo sapiens
taaattttccttccagaaattttaaactctgaattcaagttacttccaaggaaacagttacttcaattatcatatattaaacggtgaaaatgacgacaaagaagccataggagaaaataatttcagttctcttaaccattctgcaaattaaagttagaggtgaaaggaatcaaaacagctcatgtagttttataatgagggaaaaaaatgatgcccagaaatgttacttggcctgcaaaaaggtcatgatgtttcagtgtcaaaggtcaatgagtttaagcttcatcaatttacttagaggaccttatttttattccctctatgattaatttagttggaggccctagttttttattccttctacaactaatagcaaaaatttcagacatcacccttgtctctcattaacagtcccagggaagtttcaattcattagtgatggcaggtactgaatccatttaataggcactaatcactgtgctaagcaccttaccatttttatttcatactagccctgtgagtccatacttgtccctgtctygcaaatgaggcggaggaggtacttactcagggatctcatggctggcaagaggcaaaggtgagacccaaatctaaatccaaatcaagcattc

SEQ ID NO: 668542 - DNA, 1496 bp, Homo sapiens
caggtgatccacccaccttggcctcccaaagtgctgggattacaggcatgagccactgctcctggccccagcttctaattaattaaaagtgataaagatcatttcaatatcttcttcagttcatasagttctacaatgaaggcttttcatacaaatgaatgaagttaacagtgcacaatttttgaaagtccttttaataagcacgcttttaaaagttaacgcatgtagtgattgctgcaggttgaaacacaagtgccatccatgtaccgtggactcagaaattctaagtgagaaaaaatggtaagaaggagaatgagcagagctgggagggcgtcactgtgtggtgagatggccaaccagcctgtcccacagagagaagcaaccagcagaaacagggagtgggacagatgaggatgctccaagtgacaaatgtagctgacacctgaggaagatgagaagtgaattaggtgcaaagagatagaatatgatatatatacagaggcctaagattgagagggcaagctcagagggagaaagtgaaagaagtccatatggctggaagatctaatactggtacagtggtgaacagagagactaaagtggtaggcaggggccctttcactccgggacttcatggcccattgtggagtttagactttattctgatggcaatggacagtcagtgaagggcttaacacagagagataaccccatctgatttccaatagtgcagtgttagcattgcatgacattggtagagtgcccactctgaagtccataacaaagaacaagaggtccagcagcctcaagggggacatggtgaacaccaggaagtagacagctattttggaaatttccgagataccagatgtagaaacaaataagaggttctcgttcaagtagatagagagaccttatcataagaataagtgagaaaagcatgtgttacgtttacttagcagtatgatttaggtgttaagtatgtttctactataatcttttgttagttggtcatcaatttggtatatataaaaacttgctactaagaagaatatttaatttgccaaataaactccctttagaagaggatacatagtatgtatttgtatggcatttatgtgtcaaagagcttttcgattcattctaacatttaatctttgagatatattcatgaagtgggcagaacagagagaactggccccattgtacagatttagacctagggagcagtgggtctagcaccaggattgagtctcctgatggccaattcaatgcctttttgctgcatcactggtctcctctctgaccacacatttgctgtgttttccgttatttccatccatccaagtttgttgcaaaccaaagactaaataatccatgcaataaaatcactgctacttgcaatacacatttgtgtaagtgcacaagtagacgtttgcactaagaaaaagattaaaacagtcaatagtactataatgatattttctgatcctttt

SEQ ID NO: 668543 - DNA, 1496 bp, Homo sapiens
caggtgatccacccaccttggcctcccaaagtgctgggattacaggcatgagccactgctcctggccccagcttctaattaattaaaagtgataaagatcatttcaatatcttcttcagttcatacagttctacaatgaaggcttttcatacaaatgaatgaagttaacagtgcacaatttttgaaagtccttttaataagcacscttttaaaagttaacgcatgtagtgattgctgcaggttgaaacacaagtgccatccatgtaccgtggactcagaaattctaagtgagaaaaaatggtaagaaggagaatgagcagagctgggagggcgtcactgtgtggtgagatggccaaccagcctgtcccacagagagaagcaaccagcagaaacagggagtgggacagatgaggatgctccaagtgacaaatgtagctgacacctgaggaagatgagaagtgaattaggtgcaaagagatagaatatgatatatatacagaggcctaagattgagagggcaagctcagagggagaaagtgaaagaagtccatatggctggaagatctaatactggtacagtggtgaacagagagactaaagtggtaggcaggggccctttcactccgggacttcatggcccattgtggagtttagactttattctgatggcaatggacagtcagtgaagggcttaacacagagagataaccccatctgatttccaatagtgcagtgttagcattgcatgacattggtagagtgcccactctgaagtccataacaaagaacaagaggtccagcagcctcaagggggacatggtgaacaccaggaagtagacagctattttggaaatttccgagataccagatgtagaaacaaataagaggttctcgttcaagtagatagagagaccttatcataagaataagtgagaaaagcatgtgttacgtttacttagcagtatgatttaggtgttaagtatgtttctactataatcttttgttagttggtcatcaatttggtatatataaaaacttgctactaagaagaatatttaatttgccaaataaactccctttagaagaggatacatagtatgtatttgtatggcatttatgtgtcaaagagcttttcgattcattctaacatttaatctttgagatatattcatgaagtgggcagaacagagagaactggccccattgtacagatttagacctagggagcagtgggtctagcaccaggattgagtctcctgatggccaattcaatgcctttttgctgcatcactggtctcctctctgaccacacatttgctgtgttttccgttatttccatccatccaagtttgttgcaaaccaaagactaaataatccatgcaataaaatcactgctacttgcaatacacatttgtgtaagtgcacaagtagacgtttgcactaagaaaaagattaaaacagtcaatagtactataatgatattttctgatcctttt

SEQ ID NO: 668544 - DNA, 1496 bp, Homo sapiens
caggtgatccacccaccttggcctcccaaagtgctgggattacaggcatgagccactgctcctggccccagcttctaattaattaaaagtgataaagatcatttcaatatcttcttcagttcatacagttctacaatgaaggcttttcatacaaatgaatgaagttaacagtgcacaatttttgaaagtccttttaataagcacgcttttaaaagttaacgcatgtagtgattgctgcaggttgaaacacaagtgccatccatgtaccgtggactcagaaattctaagtgagaaaaaatggtaagaaggagaatgagcagagctgggagggcgtcactgtgtggtgagatggccaaccagcctgtcccacagagagaagcaaccagcagaaacagggagtgggacagatgaggatgctccaagtgacaaatgtagctgacacctgaggaagatgagaagtgaattaggtgcaaaragatagaatatgatatatatacagaggcctaagattgagagggcaagctcagagggagaaagtgaaagaagtccatatggctggaagatctaatactggtacagtggtgaacagagagactaaagtggtaggcaggggccctttcactccgggacttcatggcccattgtggagtttagactttattctgatggcaatggacagtcagtgaagggcttaacacagagagataaccccatctgatttccaatagtgcagtgttagcattgcatgacattggtagagtgcccactctgaagtccataacaaagaacaagaggtccagcagcctcaagggggacatggtgaacaccaggaagtagacagctattttggaaatttccgagataccagatgtagaaacaaataagaggttctcgttcaagtagatagagagaccttatcataagaataagtgagaaaagcatgtgttacgtttacttagcagtatgatttaggtgttaagtatgtttctactataatcttttgttagttggtcatcaatttggtatatataaaaacttgctactaagaagaatatttaatttgccaaataaactccctttagaagaggatacatagtatgtatttgtatggcatttatgtgtcaaagagcttttcgattcattctaacatttaatctttgagatatattcatgaagtgggcagaacagagagaactggccccattgtacagatttagacctagggagcagtgggtctagcaccaggattgagtctcctgatggccaattcaatgcctttttgctgcatcactggtctcctctctgaccacacatttgctgtgttttccgttatttccatccatccaagtttgttgcaaaccaaagactaaataatccatgcaataaaatcactgctacttgcaatacacatttgtgtaagtgcacaagtagacgtttgcactaagaaaaagattaaaacagtcaatagtactataatgatattttctgatcctttt

SEQ ID NO: 668545 - DNA, 1496 bp, Homo sapiens
caggtgatccacccaccttggcctcccaaagtgctgggattacaggcatgagccactgctcctggccccagcttctaattaattaaaagtgataaagatcatttcaatatcttcttcagttcatacagttctacaatgaaggcttttcatacaaatgaatgaagttaacagtgcacaatttttgaaagtccttttaataagcacgcttttaaaagttaacgcatgtagtgattgctgcaggttgaaacacaagtgccatccatgtaccgtggactcagaaattctaagtgagaaaaaatggtaagaaggagaatgagcagagctgggagggcgtcactgtgtggtgagatggccaaccagcctgtcccacagagagaagcaaccagcagaaacagggagtgggacagatgaggatgctccaagtgacaaatgtagctgacacctgaggaagatgagaagtgaattaggtgcaaagagatagaatatgatatatatacagaggcctaagattgagagggcaagctcagagggagaaagtgaaagaagtccatatggctggaagatctaatactggyacagtggtgaacagagagactaaagtggtaggcaggggccctttcactccgggacttcatggcccattgtggagtttagactttattctgatggcaatggacagtcagtgaagggcttaacacagagagataaccccatctgatttccaatagtgcagtgttagcattgcatgacattggtagagtgcccactctgaagtccataacaaagaacaagaggtccagcagcctcaagggggacatggtgaacaccaggaagtagacagctattttggaaatttccgagataccagatgtagaaacaaataagaggttctcgttcaagtagatagagagaccttatcataagaataagtgagaaaagcatgtgttacgtttacttagcagtatgatttaggtgttaagtatgtttctactataatcttttgttagttggtcatcaatttggtatatataaaaacttgctactaagaagaatatttaatttgccaaataaactccctttagaagaggatacatagtatgtatttgtatggcatttatgtgtcaaagagcttttcgattcattctaacatttaatctttgagatatattcatgaagtgggcagaacagagagaactggccccattgtacagatttagacctagggagcagtgggtctagcaccaggattgagtctcctgatggccaattcaatgcctttttgctgcatcactggtctcctctctgaccacacatttgctgtgttttccgttatttccatccatccaagtttgttgcaaaccaaagactaaataatccatgcaataaaatcactgctacttgcaatacacatttgtgtaagtgcacaagtagacgtttgcactaagaaaaagattaaaacagtcaatagtactataatgatattttctgatcctttt

SEQ ID NO: 668546 - DNA, 1164 bp, Homo sapiens
gttaaaatgaagaataacattggtttctgtcttaattcagctaagtttcccttgcagattcagcatggtmctttgtacagtagtcatttaattcatcaaactgtgtttaaaaaaatcctaaccatacaagtcttaacaccacatttacaaaccccacaaacatcagggcccaatttgagactgttattttaacaaacacaattttcctgtcctaaacttaactcaagtccaactgaacgtccactgaaagttttccagtctaaagtttccagatcatagagattttcatacatgaagctggattttcatccagtgtgaccaacccattcagtttgcctggcactaaggagcttcgtgggacacaggaccttcagtactaaaactgggacaatcctggaaaaacctggtcaccctgtgtgccatcctctagtaagctggtacagtacagtagaataaactgctaaggagtagttctgcaaaagtcaaagaaaaaagtggtttctctgtgccctggacacacatgcaaatacacacacacacacacacacacacacacacacacacacacaccctccatgactttctgtttcttgtgaataagagtttaatcaaaaacgagtgtttctctggtggaagatatctactaattggttcaacttgttaattctgaaaacatgagaactagaattttctcacccacgctttccagctgtcagacaaatcttttcatctaacttggatgagccaatataaggtattcttaatagcattgttccatgaaagtaacaaaatggaaaggagggaaggaagagacaagggtttaataaccattaagactgtacagagtccccctctgtgtgcaatcaatggaattataatgactttgtttagtggatgataaagctgcctggttgattctaacagaagctgatatttcaaaaacgaaattgaatcaagcttacgccattaattaaaaggaatttgatggttttcattttaaagcacaccatatctataaaggatggacacaatagtgcctaaataatcttagctgcaaataacctaaacattcaacaaaactaaaattccaaaacctcacacttgtaattttgaaacatttatctgttcatacactgctacgtgtgtcagatatccattttaatt

SEQ ID NO: 668547 - DNA, 1164 bp, Homo sapiens
gttaaaatgaagaataacattggtttctgtcttaattcagctaagtttcccttgcagattcagcatggtactttgtacagtagtcatttaattcatcaaactgtgtttaaaaaaatcctaaccatacaagtcttaacaccacatttacaaaccccacaaacatcagggcccartttgagactgttattttaacaaacacaattttcctgtcctaaacttaactcaagtccaactgaacgtccactgaaagttttccagtctaaagtttccagatcatagagattttcatacatgaagctggattttcatccagtgtgaccaacccattcagtttgcctggcactaaggagcttcgtgggacacaggaccttcagtactaaaactgggacaatcctggaaaaacctggtcaccctgtgtgccatcctctagtaagctggtacagtacagtagaataaactgctaaggagtagttctgcaaaagtcaaagaaaaaagtggtttctctgtgccctggacacacatgcaaatacacacacacacacacacacacacacacacacacacacacaccctccatgactttctgtttcttgtgaataagagtttaatcaaaaacgagtgtttctctggtggaagatatctactaattggttcaacttgttaattctgaaaacatgagaactagaattttctcacccacgctttccagctgtcagacaaatcttttcatctaacttggatgagccaatataaggtattcttaatagcattgttccatgaaagtaacaaaatggaaaggagggaaggaagagacaagggtttaataaccattaagactgtacagagtccccctctgtgtgcaatcaatggaattataatgactttgtttagtggatgataaagctgcctggttgattctaacagaagctgatatttcaaaaacgaaattgaatcaagcttacgccattaattaaaaggaatttgatggttttcattttaaagcacaccatatctataaaggatggacacaatagtgcctaaataatcttagctgcaaataacctaaacattcaacaaaactaaaattccaaaacctcacacttgtaattttgaaacatttatctgttcatacactgctacgtgtgtcagatatccattttaatt

SEQ ID NO: 668548 - DNA, 1164 bp, Homo sapiens
gttaaaatgaagaataacattggtttctgtcttaattcagctaagtttcccttgcagattcagcatggtactttgtacagtagtcatttaattcatcaaactgtgtttaaaaaaatcctaaccatacaagtcttaacaccacatttacaaaccccacaaacatcagggcccaatttgagactgttattttaacaaacacaattttcctgtcctaaacttaactcaagtccaactgaacgtccactgaaagttttccagtctaaagtttccagatcatagagattttcatacatgaagctggaytttcatccagtgtgaccaacccattcagtttgcctggcactaaggagcttcgtgggacacaggaccttcagtactaaaactgggacaatcctggaaaaacctggtcaccctgtgtgccatcctctagtaagctggtacagtacagtagaataaactgctaaggagtagttctgcaaaagtcaaagaaaaaagtggtttctctgtgccctggacacacatgcaaatacacacacacacacacacacacacacacacacacacacacaccctccatgactttctgtttcttgtgaataagagtttaatcaaaaacgagtgtttctctggtggaagatatctactaattggttcaacttgttaattctgaaaacatgagaactagaattttctcacccacgctttccagctgtcagacaaatcttttcatctaacttggatgagccaatataaggtattcttaatagcattgttccatgaaagtaacaaaatggaaaggagggaaggaagagacaagggtttaataaccattaagactgtacagagtccccctctgtgtgcaatcaatggaattataatgactttgtttagtggatgataaagctgcctggttgattctaacagaagctgatatttcaaaaacgaaattgaatcaagcttacgccattaattaaaaggaatttgatggttttcattttaaagcacaccatatctataaaggatggacacaatagtgcctaaataatcttagctgcaaataacctaaacattcaacaaaactaaaattccaaaacctcacacttgtaattttgaaacatttatctgttcatacactgctacgtgtgtcagatatccattttaatt

SEQ ID NO: 668549 - DNA, 1164 bp, Homo sapiens
gttaaaatgaagaataacattggtttctgtcttaattcagctaagtttcccttgcagattcagcatggtactttgtacagtagtcatttaattcatcaaactgtgtttaaaaaaatcctaaccatacaagtcttaacaccacatttacaaaccccacaaacatcagggcccaatttgagactgttattttaacaaacacaattttcctgtcctaaacttaactcaagtccaactgaacgtccactgaaagttttccagtctaaagtttccagatcatagagattttcatacatgaagctggattktcatccagtgtgaccaacccattcagtttgcctggcactaaggagcttcgtgggacacaggaccttcagtactaaaactgggacaatcctggaaaaacctggtcaccctgtgtgccatcctctagtaagctggtacagtacagtagaataaactgctaaggagtagttctgcaaaagtcaaagaaaaaagtggtttctctgtgccctggacacacatgcaaatacacacacacacacacacacacacacacacacacacacacaccctccatgactttctgtttcttgtgaataagagtttaatcaaaaacgagtgtttctctggtggaagatatctactaattggttcaacttgttaattctgaaaacatgagaactagaattttctcacccacgctttccagctgtcagacaaatcttttcatctaacttggatgagccaatataaggtattcttaatagcattgttccatgaaagtaacaaaatggaaaggagggaaggaagagacaagggtttaataaccattaagactgtacagagtccccctctgtgtgcaatcaatggaattataatgactttgtttagtggatgataaagctgcctggttgattctaacagaagctgatatttcaaaaacgaaattgaatcaagcttacgccattaattaaaaggaatttgatggttttcattttaaagcacaccatatctataaaggatggacacaatagtgcctaaataatcttagctgcaaataacctaaacattcaacaaaactaaaattccaaaacctcacacttgtaattttgaaacatttatctgttcatacactgctacgtgtgtcagatatccattttaatt

SEQ ID NO: 668550 - DNA, 1164 bp, Homo sapiens
gttaaaatgaagaataacattggtttctgtcttaattcagctaagtttcccttgcagattcagcatggtactttgtacagtagtcatttaattcatcaaactgtgtttaaaaaaatcctaaccatacaagtcttaacaccacatttacaaaccccacaaacatcagggcccaatttgagactgttattttaacaaacacaattttcctgtcctaaacttaactcaagtccaactgaacgtccactgaaagttttccagtctaaagtttccagatcatagagattttcatacatgaagctggattttcatccagkgtgaccaacccattcagtttgcctggcactaaggagcttcgtgggacacaggaccttcagtactaaaactgggacaatcctggaaaaacctggtcaccctgtgtgccatcctctagtaagctggtacagtacagtagaataaactgctaaggagtagttctgcaaaagtcaaagaaaaaagtggtttctctgtgccctggacacacatgcaaatacacacacacacacacacacacacacacacacacacacacaccctccatgactttctgtttcttgtgaataagagtttaatcaaaaacgagtgtttctctggtggaagatatctactaattggttcaacttgttaattctgaaaacatgagaactagaattttctcacccacgctttccagctgtcagacaaatcttttcatctaacttggatgagccaatataaggtattcttaatagcattgttccatgaaagtaacaaaatggaaaggagggaaggaagagacaagggtttaataaccattaagactgtacagagtccccctctgtgtgcaatcaatggaattataatgactttgtttagtggatgataaagctgcctggttgattctaacagaagctgatatttcaaaaacgaaattgaatcaagcttacgccattaattaaaaggaatttgatggttttcattttaaagcacaccatatctataaaggatggacacaatagtgcctaaataatcttagctgcaaataacctaaacattcaacaaaactaaaattccaaaacctcacacttgtaattttgaaacatttatctgttcatacactgctacgtgtgtcagatatccattttaatt

SEQ ID NO: 668551 - DNA, 1421 bp, Homo sapiens
atcgatttccagggatcccatctacactctgccttcaaacgaaaggtcacctccaggagcgatgcactgggcacagtctctcttcaagacgtgaggacacggcaaatggtgctaattccaytaggcaggggattaaaaatcatgattgatcaccaattttctaactagcactctatgagaaactgatagaagatgatgccctcgtgcagccaaatgaagcattttgtgggcatgctggaatgaaccctgaagccaggccatatcagtgtgggcagttggggagtcattaagtcttgacagagctggctggcatgccacagtgtgtgaagaagaaaaacatcctgtcctcctataatatgatttgagggccaaaataatacaattcacatcaggccctccagaggagatgcagacaaggtccaagtctggtccttctgtggaaatgaaagtactgacaggcacacagatatccctctgcctaaaagcatttatcattttaagccattaggattttcagttccaccttcaagaaaacagcataaataaattcactggcctctaattttgctgtttctcttctttatctagtcaatgtaatgggtttcaggatcaaggttattacaaataaaaataaaatcagatttgcagcatgaataaccctttatctgcatgtctgtttagtaccttgtgatttttttgttgttgtttatttgtttttgttcttaccacatcttaacaggaccaatgggcctactcactaataagcacatcctgcagttatttccatacataaaatatgtgccataaaatatgcatagaagcacaagcaacccaaacaagataaatgaattaatcctactgtatgagccattctcagacaactaaatgatttaatttcttcatttacaaaagacaactattccatcgttataccgcggtagccccctttatctgcagtttcagttacctgcagtcaattgccgtccaaaaataggaaatggaaaattccagaaagaaaaaattcataagttttaaatcacatgccttttaagttgttccgagtagcataatgaaatctcacattatcccacttggtcccacttgggaagtgaatcctccctgtgtccggcatatccactctgttcacccattagtgatgtagcagccagctcagttatcagatcgactgccgcagcatcacagtgcttgtactcaaggaacccttattttacttaataatgccccacacatgcaaaagcagcgatgctgccatatggctataattgctctattttattatgttattgttgttaatctcttactgtacctaatttataaattaaacttcatcacaggtatgtatatataggaaaaaacgtagcaatagtatgtctaggatttggtactatccatggtttccg

SEQ ID NO: 668552 - DNA, 1421 bp, Homo sapiens
atcgatttccagggatcccatctacactctgccttcaaacgaaaggtcacctccaggagcgatgcactgggcacagtctctcttcaagacgtgaggacacggcaaatggtgctaattccactaggcaggggattaaaaatcatgattgatcaccaattttckaactagcactctatgagaaactgatagaagatgatgccctcgtgcagccaaatgaagcattttgtgggcatgctggaatgaaccctgaagccaggccatatcagtgtgggcagttggggagtcattaagtcttgacagagctggctggcatgccacagtgtgtgaagaagaaaaacatcctgtcctcctataatatgatttgagggccaaaataatacaattcacatcaggccctccagaggagatgcagacaaggtccaagtctggtccttctgtggaaatgaaagtactgacaggcacacagatatccctctgcctaaaagcatttatcattttaagccattaggattttcagttccaccttcaagaaaacagcataaataaattcactggcctctaattttgctgtttctcttctttatctagtcaatgtaatgggtttcaggatcaaggttattacaaataaaaataaaatcagatttgcagcatgaataaccctttatctgcatgtctgtttagtaccttgtgatttttttgttgttgtttatttgtttttgttcttaccacatcttaacaggaccaatgggcctactcactaataagcacatcctgcagttatttccatacataaaatatgtgccataaaatatgcatagaagcacaagcaacccaaacaagataaatgaattaatcctactgtatgagccattctcagacaactaaatgatttaatttcttcatttacaaaagacaactattccatcgttataccgcggtagccccctttatctgcagtttcagttacctgcagtcaattgccgtccaaaaataggaaatggaaaattccagaaagaaaaaattcataagttttaaatcacatgccttttaagttgttccgagtagcataatgaaatctcacattatcccacttggtcccacttgggaagtgaatcctccctgtgtccggcatatccactctgttcacccattagtgatgtagcagccagctcagttatcagatcgactgccgcagcatcacagtgcttgtactcaaggaacccttattttacttaataatgccccacacatgcaaaagcagcgatgctgccatatggctataattgctctattttattatgttattgttgttaatctcttactgtacctaatttataaattaaacttcatcacaggtatgtatatataggaaaaaacgtagcaatagtatgtctaggatttggtactatccatggtttccg

SEQ ID NO: 668553 - DNA, 1421 bp, Homo sapiens
atcgatttccagggatcccatctacactctgccttcaaacgaaaggtcacctccaggagcgatgcactgggcacagtctctcttcaagacgtgaggacacggcaaatggtgctaattccactaggcaggggattaaaaatcatgattgatcaccaattttctaactagcactctatgagaaactgatagaagatgatgccctcgkgcagccaaatgaagcattttgtgggcatgctggaatgaaccctgaagccaggccatatcagtgtgggcagttggggagtcattaagtcttgacagagctggctggcatgccacagtgtgtgaagaagaaaaacatcctgtcctcctataatatgatttgagggccaaaataatacaattcacatcaggccctccagaggagatgcagacaaggtccaagtctggtccttctgtggaaatgaaagtactgacaggcacacagatatccctctgcctaaaagcatttatcattttaagccattaggattttcagttccaccttcaagaaaacagcataaataaattcactggcctctaattttgctgtttctcttctttatctagtcaatgtaatgggtttcaggatcaaggttattacaaataaaaataaaatcagatttgcagcatgaataaccctttatctgcatgtctgtttagtaccttgtgatttttttgttgttgtttatttgtttttgttcttaccacatcttaacaggaccaatgggcctactcactaataagcacatcctgcagttatttccatacataaaatatgtgccataaaatatgcatagaagcacaagcaacccaaacaagataaatgaattaatcctactgtatgagccattctcagacaactaaatgatttaatttcttcatttacaaaagacaactattccatcgttataccgcggtagccccctttatctgcagtttcagttacctgcagtcaattgccgtccaaaaataggaaatggaaaattccagaaagaaaaaattcataagttttaaatcacatgccttttaagttgttccgagtagcataatgaaatctcacattatcccacttggtcccacttgggaagtgaatcctccctgtgtccggcatatccactctgttcacccattagtgatgtagcagccagctcagttatcagatcgactgccgcagcatcacagtgcttgtactcaaggaacccttattttacttaataatgccccacacatgcaaaagcagcgatgctgccatatggctataattgctctattttattatgttattgttgttaatctcttactgtacctaatttataaattaaacttcatcacaggtatgtatatataggaaaaaacgtagcaatagtatgtctaggatttggtactatccatggtttccg

SEQ ID NO: 668554 - DNA, 1421 bp, Homo sapiens
atcgatttccagggatcccatctacactctgccttcaaacgaaaggtcacctccaggagcgatgcactgggcacagtctctcttcaagacgtgaggacacggcaaatggtgctaattccactaggcaggggattaaaaatcatgattgatcaccaattttctaactagcactctatgagaaactgatagaagatgatgccctcgtgcagccaaatgaagcattttgtgggcatgctggaatgaaccctgaagccaggccatatcagtgtgggcagytggggagtcattaagtcttgacagagctggctggcatgccacagtgtgtgaagaagaaaaacatcctgtcctcctataatatgatttgagggccaaaataatacaattcacatcaggccctccagaggagatgcagacaaggtccaagtctggtccttctgtggaaatgaaagtactgacaggcacacagatatccctctgcctaaaagcatttatcattttaagccattaggattttcagttccaccttcaagaaaacagcataaataaattcactggcctctaattttgctgtttctcttctttatctagtcaatgtaatgggtttcaggatcaaggttattacaaataaaaataaaatcagatttgcagcatgaataaccctttatctgcatgtctgtttagtaccttgtgatttttttgttgttgtttatttgtttttgttcttaccacatcttaacaggaccaatgggcctactcactaataagcacatcctgcagttatttccatacataaaatatgtgccataaaatatgcatagaagcacaagcaacccaaacaagataaatgaattaatcctactgtatgagccattctcagacaactaaatgatttaatttcttcatttacaaaagacaactattccatcgttataccgcggtagccccctttatctgcagtttcagttacctgcagtcaattgccgtccaaaaataggaaatggaaaattccagaaagaaaaaattcataagttttaaatcacatgccttttaagttgttccgagtagcataatgaaatctcacattatcccacttggtcccacttgggaagtgaatcctccctgtgtccggcatatccactctgttcacccattagtgatgtagcagccagctcagttatcagatcgactgccgcagcatcacagtgcttgtactcaaggaacccttattttacttaataatgccccacacatgcaaaagcagcgatgctgccatatggctataattgctctattttattatgttattgttgttaatctcttactgtacctaatttataaattaaacttcatcacaggtatgtatatataggaaaaaacgtagcaatagtatgtctaggatttggtactatccatggtttccg

SEQ ID NO: 668555 - DNA, 683 bp, Homo sapiens
tctaaaatacttttctcttttgcctgttttgccacaggaatctcctagattgtcttttcatatcccttattgtcacatttgtaaactggcctgcgcatggactaccagtatagygtttaaaaattacaaatatgaatgttttatcccctttaaaagccctgaagtaactttccattgtttgtctggtaaatcttagcatctctaacatgtctacaatggtcttcagcatttcccctgattaatgctttagcctcattgttccccatttcttcatactccttatttatctctatacgttagcaacctttcagttcttttatggcctgaaatagccttgtagaccaggccagtgaccgaatccaaactaggataggtgcctttatttgtctacaatgtcctttcttctccacctatgaacacattgtctctaaaccagttcaaaactgttgatatactacaagtaatggatggtgatgtcttggatagggttagtagtgacagtggtgagatggaggccttattgtgaatgaacttaggaagtagacccaatggatacaaggttgtctataagaaaaacagaagagtcatacagcttcaaggattttggcttgggtaactaggattgaattgtcatttattgtgttacctttctctgagaaggcatctctgagtttagacactgc

SEQ ID NO: 668556 - DNA, 1889 bp, Homo sapiens
ctcattgaatcccaaccaagatctcatgaagtaggtattattgcccctctttcccagataaggagacaaaaatccaaagagttaagaatctggatcaccctcaacagcccctaacacatagtcagtgctaataattatacaactaaagaccatgtgtagtctgtggtcatttctctaaaggcaaaattaaatgaagaaccaatctaattatctatatgattaaaacaaaaagcaccttgctaggaaaatgagatagggagtggaaataggaacacgatgtttattttactttttctttttttgtccagaatccttttggatagctacatagagtgactgaattcatctgcattaaaaccccttgagaatttttatagtttgaaccaaagcaggataatgaagtgaacccttctaggcaggaaggcaaaagcagacttaaaagatgattcctctgtgttacttggcctttatagaatgagccgtgatgagctcctcgaaaatgcattattgatgtgacgtaataaggcaagctttctttttccttttcaaataatgacttattttatattaatcatgccatgaaacattgccactaaaggttgtttttcagcacaagtgaattgtatttgatttcatgctttgccttttccatctattgcaatagctctcatgttttgtcaatgaggttttattcatatcattatttgaattctcattcagcatggactcaatggagtcaagatatttttctttcctcaattatgcctttgttcccctattttcagttttctttgatttccaagtgatttctggttaattcatgcttaccttcatattccatttattttatcttcttctataagaaaactctttaattgtgctacattaaaaaaaagatatgtttgcaaataattagatatttagtttttttaaagggctgcctattcctaatgtcttgaaaaatattaaaatccacagtcctgttctctcattatacatgcaaattccaattgcatgcaaggttgttattggagtaccaggacaaacaaactcaaaatccaaataaagggattttatttagaataccaattagatggggaatattaattaggatttgatacaaaacttatgaatccaaattacacataattaatgttcttccccagctacatttggtaattatttattttctatttagtattcagttggcataacttgtaaatgcatactcataaatgcatgtccattttctttctttctacaatggaaagccttctgcatgccaggcaccgtgctagatgcagtctcaatttacatggagcttgtggcttgtggtctaggagacagacaatgaaatcacactaacgaatatataatttctttagggcactgacatgagtgccctaaagaaatggagcacaggcccagaagcttctccaggctgggccagccagctgagacctcaggatgaaacagargtaacaagggtttgccctctgcacctccaccctgaggttcactccctgcaattaggcacatgctcccttaaacctttaaacgcagtatctgaaaattctgttggattcctgccctatcacacggagacattttccctactaaatgcttgagctgaaaaacttgctagacctgacctggcctgaattttgaaattcagtggcctgtccagttagaaagtcttctgcttctattgttggccatagctgcccacctactaagcttcatttaaaacgtgtagtccatagttttcagctgtccacagccaggggagactgtgggacaatggctggacaatgtggagtgtggggctcctgtggagtcaggggcttcagtagcaaggaacaggcgctccctggacaactcagtcctgt

SEQ ID NO: 668557 - DNA, 1058 bp, Homo sapiens
attggaatgatcagggtggtttagaaagtcaacaccaccatcagaatagaaaaacagcacctaaaagcagaacctggggaaggctgtgcccagggctcttctgagaacttctcatgccgaaacctcgggcacccgcagggtcactcaacctccrctgctcttgtttgtgttgtgttcattctctcctcctgcaggtaaactggggatatgcagtgggcacaggtgagagagaggagtttggcggcactggtttcccaagacacaggacacaagacccctccaataaaacaggatgcagtagagaagctgagcaaaacctaccaaaaccaagaaggcaacagaagtggcctctggttacccttgctgctcattatatgctaattataacacactagcaggcaaaaaggcactcccaccagtgccatgagggtttacaaatgccatggcaacctggcaccccaatccccacccccaataaattacccggaaaactcatgaataatccacactttgtttagcgtatgatcaagaaataaatcataaaaatagccaaccagcagccctcaaggctgccttgcctatggagtaggcacgtttttattgcattactttcttaataaatgtgtattcactttactcagttggcttgctcttgaattctttcctgcatatagctaaggacccacttggcttcctgggctgaccccaattttggggtttgccctgtgacacaggggaagctggtggttctgaactcaaagttttcgaatcttatctcaggagagggaagagctgtctcttctgagctttatttataccacccggggggaaggactctggcccaggaggaagaggtcaccagtcactgagatagactacaggggtgtacatgtgagagcacggtatgggggaagaggctcctcaaagaaggcagattttcctagaacagcacctgctggcatgtagtggttataagagaccccctgactccaagaaagcagataggattaacaggctgtgactcttagttgcagaatttttggaaaggttcaataagg

SEQ ID NO: 668558 - DNA, 1058 bp, Homo sapiens
attggaatgatcagggtggtttagaaagtcaacaccaccatcagaatagaaaaacagcacctaaaagcagaacctggggaaggctgtgcccagggctcttctgagaacttctcatgccgaaacctcgggcacccgcagggtcactcaacctccactgctcttgtttgtgttgtgttcattctctcctcctgcaggtaaactggggatatgcagtgggcacaggtgagagagaggagtttggcggcactggtttcccaagacacaggacacaagacccctccaataaaacaggatgcagtagagaagctgagcaaaacctaccaaaaccaagaaggcaacagaagtggcctctggttacccttgctgctcattatatgctaattataacacactagcaggcaaaaaggcactcccaccagtgccatgagggtttacaaatgccatggcaacctggcaccccamtccccacccccaataaattacccggaaaactcatgaataatccacactttgtttagcgtatgatcaagaaataaatcataaaaatagccaaccagcagccctcaaggctgccttgcctatggagtaggcacgtttttattgcattactttcttaataaatgtgtattcactttactcagttggcttgctcttgaattctttcctgcatatagctaaggacccacttggcttcctgggctgaccccaattttggggtttgccctgtgacacaggggaagctggtggttctgaactcaaagttttcgaatcttatctcaggagagggaagagctgtctcttctgagctttatttataccacccggggggaaggactctggcccaggaggaagaggtcaccagtcactgagatagactacaggggtgtacatgtgagagcacggtatgggggaagaggctcctcaaagaaggcagattttcctagaacagcacctgctggcatgtagtggttataagagaccccctgactccaagaaagcagataggattaacaggctgtgactcttagttgcagaatttttggaaaggttcaataagg

SEQ ID NO: 668559 - DNA, 1058 bp, Homo sapiens
attggaatgatcagggtggtttagaaagtcaacaccaccatcagaatagaaaaacagcacctaaaagcagaacctggggaaggctgtgcccagggctcttctgagaacttctcatgccgaaacctcgggcacccgcagggtcactcaacctccactgctcttgtttgtgttgtgttcattctctcctcctgcaggtaaactggggatatgcagtgggcacaggtgagagagaggagtttggcggcactggtttcccaagacacaggacacaagacccctccaataaaacaggatgcagtagagaagctgagcaaaacctaccaaaaccaagaaggcaacagaagtggcctctggttacccttgctgctcattatatgctaattataacacactagcaggcaaaaaggcactcccaccagtgccatgagggtttacaaatgccatggcaacctggcaccccaatccccacccccaataaattacccggaaaactcatgaataatccacactttgtttagcgtatgatcaagaaataaatcataaaaatagccaaccagcagccctcaaggctgccttgcctatggagtaggcacgtttttattgcattactttcttaataaatgtgtattcactttactcagttggcttgctcttgaattctttcctgcatatagctaaggacccacttggcttcctgggctgaccccaattttggggtttgccctgtgacacaggggaagctggtggttctgaactcaaagttttcraatcttatctcaggagagggaagagctgtctcttctgagctttatttataccacccggggggaaggactctggcccaggaggaagaggtcaccagtcactgagatagactacaggggtgtacatgtgagagcacggtatgggggaagaggctcctcaaagaaggcagattttcctagaacagcacctgctggcatgtagtggttataagagaccccctgactccaagaaagcagataggattaacaggctgtgactcttagttgcagaatttttggaaaggttcaataagg

SEQ ID NO: 668560 - DNA, 1058 bp, Homo sapiens
attggaatgatcagggtggtttagaaagtcaacaccaccatcagaatagaaaaacagcacctaaaagcagaacctggggaaggctgtgcccagggctcttctgagaacttctcatgccgaaacctcgggcacccgcagggtcactcaacctccactgctcttgtttgtgttgtgttcattctctcctcctgcaggtaaactggggatatgcagtgggcacaggtgagagagaggagtttggcggcactggtttcccaagacacaggacacaagacccctccaataaaacaggatgcagtagagaagctgagcaaaacctaccaaaaccaagaaggcaacagaagtggcctctggttacccttgctgctcattatatgctaattataacacactagcaggcaaaaaggcactcccaccagtgccatgagggtttacaaatgccatggcaacctggcaccccaatccccacccccaataaattacccggaaaactcatgaataatccacactttgtttagcgtatgatcaagaaataaatcataaaaatagccaaccagcagccctcaaggctgccttgcctatggagtaggcacgtttttattgcattactttcttaataaatgtgtattcactttactcagttggcttgctcttgaattctttcctgcatatagctaaggacccacttggcttcctgggctgaccccaattttggggtttgccctgtgacacaggggaagctggtggttctgaactcaaagttttcgaatcttatctcaggagagggaagagctgtctcttctgagctttatttataccacccggggggaaggactctggcccaggaggaagaggtcaccagtcactgagatagactacaggggtgtacatgtgagagcacggtatgggggaagaggctcctcaaagaaggcagattttcctagaacagcacctgctggcatgtagtggttataagagaccccctgactccaagaaagcarataggattaacaggctgtgactcttagttgcagaatttttggaaaggttcaataagg

SEQ ID NO: 668561 - DNA, 618 bp, Homo sapiens
tcctacatcttggaaaacacgtcacagtgtatgaggaacaaatgacaagttacactatgccttctcaaatcttttctgaattcatatttcatcttaattgtagaaaaagtaagacaggttcattgtagaaaaaaatagacaaaggaagtatattttttaaaatcctcataatctcactccccagaaataacagctattaaaatgttgtggttttccakttttttctatttttttggctttaaattatatctatgttcacatattgaaatgatatacatataatttcatattttgctttttaaatttaatgatgtttcttaaacgtacaccatgtcaattaaaacttctttaaaaaaaaaaacataattttaggccgggcatggtggatcacgcctgtaatcccagcactttaggaggtcaaggcgggcagattaccttaggtcaggagttcaagaccagcttggccaacatggggaaaccacatctactactgtgctgggcgtggtggcgtgcacctgtaatcccagctacttaggaggctgaggctgaggcaggagaactgcatgaacctgggaagcggaggttgcagtatgccaagatagcgccattgcactccag

SEQ ID NO: 668562 - DNA, 1236 bp, Homo sapiens
caaatattttctaatatttctggtactctaaaaacacaagtcatagaaatttcaaagcagcaactttgtcctccccattgctagtaacaaaaagggaaaacaaaggaagcatagttatgcattgctaatggcaattggagccagaggactgggtttttggtcctgggcatctgatttggtgtcacgaatacaagtcctttctttccagcactgtcattcattgggttggttctcagaataagaatccaaaagagttactcatgaagtgttacctttgaaatttcaaccctaaaaggaaatgttgccaatcagagatatctgccttctgtgctagattacagcagagtagtctgtgttttcaaagctccacattatcttattatctggcaacaaaacttccaactgccacaattagggmtcttttcattttatcaaggctatttgctgataattctccctataaaagctttgcaataaaccactttttaaaaattcgaatttgcaccatcataattgggaatgtaatattctgcttaaaaagaagcatgaacatgttttaggaaaaccttctcaatccactctaaaatctaagcctaaaattatttacatgcaattttcagtgatttattaattattaactaaagtagggctgatgttggaatttttttttttttttttttttttttgctacttattactaaactactcttcaactgctagaaaaagaaaacctacaattataaacaagacataagcaaccctggtaacagatccaccttttataacaaataaaaatttttcaaaaacaattaatgttccttcacatgtagcatatgtttgactgattgttacaagcaattccaatggcctctgttatatttttgaggaaattaatgtctaggtaactgtggatctaggtgcattaactttagactagttatatgagcctagattatattcattttagaccttaaaatcttgcacttgtttttgatccaattttagactcttttatgatacaagtaacttatcagcaaacagttagtaatctgcaagttatacaatttataatataggatattgagcaattgttatttaaaaataataactgtgataacaatagaaatggttctccaaatataatgagtagtcactacctacttttcataccacaaggatagaagatgtttttgaaatcatgtgcatcagcattgaaaatacacccaagaaactgaa

SEQ ID NO: 668563 - DNA, 640 bp, Homo sapiens
tgtgtgtgtgagagaaagacacacacacacacacacacccatgcagctctaataatgaaaggcctttagaagcaaagaaacaattatatcagctgctaaatcctgttttctccagtgctgtcacttttatagtaagtcagcacaaatcacatgaaattaaacattttgtcaaggaatgaatatgtttccatcatctctaggcttactccactgccaggaagcgactttgactcattagaactactttctcaattactgtccattctccaactgaaggtttttgrgaaacatttgcttgggtttatatgagagaagcacagtaaagctttatttattaattgtagtatattttaaaaacagatgttgagcttatccttaaaatgtatataaatattttcaagctaaactattgctgggcttatagccctgatcataatgcttcattcagtcattcaagtcagtcaacagccactttgcttgtaatttgtatgctgtagcctgggcactccatatgtggagaaggggtagggagggctgtaacaggcaaatctgtttagagacagtcataacagtatgctaaaggtatgtttaccgtgattgcagatcacagaggtaggtgttcacaaatgaggtgactttt

SEQ ID NO: 668564 - DNA, 603 bp, Homo sapiens
gagcaatccgaaaataaaattaagaaaatggaagccaagatggtggccaagttggagtatgagtctgtgctgtgtgtgaagccaaacatcagcgtctactggattcctccctgggcctccaactgtgattacagggcatctgactggaaattagaccagcctgattggactgttcacctccgaatcatttcaaaagggaagactgcctatatcaaactcgaggataaagtttcaggggagctcttcactcagataccagtagaacaatatcctggtattgctgtggagacagtgacagattccagctgctactttttaatctggattcaggatggtcctgggcagagtgctgtcattgacactgctggcttcacagatcggggagatgcctttgaatttaatgtctccttgcaggatcacttcaaatgggtaaagcaggaatctgagatttccaaggaatctcaagaaatggacgcttgtcctaacttggatctggrcttcaaagaaagacaaaccatcaagttgagtacggggaacattacaaccaagaatggatgtgcttctaagcccaggactgcaatgggtgggggcctgagcttactc

SEQ ID NO: 668565 - DNA, 1458 bp, Homo sapiens
gggccaggaaaggaaggaaaacctggtaggatgacatcagtgggaaacttgagtttgaatctctatttgaccacagcacagctaggtgatctttgacaattacataaactctcagagactccatttcttcatctaaaaaatagagataataatatctaccttggagggattagaccacataccaggtgcccagtagttgctaccattatcttgtataccagatactaatattttattgataatttattttaaattattttattgaaggccttaattgaggctgttcttgcaaaggatgtgatgagataagtagaaatgaactcagagaagatgaattcaaaatcctcgatgggagcatccaagtacttcctggtttctggtgagtatagtgcccttacctgcctgttttctcatctataaagtgggatagccatcatgcctgtgtcttggagttgtcgtgaggttgctatgtgtaaagtgcctagagcagtgcctggcacatgggaggtaccgtatgagggttctcactggggaagctggggggcagggggatccctactctacacagtccttaccaggttccaagtgttttacatgctttatctggttcctcttcatctcattcctgacagataattgatcctttgggtcacacaccttttctctagtcgggcagcacacggttcccaaggagtttccagggaggtacaggcagaaccyctctgttggccagtgaggacagggcttgaacagccaaaaggagtcaaatggatagagaagctggcaatctgccttcagcagtaaagtatatggctaaactcgagatattcccatagacagcgcagaacaagtctcctccaggtcctgatgggagaaggccgtgggagaacacaagagcaaattggatctgacagaactggcatttggtagtaaatctaccaggaagtgagcttcctgagagcaggaccttagttagttaatgctcaataaacatttattgagcaaattcaataaacattgactgagtaaatgtacttcaattcctcgattccatatttattgagtgcctaccatgtgtatgtgaataatcatcccttgcctctgtgctcaaactctattgcatataatggggtatttttggaatagaaataggaaaacaattaattatagcccatttcctcagcttacaaccatgagacagtggaatccgggccttgctatttccctattatgtgattttcagcaactggcttaacctttccaagcctcagtatcctgatctgtgaaatgtgcatagtcatcactaccatgtacgactgcgttctgaaggttaaatgctagaaaacactaggaacctgtgtgttagtttctttcccttcatctggataagatacctaactgctctaaattcgcactttcatgggggtgactctctctgctctgtctacctcacagtgg

SEQ ID NO: 668566 - DNA, 1050 bp, Homo sapiens
aactctgctccatgttgacgtcatcttttttttcctcctcttctgaacctaattatctctgagacagtgattcaaggaagaaaggagaagtaaacgctatctggaggcctgactcttccatcctggttcccacacctctctctttggaactcacttctccaagctctttgccaggtctgtctcttctaagcacaaatgttagtaagtcccaaacccattttactaatattagtagatcgagagcccatctttataactttggcctcagtaagactagtgatagtgtcactctacgaggggaaaggtagttgccatgatgctcttcggtttaggggcaattaaaatgactacagattggtggcagtttatggatttgcacaagaagagagaactcacagaactagcattattttaccctctgtctttacagaggtatatttggctgttttgttagacattctggggacaagaaaaaatgaaaaaagaaaaacatgactacagaggtagaggaattattacaagaagggtaattaaaaaatatgacttacaattcaatcctgagagaggggtatgtactgaaaaagctttaacacatgaaggaaaggggaggaaaggtacctaacaaatttttgagtacctcctatgtgttaaacactctacagtggtcttttgcttttattatctcatttaatctgtacaacactataaggatacagctactggatactgatgcttacagaaattaaataattgctcaaactcacagctaaaaagtggaaaaccagggattcgaatccagrtccaaatgactgtgctttagtgaagctcatccagtcgcaagagatatccagcataagtaaagggaggttcactgaagggaggttcacaaactgagagtaagaattgaaactatctgggaaagccaaaaacagaagcagactagagctgcaaggcagctcggacttcaagacagctccaggaacgtcaccagcaaacacacacccacggggttcactctcctgctcagccaggcgccggatacagccacaa

SEQ ID NO: 668567 - DNA, 425 bp, Homo sapiens
gcatttttaacaagcttccctcgtggctagtgcagtaggtcctattggagggaactcccagtgcagatgttcaatggcctaccagctactgccttggtcctttccccgacccccgaacatgggtccaccagactgtggcttctgatctggttttcctctgatgttgggtccaccatgagaagacatgcgttctgttccatgatggctcaaaaaaagccagaagattaggacctcatacccaaggcttgtatgaaagggmagccaaacagatgtgtttacagccccaaagtgccaagccctggagtctcacatgaagaaaacgaaaggaaaatacagtcatgggctacataaagatgttttgggcaacaacagaccacctatacaatggtggtcacataagatgataatggagcatatatggaaac

SEQ ID NO: 668568 - DNA, 1310 bp, Homo sapiens
tgttaggtattgtataacatggtcttctttatttctattaaggctttttgtctaacagtatgcctgtttactataactatacaagcttccttttgtttccttttgtttagttttcttcatgatattttttaacccttctatcttcataagttctgtatctttatatctttgagatgtctcttgaaactgcacagagttgagtttaatattttaaacattatgattgtgttagcatttggaaatataacatcttgaaatttaccctaaatactgatatgtgtggttttaattctacatcctcactctatatttgatgatgttcagcatttttcctcttttctttgcctggattaatttttcgttacatgctttcatcctctattagcttattatttgtatataattttactttttttaatagttgtcatagtattcatccttgacttaatgtttgctataagtttgtttttctctcttccctgagactgtaagaattctaaaattctttaagtctttttacctcctttctcacttacactgttgtttaggagtgtatattaaatatatgtttaagcctcacagtccattattgctaatgtttttgacttcgaatatttatttcaatttcctacacgtttattctttaggttgctcttcatttattgtatctctgagcttctccctgggataatttttttcttctgcctaaggaaattcctgtactatttctttgataataaagttcctgcttttatttttctaaaaagtattttcttttacatttatttttctgggaaaatatttgctggttttggaatattagattggcagttatagcttctgtgattaattttgttgaacttagctccaattctattttcgattgtttgaaagcgagttgtcttttattcctccagcttttaaaaataatcactttggaagtgaacagacacttttcaaaagaagacatacaggcagccaaaacccatataaacagaaaagctcaacatccctaatcattagaaaaatgcaaagcaaaaccacaatgaaataccgtgtcacaccagtcagaatggctactattaaaaagttaaaaaaaataaaagttgctggcaaggttgcagagaaaagcaaactcttatatactgttgatgggagtataaatcagttcaaccattgtagaagcagtgtggtgattcctcaaagagcaacaaacaggactaccattagacccatcratccaaccattactgggtatatacccaaaggaagataaatcattctgccgtaaagacacatgcatatgtaca

SEQ ID NO: 668569 - DNA, 591 bp, Homo sapiens
ttcactattttgactgtatcccagagagttttggtatgttttgtctctgtttgcattaagtttaaagaactttttgatttctgcctttattccattgtttacccaaaagtgattcaggagtaagttgtttaatgtctatgcaattgtgtggttttgagagacatcttatttcttggtattcatttctagttttattgcactgtgttctgaaattatgattggtaygatttctgttttttaaaatttattgagatttgttttatggatgggcatgtggttgattgtagagtattctgtgtgcagatgagaagaatgtatattttgtggttattgcatggagaattctgtagatgtctattaggaacaattggtcaagtgtcaaatttaagtttagaatttctttcttagttttctgccttgatgatatgtctaacactatcaatggggtgttgaagtcccccactattattaatttttatctttgtctattctatgttatttttaattgttgccagagttgtactgtccaatcaaaatacaatgagtcataaatgtgggtcatacataatttaaaaaattctaatagccatg

SEQ ID NO: 668570 - DNA, 677 bp, Homo sapiens
taggagttcgagaccagcctggccaaagtggtgaaatcccatctctttttttcctttttttttttttttttttcctttttctggagaatggggtctcactatattgcccaggcaggtctcgaactcctgggctcaagctatcctcctgcctcttgcctccctgagagctgggatcacaggcgtaagccaccgcgcccggcgtgaaatcccatctctactaaaaatacaaaaattagctgggcatggtgggatgtgcctgtaatcccagctactcaggaggctgaggcaggagaattagcttgaacctgggaggcagaggttgcagtgagccgagattgtgccgctgcactcccgcctgggcgacagagtgagactctgtctcaaaaaaagaaaagaaagaaagaaaaagaaaagaagtgttaaagcaattttcatgatcaatcttgtcttttctgttgcatctgtgaactgacattctaaccttgatgggcaggtggcattgccacgcattttagaagttgccgccgattttgtgcccatccacatggagcagggtgccttcagtctgacatgttccccacrtgtcccttctggcattgttgcttcaggaaccaggcactgcatttgtcccacaagaatcagcccccagatttccatccagattatctgatttcttc

SEQ ID NO: 668571 - DNA, 1501 bp, Homo sapiens
  misc_feature 303: n = A,T,C or G
caatgcctcatgtttgacctgttggctttggggaatgagtggaaatgtcatcagctgaggttgaaagagaaagaggttctcattaggtaagaacactggtttgggacatgctgaatttgagacgattgtgagacatattaggtcggaagctggagtctgaggctggcagagatggcagtcagactggacattgagatttcagtcatccagtatgtaggcagccactaagaccctgaaaaaggacttggcccaagggagattggagtgaacaggtagagggcttgatgtgaattactgttaaanatcggggggggggtacgtgaatactgtactcatgaaaggtattcaaccctatctgtccacaggcttaccttgtacacctctctgtctctgctcactccattctaacttactctgttcattcatctttccagatttctatctacagagcttttccagtcttgatgtctgcttggtttgtttctctgcctcttgactcagtgcttcattctctggctagagcacaaatttacccatcctggttccccaagttcctttcatccagcgtggcatcaaggaagtctgttcatgataaccaggtccagtgtgctctcataattgatctccaaagagcagtgctttctagattaattctcagctgggtcttgtctcttcacacttcactttttttttgagatggagtctcactctgtcacccaggatgcagtgcagtggcgcaatcttggctcatggcaatctccgcctcccgagttcaggcaattctcctacctcagcttcccaagtagctgagattacaagcacgtgccaccatgtcttgctaatttttgtatttttagtagaaatggggtttcaccatgttagccaggttggccacaaactcctggcctcaagtgatctgcctgcctcagcctcccaaagtgttgggattacaggtgtgagccaagatgtccagactctttacacttcatttctaacatgccaggtcctaccctcttccttgcttaccttggcacctggatttccctgattttgaactgattatttggctcttgattcctggccttactttgtctttgtggatatttgtttgttctgtctgttttaattcagcaaatatttattgagggcctactatgtgccaggccttattttagggtctaggaatacagcagaaacaaaacagaacaaaatccctatgtttgtggaaagtagatggggaaaaaaaaagcgggraagtgggataaggagtgttgaggagtgagttacaagtttaactagggtggtcagggcatcctcccactgagaagttatcattcaggacagaggaaagagccagtcaaaggccttgaggcaggagcatacctggagtgtttgggagcatcaaggaggccaggatggctacagcagagaaagtgctaaggagggttgtcaaggagagatcagcacagtacaggtggtgatgaggacattgtttagggtc

SEQ ID NO: 668572 - DNA, 1501 bp, Homo sapiens
  misc_feature 303: n = A,T,C or G
caatgcctcatgtttgacctgttggctttggggaatgagtggaaatgtcatcagctgaggttgaaagagaaagaggttctcattaggtaagaacactggtttgggacatgctgaatttgagacgattgtgagacatattaggtcggaagctggagtctgaggctggcagagatggcagtcagactggacattgagatttcagtcatccagtatgtaggcagccactaagaccctgaaaaaggacttggcccaagggagattggagtgaacaggtagagggcttgatgtgaattactgttaaanatcggggggggggtacgtgaatactgtactcatgaaaggtattcaaccctatctgtccacaggcttaccttgtacacctctctgtctctgctcactccattctaacttactctgttcattcatctttccagatttctatctacagagcttttccagtcttgatgtctgcttggtttgtttctctgcctcttgactcagtgcttcattctctggctagagcacaaatttacccatcctggttccccaagttcctttcatccagcgtggcatcaaggaagtctgttcatgataaccaggtccagtgtgctctcataattgatctccaaagagcagtgctttctagattaattctcagctgggtcttgtctcttcacacttcactttttttttgagatggagtctcactctgtcacccaggatgcagtgcagtggcgcaatcttggctcatggcaatctccgcctcccgagttcaggcaattctcctacctcagcttcccaagtagctgagattacaagcacgtgccaccatgtcttgctaatttttgtatttttagtagaaatggggtttcaccatgttagccaggttggccacaaactcctggcctcaagtgatctgcctgcctcagcctcccaaagtgttgggattacaggtgtgagccaagatgtccagactctttacacttcatttctaacatgccaggtcctaccctcttccttgcttaccttggcacctggatttccctgattttgaactgattatttggctcttgattcctggccttactttgtctttgtggatatttgtttgttctgtctgttttaattcagcaaatatttattgagggcctactatgtgccaggccttattttagggtctaggaatacagcagaaacaaaacagaacaaaatccctatgtttgtggaaagtagatggggaaaaaaaaagcgggaaagtgggataaggagtgttgaggagtgagttacaagtttaactagggtggtcagggcatcctcccactgagaagttatcattcaggacagaggaaagagccagtcaaaggcyttgaggcaggagcatacctggagtgtttgggagcatcaaggaggccaggatggctacagcagagaaagtgctaaggagggttgtcaaggagagatcagcacagtacaggtggtgatgaggacattgtttagggtc

SEQ ID NO: 668573 - DNA, 630 bp, Homo sapiens
tgcattgtgtagtaaaacaatattttaaagatgtgaatgagaacaaatcatctctaaaccatgtaaagatgtcccatcccatttggaatgacaccttgtctccttacaaacatgattatttgcttcctgaccaacccttccattcctccctgctcccctgcctcaccatgttgggctcctttttctgttctttgagcaaaccaggctctcccagtctaataattttttgcatttttctctctctgggaaaagtcttcctttgttcttcacataactgtttccttctccttctcaggtctcactccaattgtcatccgttcagagatgacatttgatgaccttctttgactacccaaataagctcttcactctcgttctatcatcactccacttttctttcatagcccatatcatcatcttcagtcttttcttgtggtatttatttgttgactcgttcattgtatgttcactctgaatgagtatagaaatttcaggatgatcaaaatcttttcaatcttggctaccactttattcccagcccccagggactcaatactatttgctggggaaaaaaawgggtcattggattaatgggacccttatgcccacccaaattagaaatctttacac

SEQ ID NO: 668574 - DNA, 627 bp, Homo sapiens
tcgaggtttaccttccycctaagtcagaacatgcagtgtttggttttctgttcctgcattaatttgcttaggctaatggcctccagctccatccatgttgccgcaaagggcaggatttcattccttttatggctgaatagtattccgtagtgtatatataccacattttctttatctaatccaccattggtgggaatttaggtagattctatgtctttgctattgtgaatagtgctgtgatgaacatacatgtgcaagtgtcttcatggtggaactatttattttcctttgggtatatactcaataatgagattactgggtcaaatggtaattctgtttcaagctctttgagaaatctccaaactgctttccacagtggctgaactcatttgaatttccaccagcagtgtataagcattcccttttctctgcaacctcaccagtgtctatcttcaactttttaataatagccattctgactggtgtgagatggtatctcatcatggttttgatttgcatttctctaatgattagtggtgttgagcactttttcatatacttgttgtttgcctattctttaaacttagtttaaacctcaaagtttcctaaaacaagataaactctcat

SEQ ID NO: 668575 - DNA, 627 bp, Homo sapiens
tcgaggtttaccttcctcctaagtcagaacatgcagtgtttggttttctgttcctgcattaatttgcttaggctaatggcctccagctccatccatgttgccgcaaagggcaggatttcattccttttatggctgaatagtattccgtagtgtatatataccacattttctttatctaatccaccattggtgggaatttaggtagattcyatgtctttgctattgtgaatagtgctgtgatgaacatacatgtgcaagtgtcttcatggtggaactatttattttcctttgggtatatactcaataatgagattactgggtcaaatggtaattctgtttcaagctctttgagaaatctccaaactgctttccacagtggctgaactcatttgaatttccaccagcagtgtataagcattcccttttctctgcaacctcaccagtgtctatcttcaactttttaataatagccattctgactggtgtgagatggtatctcatcatggttttgatttgcatttctctaatgattagtggtgttgagcactttttcatatacttgttgtttgcctattctttaaacttagtttaaacctcaaagtttcctaaaacaagataaactctcat

SEQ ID NO: 668576 - DNA, 627 bp, Homo sapiens
tcgaggtttaccttcctcctaagtcagaacatgcagtgtttggttttctgttcctgcattaatttgcttaggctaatggcctccagctccatccatgttgccgcaaagggcaggatttcattccttttatggctgaatagtattccgtagtgtatatataccacattttctttatctaatccaccattggtgggaatttaggtagattctatgtctttgctattgtgaatagtgctgtgatgaacatacatgtgcaagtgtcttcatggtggaactatttattttcctttgggtatatactcaataatgagattactgggtcaaatggtaattctgtttcaagctctttgagaaatctccaaactgctttccacagtggctgaactcatttgaatttccaccagcagtgtataagcattcccttttctctgcaacctcaccagtgtctatcttcaacwttttaataatagccattctgactggtgtgagatggtatctcatcatggttttgatttgcatttctctaatgattagtggtgttgagcactttttcatatacttgttgtttgcctattctttaaacttagtttaaacctcaaagtttcctaaaacaagataaactctcat

SEQ ID NO: 668577 - DNA, 625 bp, Homo sapiens
taaaggaggtagagtgggttcctttcccagtcagcacttcctcctctctgagagctaagcctggattctcatacacgaggggactgtcccgactcctctgggccccaccacgttcctgtctcccaggctgggctgggactagggtgaggcaaacgtgcctaggcatgaaatgtaaggaggcactcaccctcagggctgtgggaatacaggctgagccctgagagtcagtgcctctataaattttatatactaagtacttcacttgcctcaccccagtcctggcctcctcaaaaatttgacctaggtggacctagctggcttcaacgttgagtgcagagaactcttgtcctctgctcatgctctggctcaaagcccattctgtaagtagctcctctggagggctctcaagtctgccctgyaccttacactgtgcctatgtgaggctgcagctcccaaaggctctctgcattccctctgctgtgtcatccctatcctactaacaggagggaggatctttggtcccaagcttaaaacgggtccccactagctatgccaacacgacatttccaggtaacatcagacacccccaggggaatggcagcttggggcattgttctgtgagctc

SEQ ID NO: 668578 - DNA, 905 bp, Homo sapiens
aagtgcttggtacatagtaggtgctcaacaaatagtacttatcagttctgagactgtatctccatgaaattatgactgtctctcacacatctcttatactccaaatggaatggttttgggttcttacagtaaatagataacatacgtggtggttgactgatttgctgatttcttccctgcaaaactggaaatgtccttgtttcgattcccatgtttcttatgccttccctactcctctcctccccaattttggggcaagtggtaggaaggccttttccctatttgccccatygattccaaaaataaattccagaggagcatgtgtccatttgcttatggtattttaattttttgatggctgggggtaagaagagaactctttaaagaaaaaaaaaatctccccacagagtacggttcacaaaattcatgacctgagctgatttgagaaataacaatctgcctctatttcagaaaataaagtgatgactcactcactaagatgggctgaattttcttcctctgtgctttgggatttctaaatatcagagaatttcccttgggattttccccaaaatctttatttgctcccaacaagctttaaacaatcttctattttctactccttttaaatctgtccccttttattttagctaataacaagttatttctcacgagttccttctatgaaaagaaaacctcaaagtggatgctaaaatgcttaaaattcactttaaacccttgccaggcctcttttgtgagactacactgaaatcaccctggatgcaaggtctctcctgctgactttgaagtttgtagatggacaaaacaaaacaacaaaaaaagcagggctctgatccaacaagtgccctttgtgggctggttatgactgtacaaaaatttcaagt

SEQ ID NO: 668579 - DNA, 1192 bp, Homo sapiens
ttgatagtttgatcaytggctcaccaagcccaatattccatctctggcagtgacagtaggattattagttgtgagaaaaatgaatgtcatttataatcttggctgcaaaaaagttaggttatagattcataaaggtaaggaaagaaaattaaaagcaccctatgtttcaattaattaaacactgtatttggacttggcaggatggctcacgcctgtaatcccagcattgtgggaggccaaggcaggattgcttgaacccagaaattcaagatcagcctattcaacacagcgagaccttgtctctactaaaaattaaaaaattagctgggcgaggtagcttctgcttgtagtccaggcttcttaggaggctaaggtgggaggactgcttgagctcaggagttcaaggttgcagtgaaccgtgatcatgccactgcactccagcctgggcaaaaaagcaaaatgctgtttcaaaaacaacaacaacaaaagctgtgttcatataaaaattagagtacaattggcaatgatattatagtccttttgctccataaaattttgatgatttttctttaacaatagatatgagctaaattcccatctacatcccaacttccattaataaatctatagatccatcttcttattttttcccaagtctcactttcaacttttatttcattacctcttttttttttaggtgtcagttcttttatttcttctagtatcatttacttcaagggaatcctcaatgtcaagtattttttaaaaatttatcctaaaccctctgggatttcaacctttaatcaaaacactttttgaaatttgtgagaaattagaaaaattataaactatgtggcaaattcagcatatcaaaatgtgtgaaatgcagctaaactgtgtttgcagagaaatctgtaccttaaaccctatgctttaaaaagatcagtgtaaaattaaatacaggtgtacgtttttgtattgtgccagacttcactgtatttccaagattgactttctaaaaaaattaaaactctgtagcaagcctatgttgaacaagtctatcactgccatttttttaaaagcatgtgattactttgtgtctctatgtcacattctggtaattcttacaatatttaaaactttttcattattattgtatctgttacggtgaccctgtgatcagtgatctttg

SEQ ID NO: 668580 - DNA, 1192 bp, Homo sapiens
ttgatagtttgatcactggctcaccaagcccaatattccatctctggcagtgacagtaggattattagttgtgagaaaaatgaatgtcatttataatcttggctgcaaaaaagttaggttatagattcataaaggtaaggaaagaaaattaaaagcaccctatgtttcaattaattaaacactgtatttggacttggcaggatggctcacgcctgtaatcccagcattgtgggaggccaaggcaggattgcttgaacccagaaattcaagatcagcctattcaacacagcgagaccttgtctctactaaaaattaaaaaattagctgggcgaggtagcttctgcttgtagtccaggcttcttaggaggctaaggtgggaggactgcttgagctcaggagttcaaggttgcagtgaaccgtgatcatgccactgcactccagcctgggcaaaaaagcaaaatgctgtttcaaaaacaacaacaacaaaagctgtgttcatataaaaattagagtacaattggcaatgatattatagtccttttgctccataaaattttgatgatttttctttaacaatagatatgagctaaattcccatctacatcccaacttccattaataaatctatagatccatcttcttattttttcccaagtctcactttcaacttttatttcattacctcttttttttttaggtgtcagttcttttatttcttctagtatcatttacttcaagggaatcctcaatgtcaagtattttttaaaaatttatcctaaaccctctgggatttcaacctttratcaaaacactttttgaaatttgtgagaaattagaaaaattataaactatgtggcaaattcagcatatcaaaatgtgtgaaatgcagctaaactgtgtttgcagagaaatctgtaccttaaaccctatgctttaaaaagatcagtgtaaaattaaatacaggtgtacgtttttgtattgtgccagacttcactgtatttccaagattgactttctaaaaaaattaaaactctgtagcaagcctatgttgaacaagtctatcactgccatttttttaaaagcatgtgattactttgtgtctctatgtcacattctggtaattcttacaatatttaaaactttttcattattattgtatctgttacggtgaccctgtgatcagtgatctttg

SEQ ID NO: 668581 - DNA, 1192 bp, Homo sapiens
ttgatagtttgatcactggctcaccaagcccaatattccatctctggcagtgacagtaggattattagttgtgagaaaaatgaatgtcatttataatcttggctgcaaaaaagttaggttatagattcataaaggtaaggaaagaaaattaaaagcaccctatgtttcaattaattaaacactgtatttggacttggcaggatggctcacgcctgtaatcccagcattgtgggaggccaaggcaggattgcttgaacccagaaattcaagatcagcctattcaacacagcgagaccttgtctctactaaaaattaaaaaattagctgggcgaggtagcttctgcttgtagtccaggcttcttaggaggctaaggtgggaggactgcttgagctcaggagttcaaggttgcagtgaaccgtgatcatgccactgcactccagcctgggcaaaaaagcaaaatgctgtttcaaaaacaacaacaacaaaagctgtgttcatataaaaattagagtacaattggcaatgatattatagtccttttgctccataaaattttgatgatttttctttaacaatagatatgagctaaattcccatctacatcccaacttccattaataaatctatagatccatcttcttattttttcccaagtctcactttcaacttttatttcattacctcttttttttttaggtgtcagttcttttatttcttctagtatcatttacttcaagggaatcctcaatgtcaagtattttttaaaaatttatcctaaaccctctgggatttcaacctttaatcaaaacactttttgaaatttgtgagaaattagaaaaattataaactatgtggcaaattcagcatatcaaaatgtgtgaaatgcagctaaactgtgtttgcagagaaatctgtaccttaaaccctatgctttaaaaagatcagtgtaaaattaaatacaggtgtacgtttttgtattgtgccagacttcactgtatttccaagattgactttctaaaaaaattaaaactctgtagcaagcctatgttgaacaagtctatcactgccatttttttaaragcatgtgattactttgtgtctctatgtcacattctggtaattcttacaatatttaaaactttttcattattattgtatctgttacggtgaccctgtgatcagtgatctttg

SEQ ID NO: 668582 - DNA, 1192 bp, Homo sapiens
ttgatagtttgatcactggctcaccaagcccaatattccatctctggcagtgacagtaggattattagttgtgagaaaaatgaatgtcatttataatcttggctgcaaaaaagttaggttatagattcataaaggtaaggaaagaaaattaaaagcaccctatgtttcaattaattaaacactgtatttggacttggcaggatggctcacgcctgtaatcccagcattgtgggaggccaaggcaggattgcttgaacccagaaattcaagatcagcctattcaacacagcgagaccttgtctctactaaaaattaaaaaattagctgggcgaggtagcttctgcttgtagtccaggcttcttaggaggctaaggtgggaggactgcttgagctcaggagttcaaggttgcagtgaaccgtgatcatgccactgcactccagcctgggcaaaaaagcaaaatgctgtttcaaaaacaacaacaacaaaagctgtgttcatataaaaattagagtacaattggcaatgatattatagtccttttgctccataaaattttgatgatttttctttaacaatagatatgagctaaattcccatctacatcccaacttccattaataaatctatagatccatcttcttattttttcccaagtctcactttcaacttttatttcattacctcttttttttttaggtgtcagttcttttatttcttctagtatcatttacttcaagggaatcctcaatgtcaagtattttttaaaaatttatcctaaaccctctgggatttcaacctttaatcaaaacactttttgaaatttgtgagaaattagaaaaattataaactatgtggcaaattcagcatatcaaaatgtgtgaaatgcagctaaactgtgtttgcagagaaatctgtaccttaaaccctatgctttaaaaagatcagtgtaaaattaaatacaggtgtacgtttttgtattgtgccagacttcactgtatttccaagattgactttctaaaaaaattaaaactctgtagcaagcctatgttgaacaagtctatcactgccatttttttaaaagcatgtgattactttgtgtctctatgtcacattctggtaattcttacaatatttaaaactttttcattattattgtatctgttayggtgaccctgtgatcagtgatctttg

SEQ ID NO: 668583 - DNA, 1598 bp, Homo sapiens
actctttaataagtaagatattttactaaaaatttcaagtacattctatttttctgtctatcttgagtgaatagataataatttatcattggccgggagcagtggctcatgcgtataatcccagcactttaggaggccgaggtggaaagactgcttgagctcaggagttcaagacccctagcctgagcaacacaaggagaccctgtctctacaaaaaaaaaaaaaaaaaatgctgggcatggtggtacacacccatacttctcagctactcaggaggctgaggtgggaagactgcttgagcccacgaggtcagggctgctgtgagctattatcacgccaccacactccagcctgggcaactgagcaaggccctgtctcaaataaaataaaataaaataaaataaatttaaatgttaaatattaaaaaaattaataaacagtatcagacagatactaatactggtaatattagatattaagatgtaatactgtatcagacagtattaccatttccatcaaaatttgcagtaaattttaaagaattcacttcttcatttgtttcatgttttctaaatttctcttgatcatttttacatctgggttttttttttcaggaagaaatgctagattagtaccagaatgatttcattctctgtaatgttacatttcaactatttacaaaaatataaattacaagatttttaaaaaacattaagcctytgaagtttgcttgaatgtcttctaacttgaagataaattttgattgacatagtcattcacttattttcaagaatttggtggataagcaagattcaagcttgatacttcctagttctcatctcctatatattagatatacatgaatttattaatagtgaaaaaattattggttgttccccactattcatatctgcttgcctcagaacataaactctttttaaaatttttaaaaaataattgctattattttaaaaatcacaaccagtcacaaagtattgaacaaatgtttaattataaaatagtatatttacacaggcatacaatttgtattaaaatttatattaagttaacagcatgattatattaaaagttgtatgctcatgaaatttacatttaaaattcccatacaagcattacaaatctgctaagacattgacacgaacaacaaatccttctacacgggacgtagaatgctggccggatagcaacgtcagcactggaatttgtcagctgagccatagctaagtgctcatcactcttctttgctcttgtattctacctgcatgttgttgttttatatttccctgagaaccacaatgtatgttccatagtttgtttagctgatttcactgactttagcaattagaaaggagaaccgtggcatcctcccccgacttctctcaaatcctaactctcatttcttttttttttttttttttgagacggagtctccatcacccaggctggagtgcagtggcgcgatctcagctcactgaaacctccacctcccaggttcaagcgattctcctgcctcagcctcctgagtagctgggactacaggcgcacgccaccacacccagctaatttttgtattttta

SEQ ID NO: 668584 - DNA, 1598 bp, Homo sapiens
actctttaataagtaagatattttactaaaaatttcaagtacattctatttttctgtctatcttgagtgaatagataataatttatcattggccgggagcagtggctcatgcgtataatcccagcactttaggaggccgaggtggaaagactgcttgagctcaggagttcaagacccctagcctgagcaacacaaggagaccctgtctctacaaaaaaaaaaaaaaaaaatgctgggcatggtggtacacacccatacttctcagctactcaggaggctgaggtgggaagactgcttgagcccacgaggtcagggctgctgtgagctattatcacgccaccacactccagcctgggcaactgagcaaggccctgtctcaaataaaataaaataaaataaaataaatttaaatgttaaatattaaaaaaattaataaacagtatcagacagatactaatactggtaatattagatattaagatgtaatactgtatcagacagtattaccatttccatcaaaatttgcagtaaattttaaagaattcacttcttcatttgtttcatgttttctaaatttctcttgatcatttttacatctgggttttttttttcaggaagaaatgctagattagtaccagaatgatttcattctctgtaatgttacatttcaactatttacaaaaatataaattacaagatttttaaaaaacattaagcctttgaagtttgcttgaatgtcttctaacttgaagataaattttgattgacatagtcattcacttattttcaagaatttggtggataagcaagattcaagcttgatacttcctagttctcatctcctatatattagatatacatgaatttattaatagtgaaaaaattattggttgttccccactattcatatctgcttgcctcagaacataaactctttttaaaatttttaaaaaataattgctattattttaaaaatcacaaccagtcacaaagtattgaacaaatgtttaattataaaatagtatatttacacaggcatacaatttgtattaaaatttatattaagttaacagcatgattatattaaaagttgtatgctcatgaaatttacatttaaaattcccatacaagcattacaaatctgctaagacattgacacgaacaacaaatccttctacacgggacgtagaatgctggccggatagcaacgtcagcactggaatttgtcagctgagccatagctaagtgctcatcactcttctttgctcttgtattctacctgcatgttgttgttttatatttccctgagaaccacaatgtatgttccatagtttgtttagctgatttcactgactttagcaattagaaaggagaaccgtggcatcctcccccgacttctctcaaatcctaactctcatttcttttttttttttttttttgagacrgagtctccatcacccaggctggagtgcagtggcgcgatctcagctcactgaaacctccacctcccaggttcaagcgattctcctgcctcagcctcctgagtagctgggactacaggcgcacgccaccacacccagctaatttttgtattttta

SEQ ID NO: 668585 - DNA, 1990 bp, Homo sapiens
aataaagcttttttcttaaaaaatggaaactatatgttagattttttttttaatatccaagatacgtgtcagttaaaacaagcaaagtacagaataatgtgtatgacatgttcccatttgaacttttaaagtgattgtatacattacctgcctagacatttctggaaggacacccagaggctgatcataacagccgctctgggagaaatgggtctaggctaagagagtttgagttttaattgcatactgtttggattcatttgctttgaacatgtattatttttcataagtatgaaaataagatgggtggaagccctcaggagtaggactcttacagcagtaccaagtttataacggtgctagttcatattgttctttgagaaggggatagtttggtccttcagaatttaaatatttcagcaaggtagggtggcctgtaattccagcactttgggaggccaaggcgggaggatcacttgagcccacgagttcaatgctgcagtgagtcatgattgtgctactgcactycagcctgagcgacagaatgagaccccgtctcttttcttttttttttcttttttttgagacagagtttcactcttgttgcccaggctggagtgcaatggcacgatcttggctcactgcaacctcgcctcccaggttcaagcaattctcctgcctcagcctcccaagttgctgggattacagacatgcgccaccacgcccggctaattttgtattttttgtagagatggggtttctccatgttggtcaggctggtggtgaactcccgacctcaggtgatccgctcgcctcagcctcccaaagtgctgagataacaggcatgagccaccgcgcctgaccatgagaccctgtctctaattatttctcagtagaagtctgcgttaaaaggtacctgtgtttgacaataagaggccaagtgacagaatcttccaactgaaatctgatttcataaaatccaagaggaagagaatttgaatgccctcttaggaggaaaatggggttcatatcatttagtcgtctccttcggcaggtgctggaacacaactcaaagtggcttatggtttgcaattataaatctgggaagagattagatacattatatctgagtacaggactatatgcatctagggagttgaaaacatagtcctcatagagctttatcaaaaagaaaaagaatatgcaaataaaaaactaaaactgaatccaaaaaggtagctgaacaccacactctcaaatgttgtaaccagacttttgacaactgctcagatccaggcctgggttctaccatcttgcctcagctcatttttggctttggttcctaattgagctcttcacctcgctatttaaggacactggctctctgaacattgagaacctgtggctcaccgcatcctcccctccccaccttaggctcatcctgtcatcagacggcttcctgatttacaaggccaaggtaaccaaaatttggaccataaaatattagtattctcaactttcaaacacgagccaaccagatgacctgtttccaggatcatggcagcccctccgacccagagcctctcctgctagtggggtcttcttcctccagtgcctccactgacaaaggagccaccgtctcagccaccccatgagtctgcctcccgtgagatttctacaactgacactgcagcccccacttccactctcatctatttgtgccacttggattatttcaactatattattcaacactcagccacctgtatttactgaatggctgctctgcctaagacactggcagggaggggagaaaataagggtatttttacagtaacaattaggacagtgttttgtttctaatagcagcttgagaaataattcgcatactataaaatccactatttttttataaagagtatggttcactggtttttagtatattcacagagttatgcaaacatcaccgcaatctaattttcatacccca

SEQ ID NO: 668586 - DNA, 1990 bp, Homo sapiens
aataaagcttttttcttaaaaaatggaaactatatgttagattttttttttaatatccaagatacgtgtcagttaaaacaagcaaagtacagaataatgtgtatgacatgttcccatttgaacttttaaagtgattgtatacattacctgcctagacatttctggaaggacacccagaggctgatcataacagccgctctgggagaaatgggtctaggctaagagagtttgagttttaattgcatactgtttggattcatttgctttgaacatgtattatttttcataagtatgaaaataagatgggtggaagccctcaggagtaggactcttacagcagtaccaagtttataacggtgctagttcatattgttctttgagaaggggatagtttggtccttcagaatttaaatatttcagcaaggtagggtggcctgtaattccagcactttgggaggccaaggcgggaggatcacttgagcccacgagttcaatgctgcagtgagtcatgattgtgctactgcactccagcctgagcgacagaatgagaccccgtctcttttcttttttttttcttttttttgagacagagtttcactcttgttgcccaggctggagtgcaatggcacgatcttggctcactgcaacctcgcctcccaggttcaagcaattctcctgcctcagcctcccaagttgctgggattacagacatgcgccaccacgcccggctaattttgtattttttgtagagatggggtttctccatgttggtcaggctggtggtgaactcccgacctcaggtgatccgcycgcctcagcctcccaaagtgctgagataacaggcatgagccaccgcgcctgaccatgagaccctgtctctaattatttctcagtagaagtctgcgttaaaaggtacctgtgtttgacaataagaggccaagtgacagaatcttccaactgaaatctgatttcataaaatccaagaggaagagaatttgaatgccctcttaggaggaaaatggggttcatatcatttagtcgtctccttcggcaggtgctggaacacaactcaaagtggcttatggtttgcaattataaatctgggaagagattagatacattatatctgagtacaggactatatgcatctagggagttgaaaacatagtcctcatagagctttatcaaaaagaaaaagaatatgcaaataaaaaactaaaactgaatccaaaaaggtagctgaacaccacactctcaaatgttgtaaccagacttttgacaactgctcagatccaggcctgggttctaccatcttgcctcagctcatttttggctttggttcctaattgagctcttcacctcgctatttaaggacactggctctctgaacattgagaacctgtggctcaccgcatcctcccctccccaccttaggctcatcctgtcatcagacggcttcctgatttacaaggccaaggtaaccaaaatttggaccataaaatattagtattctcaactttcaaacacgagccaaccagatgacctgtttccaggatcatggcagcccctccgacccagagcctctcctgctagtggggtcttcttcctccagtgcctccactgacaaaggagccaccgtctcagccaccccatgagtctgcctcccgtgagatttctacaactgacactgcagcccccacttccactctcatctatttgtgccacttggattatttcaactatattattcaacactcagccacctgtatttactgaatggctgctctgcctaagacactggcagggaggggagaaaataagggtatttttacagtaacaattaggacagtgttttgtttctaatagcagcttgagaaataattcgcatactataaaatccactatttttttataaagagtatggttcactggtttttagtatattcacagagttatgcaaacatcaccgcaatctaattttcatacccca

SEQ ID NO: 668587 - DNA, 1990 bp, Homo sapiens
aataaagcttttttcttaaaaaatggaaactatatgttagattttttttttaatatccaagatacgtgtcagttaaaacaagcaaagtacagaataatgtgtatgacatgttcccatttgaacttttaaagtgattgtatacattacctgcctagacatttctggaaggacacccagaggctgatcataacagccgctctgggagaaatgggtctaggctaagagagtttgagttttaattgcatactgtttggattcatttgctttgaacatgtattatttttcataagtatgaaaataagatgggtggaagccctcaggagtaggactcttacagcagtaccaagtttataacggtgctagttcatattgttctttgagaaggggatagtttggtccttcagaatttaaatatttcagcaaggtagggtggcctgtaattccagcactttgggaggccaaggcgggaggatcacttgagcccacgagttcaatgctgcagtgagtcatgattgtgctactgcactccagcctgagcgacagaatgagaccccgtctcttttcttttttttttcttttttttgagacagagtttcactcttgttgcccaggctggagtgcaatggcacgatcttggctcactgcaacctcgcctcccaggttcaagcaattctcctgcctcagcctcccaagttgctgggattacagacatgcgccaccacgcccggctaattttgtattttttgtagagatggggtttctccatgttggtcaggctggtggtgaactcccgacctcaggtgatccgctcgcctcagcctcccaaagtgctgagataacaggcatgagccaccgcgcctgaccatgagaccctgtctctaattatttctcagtagaagtctgcgttaaaaggtacctgtgtttgacaataagaggccaagtgacagaatcttccaactgaaatctgatttcataaaatccaagaggaagagaatttgaatgccctcttaggaggaaaatggggttcatatcatttagtcgtctccttcggcaggtgctggaacacaactcaaagtggcttatggtttgcaattataaatctgggaagagattagatacattatatctgagtacaggactatatgcatctagggagttgaaaacatagtcctcatagagctttatcaaaaagaaaaagaatatgcaaataaaaaactaaaactgaatccaaaaaggtagctgaacaccacactctcaaatgttgtaaccagacttttgacaactgctcagatccaggcctgggttctaccatcttgcctcagctcatttttggctttggttcctaattgagctcttcacctcgctatttaaggacactggctctctgaacattgagaacctgtggctcaccgcatcctcccctccccaccttaggctcatcctgtcatcagacggcttcctgatttacaaggccaaggtaaccaaaatttggaccataaaatattagtattctcaactttcaaacacgagccaaccagatgacctgtttccaggatcatggcagcccctccgacccagagcctctcctgctagtggggtcttcttcctccagtgcctccactgacaaaggagccaccgtctcagccaccccatgagtctscctcccgtgagatttctacaactgacactgcagcccccacttccactctcatctatttgtgccacttggattatttcaactatattattcaacactcagccacctgtatttactgaatggctgctctgcctaagacactggcagggaggggagaaaataagggtatttttacagtaacaattaggacagtgttttgtttctaatagcagcttgagaaataattcgcatactataaaatccactatttttttataaagagtatggttcactggtttttagtatattcacagagttatgcaaacatcaccgcaatctaattttcatacccca

SEQ ID NO: 668588 - DNA, 1990 bp, Homo sapiens
aataaagcttttttcttaaaaaatggaaactatatgttagattttttttttaatatccaagatacgtgtcagttaaaacaagcaaagtacagaataatgtgtatgacatgttcccatttgaacttttaaagtgattgtatacattacctgcctagacatttctggaaggacacccagaggctgatcataacagccgctctgggagaaatgggtctaggctaagagagtttgagttttaattgcatactgtttggattcatttgctttgaacatgtattatttttcataagtatgaaaataagatgggtggaagccctcaggagtaggactcttacagcagtaccaagtttataacggtgctagttcatattgttctttgagaaggggatagtttggtccttcagaatttaaatatttcagcaaggtagggtggcctgtaattccagcactttgggaggccaaggcgggaggatcacttgagcccacgagttcaatgctgcagtgagtcatgattgtgctactgcactccagcctgagcgacagaatgagaccccgtctcttttcttttttttttcttttttttgagacagagtttcactcttgttgcccaggctggagtgcaatggcacgatcttggctcactgcaacctcgcctcccaggttcaagcaattctcctgcctcagcctcccaagttgctgggattacagacatgcgccaccacgcccggctaattttgtattttttgtagagatggggtttctccatgttggtcaggctggtggtgaactcccgacctcaggtgatccgctcgcctcagcctcccaaagtgctgagataacaggcatgagccaccgcgcctgaccatgagaccctgtctctaattatttctcagtagaagtctgcgttaaaaggtacctgtgtttgacaataagaggccaagtgacagaatcttccaactgaaatctgatttcataaaatccaagaggaagagaatttgaatgccctcttaggaggaaaatggggttcatatcatttagtcgtctccttcggcaggtgctggaacacaactcaaagtggcttatggtttgcaattataaatctgggaagagattagatacattatatctgagtacaggactatatgcatctagggagttgaaaacatagtcctcatagagctttatcaaaaagaaaaagaatatgcaaataaaaaactaaaactgaatccaaaaaggtagctgaacaccacactctcaaatgttgtaaccagacttttgacaactgctcagatccaggcctgggttctaccatcttgcctcagctcatttttggctttggttcctaattgagctcttcacctcgctatttaaggacactggctctctgaacattgagaacctgtggctcaccgcatcctcccctccccaccttaggctcatcctgtcatcagacggcttcctgatttacaaggccaaggtaaccaaaatttggaccataaaatattagtattctcaactttcaaacacgagccaaccagatgacctgtttccaggatcatggcagcccctccgacccagagcctctcctgctagtggggtcttcttcctccagtgcctccactgacaaaggagccaccgtctcagccaccccatgagtctgcctccygtgagatttctacaactgacactgcagcccccacttccactctcatctatttgtgccacttggattatttcaactatattattcaacactcagccacctgtatttactgaatggctgctctgcctaagacactggcagggaggggagaaaataagggtatttttacagtaacaattaggacagtgttttgtttctaatagcagcttgagaaataattcgcatactataaaatccactatttttttataaagagtatggttcactggtttttagtatattcacagagttatgcaaacatcaccgcaatctaattttcatacccca

SEQ ID NO: 668589 - DNA, 1713 bp, Homo sapiens
agtgagccgagatcacgccactgcactccaccctgggtggcagagcgagacactgttaaaaaaaataataataaaattgtgatttgtttaaagcatagatacatgaacaggtataaattaatatgctaactatgatttctcattctcgcacaggattatgggtaattttcttttttctccatcaatatttctgatttttctaaaatagacaactattcttaggttccaaaaggcatttttacattcttttttaaaacttccactaaatattaaaattccttaatcccctggaaacatttttctaataaaaatacatggctaaaattatggtttcagtacagctggtacccactagtttaaataaaatttgggaatgtctcagaagagagatttcacaacagtcaataattaaggcagaaataattaaccccaaaaggaaaataatcttagcctacaacaaaagacttagtagcacagaagttccagggatttgggtgttctttttggttttgcactgtgagtgagygtatttgtttttattacatgcatacattattctgttttgaaatcttgctaaaagatcacaacccctcctaccactcagctattcccctagggactaggcagcctgccacataaaaataaatgcaggaagtgaagaagagctaacaaagacatcagcaccatatggaaatcacgaaactgttgaccaaataaattaacagcctggatggggtgggtcacacccagagacttgggagtagaccctcaaaattattatccattattctctacatttgctttatttttaaataaatgataccccacatttctgttatttatttctaaggcacaattacaatgttaaaatgatagtgacatattattgtgttattctttttttgaagcctttcctctctagttttttggcctcaggaaccattcctcttccccttaaaattataaagttgttttgctttgtttaaattcaaactagtataatgtgtagtgggctacgtgactgtcacttctatataacagtgctaaactaaaggttatgactaacatgagagcactcaagtatacatatttattcagctccataaaaggtagtcaggagggttttctacacaatgtatgctctagttagcaacactgctctatcaaagtaggaaataccacacacagtaaatgtgctgcgctgagcttaatgcttggaaactcttgaaaggcatgatgcaatttaacgtattttaaatcatttgatgttcactgaactctcactgtaagcagagtattgtattcaagccctaggtatgagagaaagtagaaaaacaacagaatctgggcctgatactacagagcattagaatactcgtggttgaaaacataaggaaaactcagtgtttattttaaaaatttacagctctgttaagtacaatcagtagcaagaacagattttttgataacttcacataagaaggttggaagagggattttcaatagataaatgcatgtaagacaagaggtagggcatttaattttacaactagagtttcattagggattttttaagggacaaatataagaaaactccatgtacattaaaaactattaaaagttcaacaaatcctaaaattttctgctttggttttaagtatgttgccaaaatcacaattcaggagacaatcacagagtttgataaaccttatt

SEQ ID NO: 668590 - DNA, 1350 bp, Homo sapiens
tgagcacacagcaagatggtggccacctacaatccagaagaaaaggcctcagaatgaaaacaactctgccagcaccttgatcttgtacttctcagcctccagaactgtaagaaataaatttctgttgtttaagccatccagtctatgggattttgttatggcagctggagctaagacaagtcccaggtatggaaagcctcaaaagtcagacagagtgattgggctaatgcgtggactataggctcctggacagtgtgacaaaaggaaaggggtatctttggaatagtattgcagtaatggtgcacggcgtgaaatgaaaagaaatgaggctgaaggcagagaagcaagccaggaagctgtttctaaaatccatatattgtgtgatgaagtaatgattggaaacagcaaagcgactggagaggggagggtgaacctaatggacatttctaagacacaacagtatccagtgattgcgagagaaaaagaggaaaaagtcatcctgactgttaattaggctctggtctcatttgcctatttttaaaaaatggatgaagggcttggggtaagcaggttgaattgctcaaaacaagaaactcaaaaactattattataatcatcgtcctcattattaatataaagtgctaagtcattactcatgggttggcaaatcaaaggctgggaaatgagaagaactatgttcagtttttggctttattccaagtcatatctctaacttcaaagtttccaaggaagctgcttccacatccagcaaaataggaataagtagccaaacacgctcttatttctctcataagtttatctgtgagttagtgaaacagcatttgtgaatagttggagccctgcaaaaatattgccttgcaaatataaaaatgactaagcccaagtaactgttattaataattattcatggcmagtggaacaattaaccttcaaaaaaatgttttttttatgaggagcgtcagaaattaggactcagcatttcattacgaggcatacattagttattcaaagaatacactgaaaatgtagatatttaaatcgccagatttttctgcttaattaaatgtaaatcatcttagtagatgattttatgatgtcttagtagattttattacgtcttagtagacattatctcaatatctaaaggaacttttcccttctagagtctgtttatatatatcagagataaaaatacacaagagatgtgagcagaaacatatattcatcagatcacagaaactattttaggcagttctttgttactaaaaatggtttgatgaactatttatttgtgtgtctgtgtgtgtgtgtgtgtgtgtgtgtgtgtgt

SEQ ID NO: 668591 - DNA, 779 bp, Homo sapiens
ggtcaaagttgggttgctgtcatatcaacatttcagctagggagaagaggagcaagtttatgtacattcaatgaattatgcatcatatctggaaacagaatcatcatttctactcacagttcattggcaagaacttagttacatcactacacctaaatgcaagtgagtctgagaaatctagtyttactgggaaaacaggtaaccagctcaaactctatttctttagaagaaaggaataacagattttggggggccccttgcagtatctgccacactttagataaaattcagaaagagaaagccagactgtctctactgactgaataatggaggctgttggcagtcctagaattttcacttttgtaaattttacttctgtctttctgtaggtgactccactaggctaaatttggagaaataaattggaaacacaaatatgtatttatctgtgaactgagagaagatagggctagcctgtagttcagaataagaaacagatacatagctcatgcctagctacatgcctatagtttagaacaaagaatagatgatagatgatagatagatgatagatagatagatagatagatgatagatagatagatagatagatagatagatagatagatagatgatagatagatagatcagagcagccccaagggaaatgcaagggcaatggcaaagatagagagatagacagatttgggttgataaaattttagaaactccaggaaaccaaaggcaaccaaacatgattagatgagaccagagccctc

SEQ ID NO: 668592 - DNA, 1385 bp, Homo sapiens
aggaaagcacttgcaaggcctgcccccctcattgacttaggaggggagagaagggcccgggctcatatttttttttaaaatgtgccccagagtgaagctgaagttcaaaactacatggtattttggctgaggtgtatccagactttattcaaatgttaggtcttttaaatgaacaatattagaagaacatataattaattgatggtaaatagagaaaaagaatcttaaatccctggaaataattttttttatcttggaaaaaaatgtgaaaagtccttttcttttaaaccctcccttccaatcctgccaaagtaaatgtattttatatttcatcaggaaggttttggacacttaagactgaaaagtctcataatgaccgcattctacttgaaaaaccaaaatgatctggaaggtttattttttaacttttgtttcaggttcaaggaaccaaatgtacatcatggtttttttttgaagaaaaatgtgttgggtgcactgagtttaagtactgctggttaacttgactttccctcatgggccttggaagctacaaactgtaaagtcccatgtgccatccaggccagggggaatagcccctgaggccccagaggaatacagagaatgtatcccttgcagactgtggctggcgttgagcctggggattctgcctgatttgcctggaagatacgcttcctgactcatggaatattgacatttaaagggacctttcacttgtaggagtgatcctaacttcccattcaaatactaaagtcttcctggccgatcttggtttgtcacccaggctggagtgtggtgacatgatcaccgctcactgcagtgcggccttgacctcctggactcaagtgatcctcctgcctcggcttccctaagtgctgggattacaggcatgagtcaccacgccctgctttggttgctgttaatagagataggcctacctatgcattaatattcctgacagtgaccttacatggtgtctggctaagcgctggtgtcatgggaagagtccagcaataatggctcagggctttgccttcttggcatttagcctttgcccaacctgttaaaatctgttggaatctcagttcttccatctagcatcttaccttcttgtgtcgtctgtcagtgtagatttgaagcgtctgagagtgtattccttgaatccttagtggccaagatgacgacatgtcaaatgaggaactataattgggyaaatttgccatcagcctggataggtagagggctcaggcctcagccctattcctgttcagtgtttgtagcagtgacaaggaggcagattgtgagcatgccccacaaatttgggctgacgtgaagcagggggagagtgctgcatatcctgataaatg

SEQ ID NO: 668593 - DNA, 1539 bp, Homo sapiens
  misc_feature 455, 456, 457, 458, 459, 460, 461, 462, 463, 464, 465, 466,467, 468, 469, 470, 471, 472, 473, 474, 475, 476, 477, 478,479, 480, 481, 482, 483, 484, 485, 486, 487, 488, 489, 490,491, 492, 493, 494, 495, 496, 497, 498, 499, 500, 501: n = A,T,C or G
  misc_feature 502, 503, 504, 505, 506, 507, 508, 509, 510, 511, 512, 513,514, 515, 516, 517, 518, 519, 520, 521, 522, 523, 524, 525,526, 527, 528, 529, 530, 531, 532, 533, 534, 535, 536, 537,538, 539, 540, 541, 542, 543, 544, 545, 546, 547, 548: n = A,T,C or G
  misc_feature 549, 550, 551, 552, 553, 554, 674: n = A,T,C or G
taagatggaggtggaaagggttggaggagcttggggatggagaaaaaatgaactgtataaaattaaaattcttgtttttgtttttagaaagtaaagagggccgggcacagtggctcatgcctgtaatcccagcactttgggaagctgaggtgggcggatcacgaggtcaggagattgagaccatcctggctaacacggtgaaaccccgtctgtactaaaaatacaaaaaaaaaaaaaaaaaaaaattagccgggcctggtggcgggcgcctgtagtcccagctactcaggaggctgaggcaggagaatggcctgaacctgggaggtggagcttgcagtgagctgagatcgcgccagtgcactccagcctgggcaacagagcgagactccatctcaaaaaaaaaaaaaaaaagaaaaaagaaatttttgaaaattcccccccccccctctttgggnnnnnnnnnnnnnnnnnnnnnnnnnnnnnnnnnnnnnnnnnnnnnnnnnnnnnnnnnnnnnnnnnnnnnnnnnnnnnnnnnnnnnnnnnnnnnnnnnnnngggagggttttctctttgttttctcaaaagaaaggaggcggggtgggtattttttgggtttcaaccaaccacccgccgccgggggggggaaaaaaaatttttctccccgccacacccttngaggaggagggggaaacaacggcccccccccccccgggttttgtattttttttgttatttagagaagagagagggttttcgcccgtgtgggcgggggttgttctaaccctcggcccccaaaagtgatctgccccgcctggggcttcccaaagtgctgggcataacagggcgtgagcccactgcgcccaggcttatttttttttttttaaaaattgactttttcattattcttaggaattcttgcacttactttaaaatcaatttcaagtttcccccaccctaaaaaagatttgcacttactttaaaatcagcttcaagttccaaaataaaaagaaattgaattttaataggaaccatattgaacctgcagataaatttaaaatccttatgaatattgagtcttctctttcatgaacatgttctgtctctacatctctatctccygtgtctctccaaaatttagtaattttctccacaaagtccttaggtcttttaatagatttatccctaggatcatataattatgtactgttgatgtttatctaggctgacataagtcagaattttgaatgtgtatgtgaagatgtataacatgacacaatgttttacctttttttgcacaatccagtttgagctatttccttgtaactaatataggtagagtgtcagaaaatgattatggagtggtcaaaggcatcatcttgaagaggaagactggcgtatacttctgagtgaactggacaatggggcaaagcaggaaacacgtaatctgacttgcagtttaaaaagatgactggaagaactgaggcagatgcattcattaggatcctaaacaaagatggtggcagtgtagatagagaggagt

SEQ ID NO: 668594 - DNA, 623 bp, Homo sapiens
agtgaggacttgaatccataccacctagaaagaacagtatgtgtggatcataacaggctctcaaatgtattaatgaatgagttgctgagaagcctgtataaaaatctaactgaattcttccatatgcaaatgtaaagtatttcctagcttattgtcacctaatttttggttaaagaaaattatatttgctggaaaatttaacagtattttgtgctgtcataagcaagatacaattctacaaacccataagccaggtggttgtrgttgaaactttggaacttttttttttttttgagacagagtctcactctgtcgtccaggctggattgcagtggagcaatctcagctcactgtaatctctgcctcctgagttcaagcaattctcctgcctcagcttcccgagtagctgggattacaggtgcccaccaccattcccggctaattttggtatttttagtagagacaggatttcaccatgttggccaggctggtctcaaactcctgacctcgggcgatctacccgccttggcctcccaaagtgctgggattacaggcgtaagccgccgcacctggcctgggactcttaattaaatgcaaagctgtattaatttttgaaaatgttt

SEQ ID NO: 668595 - DNA, 644 bp, Homo sapiens
atcaagtatttttttaacatttttgagcatttctgttgctctccaggatatctggaatgagcaagtgagcaaaaacaaaaaacaaaaacaaaaaaaaccacatagattaattagccaaagtttccattggatcacaggatcagtgcttaattttaagccatgctctygctcattggcacctgggtgcaagccatctggaatcctatttgaggggaataagccctgtagtctacgaagttctagttagtgaataaggaacatatggggatctgatgttaaaatttgagtcttttttacacaatttttcctttaaataagatgtaccttcttaggcctgttgggtatgtttaaagaatatagtatttgcagtacagttcaaagataactaagtaaactggattatgtgcttgattccaataaagcgggggatttgggcacctcactttctaataagatggacctatactaatgatcttgtttggtaaagtattatttgtagaacattcagtggggcttaatcctttttatcttttagcattttgaatttctaaatgctaatattccatttacctgctgcttgctgttggtgaatatcttagagttgatcattaataagtatgaagttttggaaatttataattggg

SEQ ID NO: 668596 - DNA, 644 bp, Homo sapiens
atcaagtatttttttaacatttttgagcatttctgttgctctccaggatatctggaatgagcaagtgagcaaaaacaaaaaacaaaaacaaaaaaaaccacatagattaattagccaaagtttccattggatcacaggatcagtgcttaattttaagccatgctctcgctcattggcacctgggtgcaagccatctggaatcctatttgaggggaataagccctgtagtctacgaagttctagttagtgaataaggaacatatggggatctgatgttaaaatttgagtcttttttacacaatttttcctttmaataagatgtaccttcttaggcctgttgggtatgtttaaagaatatagtatttgcagtacagttcaaagataactaagtaaactggattatgtgcttgattccaataaagcgggggatttgggcacctcactttctaataagatggacctatactaatgatcttgtttggtaaagtattatttgtagaacattcagtggggcttaatcctttttatcttttagcattttgaatttctaaatgctaatattccatttacctgctgcttgctgttggtgaatatcttagagttgatcattaataagtatgaagttttggaaatttataattggg

SEQ ID NO: 668597 - DNA, 620 bp, Homo sapiens
gacccttgtcaaatgccatccaaagcagtgataattatactcctgtcagggatgctatatacttaggaagatttttaaaaacttacatttgggctcaagattttcctagataatctgtctcttgatttatattaaaatctcttcttcctacatttgatgtatatgataargtttaatatatagatgtgttttataatacgttttcagaaaggcagtttttttttttcctgtgaagtaagctatggctgtcagtatagtaagtcaaaatgaagcatgaattttcatttaacacccatcatgtctgttaaaaatctttaaagttattttttcacagacatgatttgttatttataatcattgtaaaaataccatttaataacttttttctataacatttttatgctgttactctgcttccataaatataatcatcaaagactacttaatgtaaccttaatttaaaatattatattaccctattgctgaaagtttacattttttactatttcatgtgatgctaagataaacatcttgatgaatatagatattgacaaatttgtattcttgatttcctaaaagtgagattgagagttccaagtgcatgggtatttttattcccc

SEQ ID NO: 668598 - DNA, 620 bp, Homo sapiens
gacccttgtcaaatgccatccaaagcagtgataattatactcctgtcagggatgctatatacttaggaagatttttaaaaacttacatttgggctcaagattttcctagataatctgtctcttgatttatattaaaatctcttcttcctacatttgatgtatatgataaagtttaatatatagatgtgttttataataygttttcagaaaggcagtttttttttttcctgtgaagtaagctatggctgtcagtatagtaagtcaaaatgaagcatgaattttcatttaacacccatcatgtctgttaaaaatctttaaagttattttttcacagacatgatttgttatttataatcattgtaaaaataccatttaataacttttttctataacatttttatgctgttactctgcttccataaatataatcatcaaagactacttaatgtaaccttaatttaaaatattatattaccctattgctgaaagtttacattttttactatttcatgtgatgctaagataaacatcttgatgaatatagatattgacaaatttgtattcttgatttcctaaaagtgagattgagagttccaagtgcatgggtatttttattcccc

SEQ ID NO: 668599 - DNA, 620 bp, Homo sapiens
gacccttgtcaaatgccatccaaagcagtgataattatactcctgtcagggatgctatatacttaggaagatttttaaaaacttacatttgggctcaagattttcctagataatctgtctcttgatttatattaaaatctcttcttcctacatttgatgtatatgataaagtttaatatatagatgtgttttataatacgttttcagaaaggcagkttttttttttcctgtgaagtaagctatggctgtcagtatagtaagtcaaaatgaagcatgaattttcatttaacacccatcatgtctgttaaaaatctttaaagttattttttcacagacatgatttgttatttataatcattgtaaaaataccatttaataacttttttctataacatttttatgctgttactctgcttccataaatataatcatcaaagactacttaatgtaaccttaatttaaaatattatattaccctattgctgaaagtttacattttttactatttcatgtgatgctaagataaacatcttgatgaatatagatattgacaaatttgtattcttgatttcctaaaagtgagattgagagttccaagtgcatgggtatttttattcccc

SEQ ID NO: 668600 - DNA, 620 bp, Homo sapiens
gacccttgtcaaatgccatccaaagcagtgataattatactcctgtcagggatgctatatacttaggaagatttttaaaaacttacatttgggctcaagattttcctagataatctgtctcttgatttatattaaaatctcttcttcctacatttgatgtatatgataaagtttaatatatagatgtgttttataatacgttttcagaaaggcagtttttttttttcctgtgaagtaagctatggctgtcagtatagtaagtcaaaatgaagcatgarttttcatttaacacccatcatgtctgttaaaaatctttaaagttattttttcacagacatgatttgttatttataatcattgtaaaaataccatttaataacttttttctataacatttttatgctgttactctgcttccataaatataatcatcaaagactacttaatgtaaccttaatttaaaatattatattaccctattgctgaaagtttacattttttactatttcatgtgatgctaagataaacatcttgatgaatatagatattgacaaatttgtattcttgatttcctaaaagtgagattgagagttccaagtgcatgggtatttttattcccc

SEQ ID NO: 668601 - DNA, 588 bp, Homo sapiens
tgcaacctgcccctaaagaagcttattttaaatgaatcactctttaaatagatcattatttgaattctcagttgtcaggattgactccttaattctgataccgtcgacctggttgtcttatatcctcacttctgacttagcaaagtagcctgagagaaaaactatcatttctttcctctgatcattcaattctttaatttttaatgaaatccagttaattcagaaccattattaggttctataatggaaactatgctattacacaatgttaatgcccctgtgcattttttaaacaagagctatatgctttattactttattttcttaaattatctttggaaatctgaattttatgaataagtcacwgcaaatgaattaaacattgtgatgatggtaaaatttactcattaggaatatgttgaggtcttttgggaaacaaagctagtaatggtaaatatcattttagtatttagaagtgcttatctatgtatagcaacataccaagcaccgtagaaatccatccttgacgtaaactacactggtcatgctgtatatggtgtaattttaaatgggttcttttttttttta

SEQ ID NO: 668602 - DNA, 588 bp, Homo sapiens
tgcaacctgcccctaaagaagcttattttaaatgaatcactctttaaatagatcattatttgaattctcagttgtcaggattgactccttaattctgataccgtcgacctggttgtcttatatcctcacttctgacttagcaaagtagcctgagagaaaaactatcatttctttcctctgatcattcaattctttaatttttaatgaaatccagttaattcagaaccattattaggttctataatggaaactatgctattacacaatgttaatgcccctgtgcattttttaaacaagagctatatgctttattactttattttcttaaattatctttggaaatctgaattttatgaataagtcacagcaaatgaattaaacattgtgatgatggtaaaatttactcattaggaatatgttgaggtcttttgkgaaacaaagctagtaatggtaaatatcattttagtatttagaagtgcttatctatgtatagcaacataccaagcaccgtagaaatccatccttgacgtaaactacactggtcatgctgtatatggtgtaattttaaatgggttcttttttttttta

SEQ ID NO: 668603 - DNA, 588 bp, Homo sapiens
tgcaacctgcccctaaagaagcttattttaaatgaatcactctttaaatagatcattatttgaattctcagttgtcaggattgactccttaattctgataccgtcgacctggttgtcttatatcctcacttctgacttagcaaagtagcctgagagaaaaactatcatttctttcctctgatcattcaattctttaatttttaatgaaatccagttaattcagaaccattattaggttctataatggaaactatgctattacacaatgttaatgcccctgtgcattttttaaacaagagctatatgctttattactttattttcttaaattatctttggaaatctgaattttatgaataagtcacagcaaatgaattaaacattgtgatgatggtaaaatttactcattaggaatatgttgaggtcttttgggaaacaaagctagtaatggtaaatatcattttagtatttagaagtgcttatctatgtatagcaacataccaagcacygtagaaatccatccttgacgtaaactacactggtcatgctgtatatggtgtaattttaaatgggttcttttttttttta

SEQ ID NO: 668604 - DNA, 2336 bp, Homo sapiens
ggtttttggcactaagtaggcagagcctgaaaaatattacagcctgactcacgttagctaatgttatattgatttagaaaaacaaattggccaagacgcagtttttcaaaactgctatgcaataatctagcgctaatttttccactgcaattacatttggatctggcaccaaacaatgagtaaatcaactgttcaatagccttttttagcctgttcctatgactgaattacacatttcccacgatgctcttaatttcaaaactcatttcctaccagattggataacatttttctgaatgtccttccatgattttgaggctgtttctgtaactaattcctcaaacacctgatttggttaggacacagagtgcgaggaaagcttatgtcacatataaataaacttttcactctttagtgaaaggattggtttacatgatgtgtggattgtaattcattaaaatgggaaggggggatttacatgyattgcatagacagtaacaacaacgaccttgtttcatcagcttttagcacctcattgtaattcttcttccatctcttttgctctaacaattctctttcagtcaaccctatgcagttttctgtttgaaaattagtctgacatattctctgatttaatttgtcaaaagccctggttaatagatatatagtctattgatttccactctttcattttgtagatcttaatacaaatttctctttataatgtcctttaattgtctctagaatgtttgggcttcttctaaaaattcccatactaagtttacttttattacctttatggaatgcaaagatgtgataaggcaaaagcataacgtatagctatagtgtggcatgtcctgtttctcccaaggattaccaagcagacatcactgcactgtgtgcaatttcttcaggggtcatctgcagagcagccccccaagcaagaaggaaagattatcttccctcagtaatttcccacctagaaccacagagagaattcatctcatacagctgggccatgaagctgtcaagtggatgtaacctcctcccttcaggacacgtggtcctgccttatcagagaagaaaatggaaatgatgagttccaggaagctacttccttggcatacacctaacgctaacccactgtatgacagctggggctgtcataacaaataccacatgctgggtgacttaaataacaaaaatttatttattttttttcacagtctggaggctggaagtgcaagatcaagatgtcaacaggttgggtttactctgaggtctctctccgtggcttgtagatttgtggacggttgtcttttccccatgtcttcacatggtcttccttcttgtgtgtctacatcctaatcttttcttcttataaggacaccagtcctatgggattagggcccaccctcattacctcaatttaccttaattacctctttaaagaccctatctctaaacacagtcacattctgagatactgtgggttagggctccaacatatgaatggggagggacacaatttagcccataacccccactttgggtgtgttgcagccatttactctactggctttggcaggtccatcaggaattcaaaccatagatttgtggtaggctacggtttgaatgtgtcccttccaaaattcaggtgttgccaatatgatagtattaagaggtgaggcctttaaggggtgattagacggtgaggactcctaccaagttaatgggagtaaggtccttttaaaaaaagcttcacatagcatttaactagctggctagctttgttttctgtttttctgctgtgtgaggactttagcagctgtcactgacaactgaatctgtcagcaccttaccttggactttccagcctctggaactgtgagaaaatatgtttctgttctttttaaatatccccatctcaggtattctgttatagcaacacaaatgaactaagacaggatacaatgctggagacagaagcctgagccctattcagttcactctccagttttgccaacatctcatagctccttaccacagcactgcactgctggacacggaaaccccaaggggtgcccaagacagttgatgcctagcagggcagagggtgcacattcctgctggagacctgggggctcttaatccaaagctactgtggacgcacatacagaattactcatgactctgtgtccaagttgactctcccaactattgctagagaacacccagaaaagagcccaggcttcggagagacaaggaatgcctgggttttagttcagcaacaaagttgggcctgaaacatgaagaccaatgtagagctaaactcc

SEQ ID NO: 668605 - DNA, 633 bp, Homo sapiens
ttcgtagtatccatcctattagtgatctatttttaaagacctgagatctgtaaagtgcctatacatggctgactttcatgcctctaaaatgtaaattttaggtatgaatatcactccccatgtaaatcttttcgttgtttgcctgggtttgtggaaatattgctgctattaccttaccaagaatctattccatgttttataggtataatgtacatagagatgtaaagtgtaaagttctttgaattctgacagaaggataaacccacgtatctcacactccaatcaagataaaagacagtttcattaacccattaagttccaccaggcctcttccaactcagtccctcccattaagataatcacagttgtgatgtctaccaacatagattcattttgtctattgcaaacctttttcatgtctgctttctttcactcagcttcatgtctgagagatttatacatgtttctgcatgcataagtagtttgttaactgtggaacagttttccattgtaygagtataccagtttatgcatctcttgttgaaagacatttgggatgtttctagtttagacctattatgaacaaagctgctataatcattcttgtaaaaatatttttgtggacatacatgt

SEQ ID NO: 668606 - DNA, 1255 bp, Homo sapiens
agagtggaaactgatacttttagaggctcagtatctattctggggccacttggctaataaggagttttagttctgtctgatttcatatccagttaactacaatgctggcaagacttttatgtctatatatttaaggctaacacatcctcaaagtctccaataccatcctctcttacacaaagtcttatttctctgttattggctagggtgtagtgtaatgtagcaattcagttttcacatatggtttactgtgttttagggtcatagctgcttgagaacagaattggtacctggttaacctctaagtaaagcacagtgcataaagaaaccccaattttgtgaaccactgaaaagactattgaaaatgtagattttagaatgaagaaaacacactgggactgcagtgaaacagagagaactgcagagttccaggacatctgtaactgagcctttcacctgtaggctaccctctctatgttggagattgaggacgaggggatggctgaagtgggtgaatggcagtagtctccatacgagcagatagaattgatcttgtgtttcacctgtctacttccatttatcattttctctcatatcccagatgtgacagacaatctgactgtggccacatttattagttttaaggcaaatgaaggattctagagacaggctgtagagaagctaaagaaaatatttcatcagagagaagttaaatacttctgaagtatttcagcaaaatacacatacaaatcctttaaaaatttcttattaactttagagactgaaacttgttaagaacctgtgaaatttctgacttaaatttcaatgcatgaacataggatgtgtgacagatacgagaatgcctgtattgggttgcagcccacggaggtctgagattggtctccrggttggaaggacaacttggatgatctcaggaactaagggacttgagcagactgaactttgaaattttctcttccctaatctccaggacacactgggacctgcagtgaaacaaaggacatctgtagcaaagcctttcaactctagattgtcctctccatcctagaaatggaggaggaagtgatagctgaagttggttaattaaatgctctgatcttctgtaaaatacctagccagtgttcttcaagactctcaaggtcatggaaaccttggaaaaactgagaaacttccatctcagaccagaggacactaaggagaaataatgagtaaatgcaatttgatatcctggatt

SEQ ID NO: 668607 - DNA, 609 bp, Homo sapiens
tgaggtttgttctccccagccaggtaaggtaatatagtgggaaaagcatggatttggagtcttaaatcctgattctatcagcagtattgtcttgcattagttactaatctccctgcatctcattttctcatctaataataataacaattattctactcttaggagtacattatgtaatgtagataatgtgcctgagatggaataaccatcagaagagtccatttcctacctggattattttgtacaaatgcatctagatgatcrttcccaatctcttcattaatgaatggcaccttttgagagacaaccagttaatgttgctctctgtggcctttgggaaagagaaaagtaactggtttatgccagaattaaacctggaactctaacctaatgagcaaacagcaaagaaggcagatcaattgcagacgtgaggtgattcatcatttagaccctggaggtatgccttgggactcaactatctccctcatatctctgagacaccagtgtgagcttggacccctctaaacattcagatctattcctattccagcatacttgtgtctcaattcactcagtgcaaaggcgagaaacttaagctgtaaacaattt

SEQ ID NO: 668608 - DNA, 609 bp, Homo sapiens
attattggtataaattattccatcatttttcatggatgtcttctctcgccaagtagattatcagcccggcacgagcagggtccgatagctctcttccctgccaaccctctcctgacaaccccgtccatgggcatcttcctcagccctcactgctcatttggacactaagctagctgtcatgcatatctgtttcccattcattccttcactcattcactcacttattctgtgggggtagcaatgattacagaggacctagacctgcatctcactatcttgagcaagtcataccagactgcagttgcctcatgtgtaggatatagacaagagggacaaatctggcaggaaatgttacagatattaagtaagctaaggyttatgtatgtgtgtacagtcccaggtaccaaagccaattgataagcatccagtgattaaattagtgaatttccctaaccaacattctctgagaatccacacagcccctatggtctaaagggcagcagaaaacttataagccctggtacttaccacaacccaccctcttttcatccctttgccatcccattcccttttccacctgctggacctagcacacttgtgtacagaaca

SEQ ID NO: 668609 - DNA, 593 bp, Homo sapiens
cacgcatgggctggggcaatacgatcaggcatttaattaagcagatatcaagctcaagagggccctatttcctctactgtgaacctaggagcaatgataaggaaatgcaggagcctgagggttgaagcacaaatttaataaacatttccgccgttgcctggagcctgatttctgtcaaggcccaatgacttcttgaactaacttgctgastgattgcaaacttctttgagagcctcatgagggatggcactcattggaggttgagcatgtacacaaacacaggcccaactggatggataccctagcgctctctctctctctttctctctctcatttgtgcacatgcacacaccctcctcacaatgccataatgtctatgtaaattggatctttaatatccttcagataaatggcttcagaaagaacatggatacaatactctgtctctgagttaacatgttaggctctgcctcccaaattggctcagagaaattagcaggaaggaaggatcagacgaaataataaacctgcttacctgctcattaatttaatctcccccccaccaccctctcttcgtcttgtggtttcactac

SEQ ID NO: 668610 - DNA, 1204 bp, Homo sapiens
ggaagtttggttattctcattttgagcttgtgccaaaccttttaattagcctagcacaaaacagaaagataccatgaaaattttcaaattctgggaattacagggctagcagcgtcttacaaaatacgtatggtgctacttgtatctttttaaataaatattttattggtagagaactacaaaataagtagggcttttgggggagtctaattttacagtattttaaattgtgaaatgacaagcactacaactgaagcttgatgtgacttaccaatatttcccccmaaaaatgtaaagggaaataaaaatttttaggtttcatatgcagtcgctcagtggcaaacttctttcaagctagtaggtcttcacaacagaaaccctcctctctgggaaaacaaaaacatgaccgttgggttgtttatttatttttattttttcagtccttttgtgtttaataaaatggcagaattacactaggctgaaaagacataaatagaattttctctcctctgattttgaaattacagataagacctcaatttttttctggcttgtttggatcaagtatatattgaaatgttgactaaaactaattatgatagactgaaattgatgtctttaaaaaagctcacttaatagtgtttaatcaggttgagataataaagtgaaaaacagtgtaagttttgattcggataggtcttgacagtctactcctaaggcaaatgtaacatttatttatcataccagataacaccattaaggatgttttgttgtgtgaatcctagtatgtgttttatattgattgtcttccagggtgggttgctactttgtaatgtaagatagaaagttttgtgacagacttacagaagagcaaaggaaaaggtttgatcatgaaaagttcgtacagtttttttttgccccctttcctgcaactttttcttttcttttcttctttttttttaaaaaaattcattttctggtgtcctggtatccatttcaaaggatcaggtttcaaccagaacagtaaagggcctgagactggaaagtacacacaagtctggcaaactcatctgcatgagcaagatcatttgttctcaagcagacatccaaagtaaatgattgaaagagctgctagctgtgaaggatgtgtcttgaaggggaagggagtggaaacaaaccaggttgttaggaagaaaaagaaagg

SEQ ID NO: 668611 - DNA, 962 bp, Homo sapiens
aacatatatatggaagatagagctacagagcttaacataaatattaagtaaaacataaaaataaatgatattctgtatcttgacaccactttactgtgttttccaatacatatttgtcttagataactgtctcccaccattattttcacttactttaagaagtatctctgaccagaagatgtctttgccatctcccaacctgctggcagaggtacatcatcaggtatctcaaaagaagactgtcgaagatgctgagctgtgggtgtagctgctgggccagagactactccagtgggggtcagtgtcccaggagaaacagctcccaactgcagagaagctggagaggaatgagctcgaacatgctgtggagtcagggctcctgcagtgcctgcatcagtactggcctattagggaatattaagatgaaaaattaaaaaagaaaaaacacaactgagtccctttaaatttcccagtcagcgcttaattgcagccgaatatctaagtaccaaaggaaaatttcaacatttaatattcgacactggagaacacaggttttcaaayggatacttttaatattatataattttaatataaattttataaatgtttgtaattgtattgatgagcagtccatctaatgaatttcccctggtccacactagacatgtaagggcaactagtactgaatgaataaaacattccaaaaataatagtgaattttaaaacctaatttttaagaggtcagtgcagttatgggtgcttttccaagttctaaaatgttctaagtataaacacaacacaaagaatatgtattttttactaggttttaagtaattaattttttttctaggtcaaactcaagaaaaatcaagccctcgtcatttattccaaccatgataaaatgccatcaataaagaaatcataacaaattacacaaattttaatgagagcaacaaatttga

SEQ ID NO: 668612 - DNA, 962 bp, Homo sapiens
aacatatatatggaagatagagctacagagcttaacataaatattaagtaaaacataaaaataaatgatattctgtatcttgacaccactttactgtgttttccaatacatatttgtcttagataactgtctcccaccattattttcacttactttaagaagtatctctgaccagaagatgtctttgccatctcccaacctgctggcagaggtacatcatcaggtatctcaaaagaagactgtcgaagatgctgagctgtgggtgtagctgctgggccagagactactccagtgggggtcagtgtcccaggagaaacagctcccaactgcagagaagctggagaggaatgagctcgaacatgctgtggagtcagggctcctgcagtgcctgcatcagtactggcctattagggaatattaagatgaaaaattaaaaaagaaaaaacacaactgagtccctttaaatttcccagtcagcgcttaattgcagccgaatatctaagtaccaaaggaaaatttcaacatttaatattcgacactggagaacacaggttttcaaatggatacttttaatattatataattttaatataaattttataaatgtttgtaattgtattgatgagcagtccatctaatgaatttcccctrgtccacactagacatgtaagggcaactagtactgaatgaataaaacattccaaaaataatagtgaattttaaaacctaatttttaagaggtcagtgcagttatgggtgcttttccaagttctaaaatgttctaagtataaacacaacacaaagaatatgtattttttactaggttttaagtaattaattttttttctaggtcaaactcaagaaaaatcaagccctcgtcatttattccaaccatgataaaatgccatcaataaagaaatcataacaaattacacaaattttaatgagagcaacaaatttga

SEQ ID NO: 668613 - DNA, 962 bp, Homo sapiens
aacatatatatggaagatagagctacagagcttaacataaatattaagtaaaacataaaaataaatgatattctgtatcttgacaccactttactgtgttttccaatacatatttgtcttagataactgtctcccaccattattttcacttactttaagaagtatctctgaccagaagatgtctttgccatctcccaacctgctggcagaggtacatcatcaggtatctcaaaagaagactgtcgaagatgctgagctgtgggtgtagctgctgggccagagactactccagtgggggtcagtgtcccaggagaaacagctcccaactgcagagaagctggagaggaatgagctcgaacatgctgtggagtcagggctcctgcagtgcctgcatcagtactggcctattagggaatattaagatgaaaaattaaaaaagaaaaaacacaactgagtccctttaaatttcccagtcagcgcttaattgcagccgaatatctaagtaccaaaggaaaatttcaacatttaatattcgacactggagaacacaggttttcaaatggatacttttaatattatataattttaatataaattttataaatgtttgtaattgtattgatgagcagtccatctaatgaatttcccctggtccacactagacatgtaagggcaactagtactgaatgaataaaacattccaaaaataatagtgaattttaaaacctaatttttaagaggtcagtgcagttatgggtgcttttccaagttctaaaatgttctaagtataaacacaacacaaagaatatgtattttttactaggttttaagtaattaattttttttctaggtcaaactcaagaaaaawcaagccctcgtcatttattccaaccatgataaaatgccatcaataaagaaatcataacaaattacacaaattttaatgagagcaacaaatttga

SEQ ID NO: 668614 - DNA, 626 bp, Homo sapiens
tggtattttgtcatagcagcctgaatacactaagatattaacaaaataatagttttggactaaatatttttatttccattttctaaatgtcattttggagcaagaaatttgagaaaaakatcaaaaataagttttcatacatgtatataatagttcaggcaattcaaaggatgccttcaggacaccaactcgttgttttactataggctttgaaatgatgaaaccaagaggagcggtttcactcacactttaccaggaggcttttctgattcctgcagcctgcattgatctctcacatctctggactcctaggctgggcatggtgactcaggcctgtaatctcagcagtttgggaggctgaggtcaggagttcgagatcagcctggccaacatggtgaaaccccatctctactaaaaatataaaaattatctgggcatagtggcacgcacctgtaatcccagctactcgggaggctgaggcacgagaattgcttgaatacaggaggtggaggttgcggtgagctgagattgcaccactctactccagcctgggcaacagagggagactctttgtctcaaaaaaacaaaacaaaacaaaataaaaacatctctggactcctaccaac

SEQ ID NO: 668615 - DNA, 626 bp, Homo sapiens
tggtattttgtcatagcagcctgaatacactaagatattaacaaaataatagttttggactaaatatttttatttccattttctaaatgtcattttggagcaagaaatttgagaaaaagatcaaaaataagttttcatacatgtatataatagttcaggcaattcaaaggatgccttcaggacaccaactcgttgttttactataggctttgaaatgatgaaaccaagaggagcggtttcactcacactttaccaggaggcttttctgattcctgcagcctgcattgatctctcacatctctggactcctaggctgggcatggtgactcaggcctgtaatctcagcagtttgggaggctgaggtcaggagttcgagatcagcctggccaayatggtgaaaccccatctctactaaaaatataaaaattatctgggcatagtggcacgcacctgtaatcccagctactcgggaggctgaggcacgagaattgcttgaatacaggaggtggaggttgcggtgagctgagattgcaccactctactccagcctgggcaacagagggagactctttgtctcaaaaaaacaaaacaaaacaaaataaaaacatctctggactcctaccaac

SEQ ID NO: 668616 - DNA, 668 bp, Homo sapiens
agcatcctcattacaaacattcttacaaagtatttgatctattaacatggaatcccacataatatctttgtgaacacacaaagaaacgcactttatagtgaagcaggtaatgctatgtatgcacaaaaatgaaattcactggtcctagcacataccacaccaactagcagcagctggcctgataagcagtgatatggccatttgaaaatatctctgggtcactgacttgggatgatgccttttaaggatgggaggccaccctctaggaaaccatatgtataaaacactgatgactattgtaggtgctggtgctgtgtcccccatagtagaatacacagtctcagagccagggagtgaaaatagaaatggcctcactcaccatcactcccaaggacccatttggggaatctgtgtttcctgccctgtgacattagcttctgtgtgtctgaaggatctggttcccagagggtatctgtgctctccattctcacaactttaagctctaagggtctaaagaccctggtttcagcagtgatgtttctaccagaggacagagtgagggtcatattaaactttgtttctgtccagtcacttyaagctgttcatgccaggagaacagcaggcaagaaaaggagtgaccattttggcagggctggaacacagtcacc

SEQ ID NO: 668617 - DNA, 1219 bp, Homo sapiens
cagctgtaaaacagaggtaataattacaaggattaaatgagattatgtgtctaagcctattataatctggtgctgacacatggtaggtgctaaaatgatgatgatagttgtgataatccaggcacaatggtatctcatctctatcacatccagattaattcattcccacakgcttagggtggatggagccaacaaggcacagaattttaactggatcctcctttttattatagcaccaagtaactcagtacacccacctcaaggattgatgccatgggcacagccctgtggccagggtcacaaaaagattgttttggtcaaaggaaaatagcttattttggggaggctgaggcaggaagattgcttggggccaggagtttgagaccagctgaagcaacatagtaagatctcagctctacaaaaaataaataaataaaataaaataaaataaaattaagttagcttattttatttgctgtactttaaacttcaatgatatctacctttagtgaagcggcaccaggaaactttctggatgtagtcccttatgttaattgggatgtgggttcagaggtatatgcatttgtcaaacggggtttcaccatgctggccaggctggtatctaatggtaaacctagtatttgtgcattttactgtattgtgaaatatacttcagttaaaaaaaagacacaccaaaaaaaaagccataggcattcttgaattaaattttgttttaaatgtacaatttgaagggcagaccagaagaggcagtatggaatgatgaaaaggaaagggagaaagaccttacgcttagatctaaccccaaattttcactctaccattctctagcaagtgacttaattttgctgaacttagttttctcatctgtacagtgaggattacaaaacaaaagaagatgtattttaaaaaggaagaaaacccaaaccgaacgcaatgggcgattacaaagattaaatcagatacagtttataaaagcacctgccacatagtaggcactcgataataatggcttcctcaaaaaacagattattcaggctggagataacaataatacttgtgggattttgaatagtctctttcatttcagggatccccaatcacttaataaacattaattaacacaagccctcacctgtcagcacaggcttggagggtaggttggttttcaggtctcttgcttttctattgtctctgcaca

SEQ ID NO: 668618 - DNA, 1219 bp, Homo sapiens
cagctgtaaaacagaggtaataattacaaggattaaatgagattatgtgtctaagcctattataatctggtgctgacacatggtaggtgctaaaatgatgatgatagttgtgataatccaggcacaatggtatctcatctctatcacatccagattaattcattcccacatgctyagggtggatggagccaacaaggcacagaattttaactggatcctcctttttattatagcaccaagtaactcagtacacccacctcaaggattgatgccatgggcacagccctgtggccagggtcacaaaaagattgttttggtcaaaggaaaatagcttattttggggaggctgaggcaggaagattgcttggggccaggagtttgagaccagctgaagcaacatagtaagatctcagctctacaaaaaataaataaataaaataaaataaaataaaattaagttagcttattttatttgctgtactttaaacttcaatgatatctacctttagtgaagcggcaccaggaaactttctggatgtagtcccttatgttaattgggatgtgggttcagaggtatatgcatttgtcaaacggggtttcaccatgctggccaggctggtatctaatggtaaacctagtatttgtgcattttactgtattgtgaaatatacttcagttaaaaaaaagacacaccaaaaaaaaagccataggcattcttgaattaaattttgttttaaatgtacaatttgaagggcagaccagaagaggcagtatggaatgatgaaaaggaaagggagaaagaccttacgcttagatctaaccccaaattttcactctaccattctctagcaagtgacttaattttgctgaacttagttttctcatctgtacagtgaggattacaaaacaaaagaagatgtattttaaaaaggaagaaaacccaaaccgaacgcaatgggcgattacaaagattaaatcagatacagtttataaaagcacctgccacatagtaggcactcgataataatggcttcctcaaaaaacagattattcaggctggagataacaataatacttgtgggattttgaatagtctctttcatttcagggatccccaatcacttaataaacattaattaacacaagccctcacctgtcagcacaggcttggagggtaggttggttttcaggtctcttgcttttctattgtctctgcaca

SEQ ID NO: 668619 - DNA, 1219 bp, Homo sapiens
cagctgtaaaacagaggtaataattacaaggattaaatgagattatgtgtctaagcctattataatctggtgctgacacatggtaggtgctaaaatgatgatgatagttgtgataatccaggcacaatggtatctcatctctatcacatccagattaattcattcccacatgcttagggtggatggagccaacaaggcacagaattttaactggatcctcctttttattatagcaccaagtaactcagtacacccacctcaaggattgatgccatgggcacagccctgtggccagggtcacaaaaagattgttttggtcaaaggaaaatagcttattttggggaggctgaggcaggaagattgcttggggccaggagtttgagaccagctgaagcaacatagtaagatctcagctctacaaaaaataaataaataaaataaaataaaataaaattaagttagcttattttatttgctgtactttaaacttcaatgatatctacctttagtgaagcggcaccaggaaactttctggatgtagtcccttatgttaattgggatgtgggttcagaggtatatgcatttgtcaaacggggtttcaccatgctggccaggctggtatctaatggtaaacctagtatttgtgcattttactgtattgtgaaatatacttcagttaaaaaaaagacacaccaaaaaaaaagccataggcattcttgaattaaattttgttttaaatgtacaatttgaagggcagaccagaagaggcagtatggaatgatgaaaaggaaagggagaaagaccttacgcttagatctaaccccaaattttcactctaccattctctagcaagtgacttaattttgctgaacttagttttctcatctgtacagtgaggattacaaaacaaaagaagatgtattttaaaaaggaagaaaacccaaaccgaacgcaatgggcgattacaaagattaaatcagatacagtttataaaagcacctgccacatagtaggcactcgataataatggcttcctcaaaaaacagattattcaggctggagataacaataatacttgtgggattttgaatagtctctttcatttcagggatccccaatcacttaataaacattaattaacacaagccctcacctgtcagcacrggcttggagggtaggttggttttcaggtctcttgcttttctattgtctctgcaca

SEQ ID NO: 668620 - DNA, 1497 bp, Homo sapiens
tgcttcctttcctctctccctctctttcccctggaccttcctcccctacctgccctagatgcttagactggcagcttggtgaagcaatatggcagctacgtgcctttgaacaaacctcatcgcctctctcggcctccattttttcatctgtagaagaggaatgatagcagcacccacctcactgggatgctgtgaggattaagtgacatgacgagtgctgctggcctatcacggtgcctggcaccgagcagaygctcaataaatgttagactttactattttaattggattttgcctcttcacagtgtgtggaattttagtttggactttccccaatagcaaaccctggggcagggatttggttgtaagtttttgatctggaaggcacagcaagggagtggggagtgcaagagaaagagcagagagctaatcaaggatgctttaatgagaaggttaccactatcagtattggggctcagtcttgctgggaccctctgagaggctgtggagcacccctcagaactgtcccaccaaggaggtgagggtgcggatgctgggatgtttattccttaactcgcatccttcattggtggaggggtgctcctggggtgttaacttcccaatactttgagccttcccaggtgaggctgaacatgctccaggggcccgaggacatccagggcaggacatccaaggcagaaagatacaggggatggccaaggacatgctggggaactggcagcatatgttatggtgcatgagatggtgtcagacaatgtgatcctggatgctgaccatgtacaaatctaggagccctttcagggcttagccaggtaagctggtcctccttactccttttattcatttgtccatttcttctgtctttcaaccagccattcaacaagcatctattgagcacctactgactgctgtgtgccagacactgcgagagatgctgcgagagtcaaagagcaaggatctgggttttgggaggcggcaagtggcttggcagggctggacctgggatgcatgaggagatgaggtggaaacaaggagggcaaggcgtttaaggctgttctgggggattctgacttgtgtgcaaaggtgctaacatgctgggaatacaccaggctaagccctgaaatggctcccagattttgacgtggtcagcatccagggaacacatgagctcataccacctcacccactgtcacagatgcatgtggcaaatgctcaatccattttgacggtcagcattaaactttgatcataagccactgagaaccatcatagatttctaatgagagaagtagcgagtattttggaaaatggctgtgacaggctgagtaatggcaccccaatgatgaactaatctccggaactcgtgtcaccttacatggcagaagagactctgcagatgtgatcaattcaggatcttgagatgggaagattatcctgtattatctgagtaggcccaaggtaatcacaagcgtgctt

SEQ ID NO: 668621 - DNA, 607 bp, Homo sapiens
gcaggattgcttgagtccaggagttgggagaccagccttagcaacatagtgaggcccagtttctacagataatttaaaaattagctgagcatggtggtgygcacatgtagtcccagctgctcgggaggttgaggtgggaggatcgcttgcttgaacccaggagttcaggattacagtgagccatgatcatgccactgcactccagccttgctgacacagggagaatgtgtttcaaaaataaacatgagtaaaatgttttctgaatttttaaataaaatttaagacctattgtactgtgtataataaagttgacataagttcttacccttgttctaagtaacttttgtatacaaaataaataggctgatagtcttgtagtatcatatatatatatatcatacatataatgttcttaaaaaataattaattgaaaagaatttcgtttaattgagacagggtcttgctgtgtcacccaggctggagtacagtggtgtgatcatagctcactgcagccctgccctcctggactcaagcgataaaatatataacttttaaaaacatattattatatgaaaatatgaagatgcttctcccccttaattatgca

SEQ ID NO: 668622 - DNA, 607 bp, Homo sapiens
gcaggattgcttgagtccaggagttgggagaccagccttagcaacatagtgaggcccagtttctacagataatttaaaaattagctgagcatggtggtgcgcacatgtagtcccagctgctcgggaggttgaggtgggaggatcgcttgcttgaacccaggagttcaggattacagtgagccatgatcatgccactgcactccagccttgctgacacagggagaatgtgtttcaaaaataaacatgagtaaaatgttttctgaatttttaaataaaatttaagacctattktactgtgtataataaagttgacataagttcttacccttgttctaagtaacttttgtatacaaaataaataggctgatagtcttgtagtatcatatatatatatatcatacatataatgttcttaaaaaataattaattgaaaagaatttcgtttaattgagacagggtcttgctgtgtcacccaggctggagtacagtggtgtgatcatagctcactgcagccctgccctcctggactcaagcgataaaatatataacttttaaaaacatattattatatgaaaatatgaagatgcttctcccccttaattatgca

SEQ ID NO: 668623 - DNA, 607 bp, Homo sapiens
gcaggattgcttgagtccaggagttgggagaccagccttagcaacatagtgaggcccagtttctacagataatttaaaaattagctgagcatggtggtgcgcacatgtagtcccagctgctcgggaggttgaggtgggaggatcgcttgcttgaacccaggagttcaggattacagtgagccatgatcatgccactgcactccagccttgctgacacagggagaatgtgtttcaaaaataaacatgagtaaaatgttttctgaatttttaaataaaatttaagacctattgtactgtgtataataaagttgacataagttcttacccttgttctaagtaacttttgtatacaaaataaataggctgatagtcttgtagtatcatatatatatmtatcatacatataatgttcttaaaaaataattaattgaaaagaatttcgtttaattgagacagggtcttgctgtgtcacccaggctggagtacagtggtgtgatcatagctcactgcagccctgccctcctggactcaagcgataaaatatataacttttaaaaacatattattatatgaaaatatgaagatgcttctcccccttaattatgca

SEQ ID NO: 668624 - DNA, 651 bp, Homo sapiens
attacataataaaatttaaaaagatacaaattatttaatatattttaacttttagtttttaacttacactttttagccattttggagaaggtacatttataatttattttgttcccataaataattgtgggttttgccattacttttaaggctgcaattactttttcaccaacctaatttatttatgacagaaacaatacatgcagaatactagaaataatacatgtagaagactagaaaatcactttctactatttgtcattcaaataatgcttggacagagttatagccatgctcactgtggagaccttacattacgatcctgttgttttgactcttccattttaaccactcagctgtggatactcttagcaagatgtatgcaaagggattgaatgcatatagatttcacttagcaatatatagcagtcttggaatacctgagggtgactgctcatacttttactatagattataaaattccatggatttttttaggagaatatgtacagctatcaaataaatatgtataccagtagaagttatgagtgcaaagtaatatttgtatctataaaatttgacttggtagaaatagccacagagaaaactcagtrgcttaaaatagtgtaatttgatgtagtcaataaaata

SEQ ID NO: 668625 - DNA, 617 bp, Homo sapiens
tctcttgttttccatcatatacccagagctactgcagtgtgctgcacacgggatctctcaatacatattagaataaatgacccatttattttgagtatgacgattgtattagttacctattgatggataacagatgactacaaatttagcagcttagaacagcacgcatttaatatcttaccattactgtgggtttgggtcaggagtccaggcatccgtttgttgggtcctctattccagagtctcttctgaaagctgcaatcgcatttctgaccaagactgcagtctcattcacacggttgttggcagaattcatttccttgtgggatgttggactgaggacctccgttttttgctggctggcattgaagattatcttcagttcctgccacataggccactccatagagcagctcagagcagggcacctagatccatcaaaaccaggaaggaagaatgtgttagcaagaaggatattacaaccttctgtaacatactaatgtacatgtaatcacatacatygcattatctatctactaaaggcaagtgacaagtcccacccacgcccaaggggagagaattacacgagagcgtgagtaccaggtggcagcgatcac

SEQ ID NO: 668626 - DNA, 669 bp, Homo sapiens
ttaataacactgactataaaagataagagatcattttatagcaagtagacaaaatgatcaagtcacctataagagaactaaaatgagactggtatcagatttctctacatctactttcagtgccargagataatagagcaacatctagaagacattcaagaaaagacagtatgagccaagaattttatatctagccaaactgtccttcaagtataatcagtttttgtggaaattactagaaaatggaaagtgagctagccaagaagtagcaggaaaaacttcagttgaagaattgaagatctcagctcattgatattctcactgggtcatgaggcatttttggaggtttgtagaagggagggtggtaggttggacaacattggatacttagaagcctttatagcaatatcttcaaattttgtgaggagaagattattttgaacccagccaaacccttaccaatcttgtattcctgtgatgagtaaaataaagtcattttcaggttcaaaaaataatttttcccaggaaaataagtggttatccactattttgattttaaaaattaaatatctaactcctgacataataaatgaatagtctttaaacttttggctttaaagatttttttaagtctttgatggaaaagacattatcacacagagtttaata

SEQ ID NO: 668627 - DNA, 1145 bp, Homo sapiens
ttagcagcaaataaaggcacgagggtttaaagattggcatggagaagatggcctagagaaagaatgtagaaaggaagcgaagatgacccactccagagctgttagaaacacaaacttccaagaggtagactgtagaagaagaggaccccccaaaacaagcaagaagcagatagagtggtgggaggagaggtagaagagagtagagtcagggacattaggggagaagttacgggaaagatggctggtcaacagcattcaagtgactaagaagacaaaaaagaaaatggctggaaagaaccctttcggttgaccattaggaagtgggggtgagtttctttaaaaagtctttgctctgaatgggagaagtaagggcagttcaaggcaggagagcactatcgaatagaaggggtgttaaattatcttttctgattctacagtacatgcaggttcattgttgaaaatgtggccaaagttggaaattgaaggagctatgaactcatgtcccttgccttaattagcctttgactatgaaatagttatgtcttcatcataaatccttaagcctctcctgygtgctaacaaagcctcagggcccacttcagagtgcccttatctttattttggtccagactatgcgttttacttctctcttacttctcctgcttcaattgcccatgcctattggccgcaggctacctggaaagccatcactgcccgtacttatgagaacattggtatctgtgctgtgcatatcgtccagaaacgtcagggctccatccagaggcaggccctgctccaacactcagccaggtatatgtggccagctgggcctccagggagctcagcctagcccagaattgcattcagtcttggtgaaaacctctgttaccctttggccaccccctcttcctctaaagggtgcaacagaacctgaggaactaataaatatcccttttgtttttctcctttcccccaagtttcaacccttttctctcaaaagcaatatcctctccccaaaatgctaccctctcctctcttttccatttagcctttttcagattttcaatctcggatttttccaaactttgccacttgagcacagttttctctttacccatgcataatttagaagatttgctacagct

SEQ ID NO: 668628 - DNA, 1145 bp, Homo sapiens
ttagcagcaaataaaggcacgagggtttaaagattggcatggagaagatggcctagagaaagaatgtagaaaggaagcgaagatgacccactccagagctgttagaaacacaaacttccaagaggtagactgtagaagaagaggaccccccaaaacaagcaagaagcagatagagtggtgggaggagaggtagaagagagtagagtcagggacattaggggagaagttacgggaaagatggctggtcaacagcattcaagtgactaagaagacaaaaaagaaaatggctggaaagaaccctttcggttgaccattaggaagtgggggtgagtttctttaaaaagtctttgctctgaatgggagaagtaagggcagttcaaggcaggagagcactatcgaatagaaggggtgttaaattatcttttctgattctacagtacatgcaggttcattgttgaaaatgtggccaaagttggaaattgaaggagctatgaactcatgtcccttgccttaattagcctttgactatgaaatagttatgtcttcatcataaatccttaagcctctcctgtgtgctaacaaagcctcagggcccacttcagagtgcccttatctttattttggtccagactatgcgttttacttctctcttacttctcctgcttcaattgcccatgcctattggccgcaggctacctggaaagccatcactgcccgtacttatgagaacattggtatctgtgctgtgcataycgtccagaaacgtcagggctccatccagaggcaggccctgctccaacactcagccaggtatatgtggccagctgggcctccagggagctcagcctagcccagaattgcattcagtcttggtgaaaacctctgttaccctttggccaccccctcttcctctaaagggtgcaacagaacctgaggaactaataaatatcccttttgtttttctcctttcccccaagtttcaacccttttctctcaaaagcaatatcctctccccaaaatgctaccctctcctctcttttccatttagcctttttcagattttcaatctcggatttttccaaactttgccacttgagcacagttttctctttacccatgcataatttagaagatttgctacagct

SEQ ID NO: 668629 - DNA, 830 bp, Homo sapiens
gccaacatggtgaaaccttgtctccactaaaaatacaaaaaaattagctgggcgtggtggtgcacacctgtagtcccagctactcaggaggttgaggcaggagaatcgtttgaacctgggaggcggaggttgcagtgagtcgagatcgcaccactgcattccagcctgggacagtgcaagactccgtctcaaaaaaaaaaaaaaaaaaaaaactaagaaattggggacaatttcatattagttttctgccaagtgagtttcaaggaacagtagtcttatgaggtgttctagggcaagtgttctaggttagaggtgcttgggaagtgctatccactattggctacccttagtgatttatggcatatattagtgctgagaaaacttgccataaagttttgttgtgttaaatatgtcattttcctaactttttaaagaagaattacttattatagtttttgttcctttcttccttttgggaaattgaaaagattaatgaattctctataattaaaatacaaagatatatacactggagctcaaagttagggtgaaaaattaagagattaaggggtcttttactttatttctaatttcatgactctttaacttaaaaaaggtatgcaaagcaaataagaaaaattgtcaacacttgttacttttaataagagattatgggttatgattctatgtagtgtagtttttctatgaaaaaggtagatgttttttgtatataagacattgcaataataaccattcatctgttcatttattcaacaaatgtttattgagmacttaaaatatgctatacatcatttttggcacttgtgata

SEQ ID NO: 668630 - DNA, 643 bp, Homo sapiens
cctatattgttagaatatagaaaaacttcagtcctagaagatgcaatccatttggtacatgatattgatggtactgcagatattaataacaaattaggtgggtactggaaggtcctcagtgtggccctaccctcttatagggtccttcatgctctttcccagccttctctccaagctaaacaagacttgttagacagatatgtgtatgaagctagaatagaactgtggctcttgaggagtagtggtatgtgattatctctggtaggtggtagaacagtagtgagtgagtgccatccaggagggggccagaggggagcagtgtggctrcctcctccctccctgcagccccaggtcccacggtcttcacagtcgcggccactgccctccgtcagcacctcaccatctctcagggggacaagtgccacagaatcttgactgttttggaggctgtccttgggccttcctggtgtcagtccaacctcttcatcacgaccagggctgtcttaccaaacaccaagttggtcaccatcagcacccatggatagcaggataaaatctaaactcctcagcctaacatcaaaaccccttcacatctgatttcaatcttcctggtccccctggagggggctggatctcacaatag

SEQ ID NO: 668631 - DNA, 1496 bp, Homo sapiens
ctccacattttaacatctctgaaatctgaaaccattttgcagtttgtggttcaattagcatttatttcctttttactggtacataaaataatagtatatacaacatttactggtatgtaaaacaactgtgctaccttgctagaatttttaaattacaaaaaaaggctcaataaatgttagctgaataaatgataaaaatgtggaaaggaagagaatagcgcaatttctgataaaaatggggccaggtgcaaaaatttaatatgggtcctcaggatttaataggaaatatttattttatcatatataaacctaaacttttattaacaaatagtaattttgctaaaaaaaaaaaaattgcagctgggcacggtggctcacgcctctaatctcagcactttgggaggctgaggtgggcagatcacttgaggtcaggagttcgagaccagcctgatcaatatggtgaaaccttgtctctaccaaaaagtgcagaaattagccgggtgtggtggcacgtgcctgtagtcccagcttctcgggaggctgaggcaggaaaatagcttgaacccaggaggtggaggttgcagtgagccaagattgcaccactgcactccagcctgatcgacagagtgagaccctgtctcaaaaaaataaaattaaaattaaaaaaataaattgccaggctgggtgcggtggcttacccctgtaatctcagcactttaggaggtggaggtgggtagaccacttgaagccaggagtttgagaccagccttgtcaatatggtgaaaccctgtctccacaaacattagttgggcatggtggcacttgcctgtactcccaggtactcaggtggctgaggcacaggaatcacttgaacaccggaggcagaggctgcagtgagccaagatcctgccactgcactctagcctaggtgacagagtgagaccctgtctcaaaaaaacaaaaaaaattgccaagtaaacaaacttcggaaactacagcytaagccaaaaatgaaaaccaacaaaataagcaagacaatattgtcattatacaatttttctgaacatatagaataaatttaagcaatcaatgtaactttaataaaactaataaattttacaactttgtttttactgggtaaaactaattcctatacattttcatacagtgttcctccttagttttttttactgagtttttacatagagaacatgttacctaatgaaaaatatattaagcctgagctgagtatgtgagttgtttgtgtgggatgaatacatctttcctgacagcctatctaaaatagtatactcgtcactctcttgccccacactatgctttatttgtctccacagcactgatcaccacctaacctagtattcatttatagtctatcttcccctaaatttaagatccagtagagaaattttgtatattaatactttgtttcctgatgtgtcttgtgccttgattagtgcctggagtattagataccc

SEQ ID NO: 668632 - DNA, 1496 bp, Homo sapiens
ctccacattttaacatctctgaaatctgaaaccattttgcagtttgtggttcaattagcatttatttcctttttactggtacataaaataatagtatatacaacatttactggtatgtaaaacaactgtgctaccttgctagaatttttaaattacaaaaaaaggctcaataaatgttagctgaataaatgataaaaatgtggaaaggaagagaatagcgcaatttctgataaaaatggggccaggtgcaaaaatttaatatgggtcctcaggatttaataggaaatatttattttatcatatataaacctaaacttttattaacaaatagtaattttgctaaaaaaaaaaaaattgcagctgggcacggtggctcacgcctctaatctcagcactttgggaggctgaggtgggcagatcacttgaggtcaggagttcgagaccagcctgatcaatatggtgaaaccttgtctctaccaaaaagtgcagaaattagccgggtgtggtggcacgtgcctgtagtcccagcttctcgggaggctgaggcaggaaaatagcttgaacccaggaggtggaggttgcagtgagccaagattgcaccactgcactccagcctgatcgacagagtgagaccctgtctcaaaaaaataaaattaaaattaaaaaaataaattgccaggctgggtgcggtggcttacccctgtaatctcagcactttaggaggtggaggtgggtagaccacttgaagccaggagtttgagaccagccttgtcaatatggtgaaaccctgtctccacaaacattagttgggcatggtggcacttgcctgtactcccaggtactcaggtggctgaggcacaggaatcacttgaacaccggaggcagaggctgcagtgagccaagatcctgccactgcactctagcctaggtgacagagtgagaccctgtctcaaaaaaacaaaaaaaattgccaagtaaacaaacttcggaaactacagcctaagccaaaaatgaaaaccaacaaaataagcaagacaatattgtcattatacaatttttctgaacatatagaataaatttaagcaatcaatgtaactttaataaaactaataaattttacaactttgtttttactgggtaaaactaattcctatacattttcatayagtgttcctccttagttttttttactgagtttttacatagagaacatgttacctaatgaaaaatatattaagcctgagctgagtatgtgagttgtttgtgtgggatgaatacatctttcctgacagcctatctaaaatagtatactcgtcactctcttgccccacactatgctttatttgtctccacagcactgatcaccacctaacctagtattcatttatagtctatcttcccctaaatttaagatccagtagagaaattttgtatattaatactttgtttcctgatgtgtcttgtgccttgattagtgcctggagtattagataccc

SEQ ID NO: 668633 - DNA, 593 bp, Homo sapiens
tgtctcctggggggccgattctgcctttccagaagcaacacagtgagccttcatggaaaccccatcccacaagtgagagaagctaagtgaatctgcacatgctggtctaggaagacatccgtgataccgtaaataaaaatggcacacttatcaataccattgcaagtttccatttcctgcctccctcaaaacaaagtacaaaaaagcaaacgttgtgagcatgtatgcacttgcaaaagctgattgttaaatattcaagaaatttgcgaactcgtttttaaagctttggttgcctgaaatyggctgcggtgggatttcaccattgaaattgacaaacctacaattcagggtttttgtttctcctcttgagaagtttaacagtgcaccactacatttgcataaattaccaaactgacaacagggattatctcaagaaggggcgggatgggtttcaagcttgtgttggttactttcccgtctttatattattaatttttaagattggtgcaattatagcaatttttaattttttccattatctcccagatgtaaaaaattaacataaaacaaaaccaccaggctgtaattcctca

SEQ ID NO: 668634 - DNA, 593 bp, Homo sapiens
tgtctcctggggggccgattctgcctttccagaagcaacacagtgagccttcatggaaaccccatcccacaagtgagagaagctaagtgaatctgcacatgctggtctaggaagacatccgtgataccgtaaataaaaatggcacacttatcaataccattgcaagtttccatttcctgcctccctcaaaacaaagtacaaaaaagcaaacgttgtgagcatgtatgcacttgcaaaagctgattgttaaatattcaagaaatttgcgaactcgtttttaaagctttggttgcctgaaatcggctgcggtgggatttcaccattgaaattgacaaacctacaattcagggtttttgtttctcctcttgagaagtttaacagtgcaccactacatttgcataaattaccaaactgacarcagggattatctcaagaaggggcgggatgggtttcaagcttgtgttggttactttcccgtctttatattattaatttttaagattggtgcaattatagcaatttttaattttttccattatctcccagatgtaaaaaattaacataaaacaaaaccaccaggctgtaattcctca

SEQ ID NO: 668635 - DNA, 610 bp, Homo sapiens
cattcttcatgtctcaggaaccgggcagcagaatttttgctgttgcaggaatcttcccacctgttcttctgtggtcatttctgctccattctccattgccctctggcacactgagaaaccctttgacatggagacattcagaggcaaagtttggaaaataggactctaggacctccatacaagggtgagagaatttaattcaggttagaaatgtcgggatttgaggtccactggatttctatagctgcccatatgtcccccaacctctctgagtctatgcatttccatctataagcaggtggggtgacgatggccagataatctccaagascccctctctgatgttctacaccatcttggaaacttttctttttcttttgagacagggtcttgctgtgtttcccagttttgccttgaactcctgggctcaagccatactcttaccttggcctcccgaagtgctgggattacaggcatgagccaccatcttggaatctaagaggatgggagctgctaacccaggaatggcagggaactcatcctcatccagactgagacatcagaccctccaaacttcaagtttccacagcactgaagctctgattaggaa

SEQ ID NO: 668636 - DNA, 610 bp, Homo sapiens
cattcttcatgtctcaggaaccgggcagcagaatttttgctgttgcaggaatcttcccacctgttcttctgtggtcatttctgctccattctccattgccctctggcacactgagaaaccctttgacatggagacattcagaggcaaagtttggaaaataggactctaggacctccatacaagggtgagagaatttaattcaggttagaaatgtcgggatttgaggtccactggatttctatagctgcccatatgtcccccaacctctctgagtctatgcatttccatctataagcaggtggggtgacgatggccagataatctccaagagcccctctctgatgttctacaccatcttggaaacttttctttttcttttgagacagggtcttgctgtgtttcccagttttgccttgaactcctgggctcaagccatactcttaccttggcctcccraagtgctgggattacaggcatgagccaccatcttggaatctaagaggatgggagctgctaacccaggaatggcagggaactcatcctcatccagactgagacatcagaccctccaaacttcaagtttccacagcactgaagctctgattaggaa

SEQ ID NO: 668637 - DNA, 1116 bp, Homo sapiens
tgcctagactgtgcctgaacctcacatttgtcattgcactggtccttggcactgtccttcaagggaagaactgtttgccctattttgcagactaagaaacacatccaggaagcagctgagctgggaattaagcccagggttgatcccaaagcctcccttctttccatgctgctctgctccttacaaaaacaaaaacagaattcctttttttttttttttaagatggagtctcactctgttgcccaggctggagtgcagtggcatgatctcggcttactgcaacctccaactcctgggttcaagcgattctcctgcctcagcctcccgagtagctgggattacaggtatatgccaccacgctygactaatgtttgtgtttttagtagagacgaggttttaccacattggccaggctgctctcgaactcctgacctcgtgatctgcctgccttggcctcccaaagtgctgagattacagacgtgagccaccgcgcctggccaaaaaacagaattctttcaatgttgctctaggaaatttatttttaaaaaatgaatttccttctgcaatgcctggctcacgaccgattgtagatcaagaaacagatcttgggcctttgccacccaagcaggttcagaaagactgccctggcctccatgtgcccagggaggccagaggagcccacagtttcactgtctcagcagagctggaggaacctgttaaactgtctaagaagctaataaaaaaatcccagtgagatcatgtctgttaaagccctttgagctccctgagctctgaggctgtcttaacactcactgtctcattgcttactcagcacaaatttccccagggctgcaaagccccttccctgtttccagacccctggtttcctcactcatttcatttgatgcttcctttacatcttgaagatctgccatttttttctttaaacaccctattctagaaagaactggcatgttttgggtacctattttgtgctaagtcttttttctccattggctttatagtcatactttgaaacaaaatgtaatatgtgccctcattttccgatgaggcaacagaggcacagtctggggagctcagcaaggtctcatgttt

SEQ ID NO: 668638 - DNA, 721 bp, Homo sapiens
ttgttgaaggacaatattttcccctcttttccttaccctgtggcccccaaaaatgtttctgctaatgatataagcagatttctaatactttatctgcttttaatctatgaaaattaatatttggatacttcataattatcttgattatgtcacttgataaaacagtgataggtattaatgttagttcagccatatatttatactgcctgggaataggtggctgcaattgtgtggcgagcataatttggcagcgttcactagcttgcaaaaacctactgcaagagcttaaacatctacatgaacactgatatgaaaaaagcatgtaagcctgaccatagcttctagttcctagatggacctggctgtgtttttcaggccccaacctgcagggagccccttcaatctcatcagctgagtgggcagaataaagacatcatgcctgcacatgyttagcattgtgcccagcatggtcagggattgataaaaacacttgtgtattctctttttattatcatcaccaccattataatcattactgagagatgcatccgtagagacatcatgtcagagagaagcagaggaacccagaaggcagcaatgaaactaacatttagaagcaacacaggtgatggggcagcccagaaagctgaagacagaaaccatttcggagaattagctgcaaaagaagtagggaacaggcatgagaaggggacagttcttt

SEQ ID NO: 668639 - DNA, 2689 bp, Homo sapiens
gcatggtgcatggccaaccagagatgctcacttgagccttggcttccagcatttttattggaggttggtcatatagatatagctgactgcccacatgggtgaccttagttctagccccctcagaggtcaagctgatagcacatagcccaagttccccaccataaataatcctgagacatggaccaagacctctgggtaagcaaagatactcttaacaggcagaaaaatatcagagattaactcctaggagctgggcaaggagtacacttttctttgggcaatcttaattctttaatccatggagatctagaaaagggaaggatgttcctcagtgttatgcagccaacatatagaggcagcatttaaacttcagccttttctaggtccagagcctgaggtcttagccactggaatttagccactaggaggaaagaggtgagaaccattttacctttggtaggtgaaacaaataattaggcatagaattagatgtttgagtgtttgactatgttttgaaaaatcatattgctacttcatcatcatatacctgtaccaccagtgttttatcatttgctaaatttttgtaaataattacctgtctctctagatttaatattatgcttattgttattggtgtctattcttgtgccatttcatacttctgtaatgattgtaactttattgtatgctgtaaaatgtgatagagtgagtcgacagctagccttttttttttccctaagttttctcacctactgtcatttacttattttctagcacttcagaatcattttgttaaattccaaataatttcttcggaattttattctagttgcacaccactagttggttgatctctggggaagaatttagatatttacattactgagtcttccaatccaggaacataatctttattttcatttatttaaaacatttaaaatttttctgcaaggttttatagtttctagtgcattttttaattaacttcattccctcataattccttttttttgtggatattttgaactgtattgggagcatgacttttagttgatgtctagcatgcattctccccttcttccttaatagaactctggatttttttttttatagctgtacacatggccattttgtataaagacatttcttaccctcttttgacattcagtgtggccatgtgactaaattttggccaatgggatatgaacagaatgccatatgtcacttttggacagtgattcttaagctttgctgtctggaatgcagtgatggtgagatccaggagccaacctgaccaggctccctaggaatggcagagtagaaacctggaagaagctagctccctgaggattttgtggccttgtcatctacctccacactgtttatctgagagcataatctttgcatgtgtaagccactgcttattacagttgtcttatcatttgcagccatatgcaaacctaacagctacagtgtttttcttttttctgttcaggtctttaaggtaattttgctgaattatatatattgagccataatgctgcgtgcaaagaaaataatttttctcttttcctttgcagtgtttatacttcattagctagaaatttcagaacagtgctatataaggatgacaaaagcaacatttttctcttattcttgactgtaatgggaatgctgctacagttttactattaagtatggtgttgcctgtggtgatttttcaaatttaaaatcgggataatgacgtctgttttactttgtaaaattgttataaggatcgaatgcactaataaatataaaaatgccatgtaattgtaaaaagctataccacatttgtctggcatatagtatgcactcaacaaactttttcagtattactgttcttaataataacctcctgtgtttaatggcataagaaacwgaactatgtgttctataaaatatctctttggtgccactatacagaaataagtgggtctaatggatcattaaataaatttttatttcttagtatttaggctaaaagttagaaaagtaacatgcttttcattacaaagagaagtgatatatagattgaaatgttgggaagaaatgatcatttgaaagtagaggtagttcccatgaaatgagacatacagaaacatacatataatttagtcatcaggaagccctccttccacatgcttctcctctttctcctctgacaactgccttaaaaacatgtcccttgtggatatatatgtcatttcatttgtccagtctgttcttggagcaaaaccttatatgtgtctactgttttctgcggaagccagacacaaatttatatcaaaaaatattttgctgtaatttaaaaagtgctctttttttttcagatgttccatagtagagttgcttattctaaaattagtccatttcactccttgcaatcagttccagaagaggcctgtggagaaataagttgaatctgttgactttaatacatttttgatgttatccattgatccctcacctctgaaatagatgaaatgtatgatctatagcttgacatataatatatggaatattatttaagtttagtaatgacatattattttgcttttttaaaattttttgttatataggtatatacgtaccatggtggtttgctacacctattaacccatcatctaggttttaagccctgcatgca

SEQ ID NO: 668640 - DNA, 738 bp, Homo sapiens
aggaattccaaggagattatcacagatgtattttgaataggagaatcacacacacacacacacacacacacacacacacacacagagagagagagagagagagagagagagagaccctaagctttttatatgcaacatgggacttggtgtgaagcaaagcaggtgttttcggagaaggtgagggtttgtcctcatcacaccacaccatcttcccgaggggaactgcacaattagtgaaggcttttcctgatctgtgtgttcagatttgggaatgatgacttttcattgttgttgttgttttcacgtggagaaaaatacatgttccttgcttcaragtaaacattctggaagcctttgcgattgttcagatttctttagaggccttgatgccacttaccattgctttttaggctgcagggaacataatgaaactgaagtctcttgtggagcttttattcctcttctttcagacttaacagaaagcagtaggggacacttgggccaccgatgtcagtgtcgtttcagggtctgctttggtgttattcttaagaaaaatggcattggattaatatttcttttttttttgtaaacagatgttttgctcagacgagtctgacattttccatttatctcctcctctcccctctcctcccctactctccttgtctgccttttcttcctctgggcagaacaaaggcctgagattgaatggagtcttctcctgataatgcttttggc

SEQ ID NO: 668641 - DNA, 738 bp, Homo sapiens
aggaattccaaggagattatcacagatgtattttgaataggagaatcacacacacacacacacacacacacacacacacacacagagagagagagagagagagagagagagagaccctaagctttttatatgcaacatgggacttggtgtgaagcaaagcaggtgttttcggagaaggtgagggtttgtcctcatcacaccacaccatcttcccgaggggaactgcacaattagtgaaggcttttcctgatctgtgtgttcagatttgggaatgatgacttttcattgttgttgttgttttcacgtggagaaaaatacatgttccttgcttcagagtaaacattctggaagcctttgcgattkttcagatttctttagaggccttgatgccacttaccattgctttttaggctgcagggaacataatgaaactgaagtctcttgtggagcttttattcctcttctttcagacttaacagaaagcagtaggggacacttgggccaccgatgtcagtgtcgtttcagggtctgctttggtgttattcttaagaaaaatggcattggattaatatttcttttttttttgtaaacagatgttttgctcagacgagtctgacattttccatttatctcctcctctcccctctcctcccctactctccttgtctgccttttcttcctctgggcagaacaaaggcctgagattgaatggagtcttctcctgataatgcttttggc

SEQ ID NO: 668642 - DNA, 738 bp, Homo sapiens
aggaattccaaggagattatcacagatgtattttgaataggagaatcacacacacacacacacacacacacacacacacacacagagagagagagagagagagagagagagagaccctaagctttttatatgcaacatgggacttggtgtgaagcaaagcaggtgttttcggagaaggtgagggtttgtcctcatcacaccacaccatcttcccgaggggaactgcacaattagtgaaggcttttcctgatctgtgtgttcagatttgggaatgatgacttttcattgttgttgttgttttcacgtggagaaaaatacatgttccttgcttcagagtaaacattctggaagcctttgcgattgttcagatttctttagaggccttgatgccacttaccattgctttttaggctgcagggaacataatgaaactgaagtctcttgtggagcttttattcctcttctttcagacttaacagaaagcagtaggggacacttgggccaccgatgtcagtgtcgtttcagggtctgctttggtgttattcttaagaaaaatggcattrgattaatatttcttttttttttgtaaacagatgttttgctcagacgagtctgacattttccatttatctcctcctctcccctctcctcccctactctccttgtctgccttttcttcctctgggcagaacaaaggcctgagattgaatggagtcttctcctgataatgcttttggc

SEQ ID NO: 668643 - DNA, 944 bp, Homo sapiens
ttaaaaatgtcattggaattttgatagcaattgccacaaatctgtagatcacttgggatagcgtgggcattttgaaagttytagttatttcaatccatgaacatgacacatctttcaattcatttatatcttctacagtttatttcatcagtgtcttgtgctttaccgatccttcacctacttggctaaatctattcctaaatattttattattgttgatgctattataaatgaaattttaatttttattccaatagttcattgttagtgtacaaaggccaatgaaaagctgaaaacgtttcctctaagatcagaaataagacatggatgtctactcttgccatttctgtttaacacagtactgaaagttttagcctaagcaattaggtaagaaaaagaaataaagagcctccaaaaatcagaaaggaagaagttaaaatatctttttccagatgacattttatatattaaattcctaaagactccaccaaaaaattattacaactaacaaatggacctagtaaagttacagtatacaaaatgatccttacaaaaattagttgtttttccatttactaacagtaaattatttcttatatctgaccatagaccctccagcttatgtgaacccttttgcttttactatatctgctcagatttcttcttgttctgctaaatgtagttactctctttgtagggagttttatcagtaaaattttatatagtattgtgttgagaatacggttattttctttgtttttcataactctgaagaacatgctagcatatttcattgatacttgcatatgttttctaaatatacctcagctagtaactgctatgtacttgggagaagggaaagcaacttatctttactatttttttctgaagttctaatttttatttttttctcagagaaataggtatgaattttatttcatgca

SEQ ID NO: 668644 - DNA, 944 bp, Homo sapiens
ttaaaaatgtcattggaattttgatagcaattgccacaaatctgtagatcacttgggatagcgtgggcattttgaaagttctagttatttcaatccatgaacatgacacatctttcaattcatttatatcttctacagtttatttcatcagtgtcttgtgctttaccgatccttcacctacttggctaaatctattcctaaatattttattattgttgatgctattataaatgaaattttaatttttattccaatagttcattgttagtgtacaaaggccaatgaaaagctgaaaacgtttcctctaagatcagaaataagacatggatgtctactcttgccatttctgtttaacacagtactgaaagttttagcctaagcaattaggtaagaaaaagaaataaagagcctccaaaaatcagaaaggaagaagttaaaatatctttttccagatgacattttatatattaaattcctaaagactccaccaaaaaattattacaactaacaaatggacctagtaaagttacagtatacaaaatgatccttacaaaaattagttgtttttccatttactaacagtaaattatttcttatatctgaccatagaccctccagcttatgtgaacccttttgcttttactatatctgctcagatttcttcttgttctgctaaatgtagttactctctttgtagggagttttatcagtaaaattttatayagtattgtgttgagaatacggttattttctttgtttttcataactctgaagaacatgctagcatatttcattgatacttgcatatgttttctaaatatacctcagctagtaactgctatgtacttgggagaagggaaagcaacttatctttactatttttttctgaagttctaatttttatttttttctcagagaaataggtatgaattttatttcatgca

SEQ ID NO: 668645 - DNA, 621 bp, Homo sapiens
cagaaatccatggtagaggagatgctgtcatgactttcatcctactaaacatggcttctcttgacttttgacatttactgacattatcccagattttgttcacrccagtgccaaactcatgtcttgtatgcccccaacctaaccttatacactttatattcttctattctctttttaggaacctgaatattttatgaaagtcctactggatgaagagaaagactagctattttaagacttggtgttggctaagtgtcttccttggaagtaattatttcattcctgccaactctggcatcctctcagaatgcattatgtctgattgaagggttggagaaatgcaggtatgagaggagaaagggtacaaaatatgtctccttcatcatacagaaggagtgtatctagaacatcatggcaactcaccatagaaagaacaactgcccagaattggcttcactactcttttctgggccatcacttttgaaccactcaatctctaggctctactctatgactctcagtacctgccataggcaccaggatgtgataagtagatgggaaggaccagctgcctggattctggcaacctctcaggtaccatgttttcacactatcatagta

SEQ ID NO: 668646 - DNA, 1173 bp, Homo sapiens
ggarctatgtctctaaacatggaggctgaggaaagtggctcttggctgtcctctcatcccacctgccttttctccccatgcccagttagtctcatactgcaagaaaactctccagcctacatgcctaaccctttggaaatatctcccttaagtgccccatggccacccttcaggtctaggggtttgcacatccaagatactctccagccttgggagtaaaagacctggcaaagtttcttccagttcctagaagcggactcaggaccatttagaaagggaattccagggtctttaaaatccaggacagggtctggaaggtagattagatttcatgttggtatgtcactttagtcttgcagcttccctatctttgcccgggcttaaggtctttatcactgatttgtatccctcatggtgcttagcacagagacttgcatagcactgcttggtaaatattgattgactgatgattatttgattaatgttaagtgaactttataatttatttattcaccaaaaccacctctctggaaaatgaaacccataagataaaaattgtatggattaacctctttgcaatcatctaataaaatgaataattcattttattttattgttacatgttagttttatctttaacacagaattgaaagtttcacgtagaaaatgtaggaagtaactcaaaatctaccaggtttcaagtttatatcaagcttaattttttgggaactttgggatatcagtaagatggtgtggtcacttaaatggccagaagaagtagaagtgtctccgcaactcagggactaatggcttctctgaagtagctgttaacatgttgattgcaatgccactgcttttacatctctttatagaaagactcctaaaagaatgaaaatattcattaaaccacgaaatcaccattgaaaaagttactgtatttcatcatatgtttttctgaaaaaaaaaagataaagaaaaaacttaaaacttgatcatcttttttctgtttggtctagcatctaccttggacattttgcaaaaacatttttttaaatgtgattttcaattttggacgttggatacttcctataagaaatcacaaacttttttttagtccaattctctgtgctcctgcttttactcaatcttggtcaaagcccaaaatgagagaga

SEQ ID NO: 668647 - DNA, 1466 bp, Homo sapiens
ccattggatttatagtttgtatagatagaaatggtgtttaaaatattaaatatcttaagccatatgtatagtatcagtgagaggtcagtgcagaaaacaaacactctctaggtatctaagcagaaatgaatttaatacaaggaattagttgtgggctagctcctggaataagtatgtatttgttttttttttgttgtttccagatgtatagggggcagaaactggctatttttgttcatttgctccttcttctttttcttttttctttttttgcattgtcattggagaacagtattgattcttctgtatttgttgaaaacatcctttgtggcttacaagattgccaattttaatgaatgttttatgaggatttgcaaatgttggtgtgttctacttattgagtatgaggttctatatatgacctttagatcaagcgtatgagttttatgcttaaatcttccctatctaccagtttttctgtctgcttggtcaatttcctaaaaaagagccttaaaatgttccactgtaatgatgaatttgctgatttctccttatactgatgataatttttgccttacatatttgagattaagttgtaaaatgaatacatacaaatttaagcattccgagtacctgaagagttatccttttaccattaactcagaaacttctattaacttttttcttttaaagtccatttagtctgatattttaggagtcacacaagctttcttttgtttcagatttacttgtatatattttccatacctttaacttcacatttctgtgtaattatgttttagttattgtctcttataaatacatatatctgggtttttcctaaatttttattttgaataatttcaaatatgcagaaaagttgaagaaatagaaaataaaatcctggctacctttcatctaaatttatcaattatttattttgtcacttttgcttctctatctatatatcaatcacactttttttaatggaaccatctgaacataagatgcaagtatcatgctgcttcacccctaaataattcagcattcatttctcaagaataagaatattattccactcaaccacaataacattttttacacctacaaagttaacaatagttttataatattttctaaaagtggtgcataaacaaatayccccaattatcccagaaatgccttttaatggctttttcctaatccacgactcaagatttatgcatgacacataattgttatttcccttgacttttagaatagtttctttcatattgaattgttttagtagttattctgaggaattttccacttactggatttgtctgattggggtcttatgactagttacaagttagatattttggcaaaaatgtttaggtgatattataaacttattgcatcatgtcatggaggctgtgatgtcagttgtcccactatttgtgatgcaattgatagcttggtta

SEQ ID NO: 668648 - DNA, 1466 bp, Homo sapiens
ccattggatttatagtttgtatagatagaaatggtgtttaaaatattaaatatcttaagccatatgtatagtatcagtgagaggtcagtgcagaaaacaaacactctctaggtatctaagcagaaatgaatttaatacaaggaattagttgtgggctagctcctggaataagtatgtatttgttttttttttgttgtttccagatgtatagggggcagaaactggctatttttgttcatttgctccttcttctttttcttttttctttttttgcattgtcattggagaacagtattgattcttctgtatttgttgaaaacatcctttgtggcttacaagattgccaattttaatgaatgttttatgaggatttgcaaatgttggtgtgttctacttattgagtatgaggttctatatatgacctttagatcaagcgtatgagttttatgcttaaatcttccctatctaccagtttttctgtctgcttggtcaatttcctaaaaaagagccttaaaatgttccactgtaatgatgaatttgctgatttctccttatactgatgataatttttgccttacatatttgagattaagttgtaaaatgaatacatacaaatttaagcattccgagtacctgaagagttatccttttaccattaactcagaaacttctattaacttttttcttttaaagtccatttagtctgatattttaggagtcacacaagctttcttttgtttcagatttacttgtatatattttccatacctttaacttcacatttctgtgtaattatgttttagttattgtctcttataaatacatatatctgggtttttcctaaatttttattttgaataatttcaaatatgcagaaaagttgaagaaatagaaaataaaatcctggctacctttcatctaaatttatcaattatttattttgtcacttttgcttctctatctatatatcaatcacactttttttaatggaaccatctgaacataagatgcaagtatcatgctgcttcacccctaaataattcagcattcatttctcaagaataagaatattattccactcaaccacaataacattttttacacctacaaagttaacaatagttttataatattttctaaaagtggtgcataaacaaatacccccaattatcccagaaatgccttttaatggctttttcctaatccacgactcaagatttatgcatgacacataattgttatttcccttgacttttagaatagtttctttcatattgaattgttttagtagttattctgaggaattttccacttactggatttgtctgattggggtcttatgactagttayaagttagatattttggcaaaaatgtttaggtgatattataaacttattgcatcatgtcatggaggctgtgatgtcagttgtcccactatttgtgatgcaattgatagcttggtta

SEQ ID NO: 668649 - DNA, 1466 bp, Homo sapiens
ccattggatttatagtttgtatagatagaaatggtgtttaaaatattaaatatcttaagccatatgtatagtatcagtgagaggtcagtgcagaaaacaaacactctctaggtatctaagcagaaatgaatttaatacaaggaattagttgtgggctagctcctggaataagtatgtatttgttttttttttgttgtttccagatgtatagggggcagaaactggctatttttgttcatttgctccttcttctttttcttttttctttttttgcattgtcattggagaacagtattgattcttctgtatttgttgaaaacatcctttgtggcttacaagattgccaattttaatgaatgttttatgaggatttgcaaatgttggtgtgttctacttattgagtatgaggttctatatatgacctttagatcaagcgtatgagttttatgcttaaatcttccctatctaccagtttttctgtctgcttggtcaatttcctaaaaaagagccttaaaatgttccactgtaatgatgaatttgctgatttctccttatactgatgataatttttgccttacatatttgagattaagttgtaaaatgaatacatacaaatttaagcattccgagtacctgaagagttatccttttaccattaactcagaaacttctattaacttttttcttttaaagtccatttagtctgatattttaggagtcacacaagctttcttttgtttcagatttacttgtatatattttccatacctttaacttcacatttctgtgtaattatgttttagttattgtctcttataaatacatatatctgggtttttcctaaatttttattttgaataatttcaaatatgcagaaaagttgaagaaatagaaaataaaatcctggctacctttcatctaaatttatcaattatttattttgtcacttttgcttctctatctatatatcaatcacactttttttaatggaaccatctgaacataagatgcaagtatcatgctgcttcacccctaaataattcagcattcatttctcaagaataagaatattattccactcaaccacaataacattttttacacctacaaagttaacaatagttttataatattttctaaaagtggtgcataaacaaatacccccaattatcccagaaatgccttttaatggctttttcctaatccacgactcaagatttatgcatgacacataattgttatttcccttgacttttagaatagtttctttcatattgaattgttttagtagttattctgaggaattttccacttactggatttgtctgattggggtcttatgactagttacaagttagatattttggcaaaaatgtttaggtgatattawaaacttattgcatcatgtcatggaggctgtgatgtcagttgtcccactatttgtgatgcaattgatagcttggtta

SEQ ID NO: 668650 - DNA, 1575 bp, Homo sapiens
tttgtagagtcttggcacatacttcccagcagcagctgcagctttgacttctgccattagaactgctttactttgatgaaaaatacttatttttcataccatctgagtctattacttgccccaaagtggatggacttggacagcttttagataaatagattgggggtgtttcctgtccctctgaggaatggaaatgagcgcttctgtgagaggcaaagagaactcaatgcacactcatgagtgcattcacaggatttgagaatatgtgatttatcaagaccaccttgtagttagtggtgtaaattcagataaacaccataaattggaggtaatgagtggtgcctttctccaggcctggatgggtgatgggacatctacaggagattactcctgtgtggggattgcaagtgtcatttgcaaacattacgacattttgacacatctcatatgtaaatgcatagcatctctttcagagtttattctgtttgggacaaataagtgtactgttgacaataatatttctcagaatactttaaccttgtaaatataattgaaaacaaattgcacagatgttttttttcacgcatttgaatcaccattgctgaraaatataccagtttaatgtttcgacaagttagccagcacgatagcatctcaaaaattagtgataacagtaacagatttcctggccatgcattcccctgtctccagcctccatttcttcacttataaagtggagttaatgatgcttacatcacaggattattgcaagtattcatgattaagcccagcctggcttagagcaggttcactgtagatattggttttcctgaaaatgtacattacagttctgaatcccagttctttaatctggaaaaaggagattatcgtacctaccttgttaatgaaatagtaacctaccttattaatgggaatgatatctaatatttactaagtacttattatgtgcaccacataatagaactttagatggattatctagtttaatcctcataatcattccatgaagtagaaacttattagacccattttgcaggttagtagtggaagaggttagattctacccagacggtgaatctgagcccatgctattaccaccacactgtcttttctgactagcttttctgatttatgagacagcactttggaatagtatatggaaaaacttggcacagtacctcatctgttgaaagtgataatattcatctttctctatacctgcctttctcctggttcctttctgaacccttcagaagcagcatctaaaaaaaaatacttcttctggccctttggaggcctgttgggcaaacacaccaggcttagggactcaggggagcatctcagtgggaggtccgttctgggtggcctggagcaggagtactggcttagggaaggaaagggttcccatccaggctttgccaccaacagcgtcatcagctgactcttggcaagtcactcacattacacagctaagctaagaccccttcctgctctaagatcctgtgtgatgggtcttctttatctttatcattagtttgtggtctggaacaatga

SEQ ID NO: 668651 - DNA, 653 bp, Homo sapiens
ttcatatccccttcctttccaagttaatcacaaattttcatgggccatagcctcatgtgtattctagtcttatggccttagttgtggtacaacattggtacctaaatgaatcagcgataatagagactattcatgatccagccactcaggagatagtcacatcttaaaaataccctctgcctaaggaatcctgaaaagtagtgggcacagagaagaaaaccaaaacaagaggagttgagaaagccctctgtgttgttttaacatggagtggatcatccactgttgagcagccgtggatctgacacccattactcacaagttctcaagcgttttcaatgggaagtgtaggccatgtccaaaaaaaatagaatgacacttttgctccatctcagcctcctatcgagaaaagcaaacacagaggattttccatttcaagttcaaatacagaatggattgcttcttgttttgcttgactagagtagttgatgagggttcagagactggcagcctgccagtcataaatcagttgygatcacattgtggtatgaactcagaaaaacaagtagacaagagtaaaggggtagagccagaaaaattgtaagtatagagaagatgtgactgtgattatgagtatttcaagtgcccagcacgtg

SEQ ID NO: 668652 - DNA, 462 bp, Homo sapiens
gtcatgtttatagtgctgagtttgaagaaaggtatgartgttgctgaaaggcttgatcccctctagtcagctccacaagaaagggctgtggaggacagccactactcctggaaaatatcaggactgtcaagggcagagtagctgggagcaggcacctaatgcctggcttgccctggccagggcagcatctggttgtggtcttctaaagtggcactgttcaacatggcagctatttgtcacatgtgactattcaatttaaaccacttacaattaaacaaaattaaaatgtaattccttagttgcattatttatatttcaagtcctcaataaccacatgtggctagtagctactatatttgaagtgggcaaatatagagcattgctctcatgacagaaagttctatttgacagcacggttatggagaaaggcagaatagaagaatgaaataaacagctgtgcaa

SEQ ID NO: 668653 - DNA, 659 bp, Homo sapiens
agtggtctatattaagtctgctgaagtcacccaagcatagtctactttcccagagaaagacagccaggactctgattcaaacttgagacctccactataaagtgaagatttcaggtgcaggaaaaaagacatcgatatttatgcagattagtatgagggtgcagttctgtagtctggggatcacagcccaagtgtaactctagactttcgggctgaaatatcctggtgttgaacttggatctcctgccataatgaatcagggaacggaagggacttcgtaatacaatacatccaggcttgtctgtggaatcccgttactggaagaaaggtgaatgatgactttattctctgatcccttccaggattcaaacaaacctagtgttctgaactgtcattttgtttagtgagtttcacataaagtatctgtattaacaggtaaaactgtaaactmatctttcctaacatctgattttcatgttcttattttacttacgttagcaggctaaatataccatggactctcagtctttatggatgtatgacaacatggtttgactaactgaataacaaagttattatccaatccttgtgcctcaattccctcatctgtaaaatgaaagtggtagactcgataacacataacatgtacataaaatgat

SEQ ID NO: 668654 - DNA, 1100 bp, Homo sapiens
gtccatcacctgaatagtgaacactgtacccaacagggaatttttcaacccttgcccctctgccaccctccccgcttttggactccctagtgtctattatccccctccgtatgtccatgtataaccactgtttagctcccacgtataagtcagaactgtgcatgtatactttcataaaaattacagggctgggcacagtggctcatgcctataatcccagcactttgggaggctgaggcgggcaaatcacgaggtcaggagttcgagaccagcctggccaacatgatgaaaccccgtctctactaaaaatacaaaaaattatctaggcatagtggcaggcgcctgtaatcccagctactcgggaagctgaggcaggagaatcgttttgaacccaggaggcagaggttgcagtgagccgagatcacaccactgcactccagcccaggcracagagtgagactccgtctcaaaaataaataaataaataaataaaatcacaataaacaaacacatgtttactgtacataagaattatacagtttaaagtcatctcaacacatccttgtgttctcagaagtaaccactatctaaatgtttagtgtgcatccttccagatcttttctatgcatattagaaacacatacacacaatgcttacttctttttaaacaaaaacacacaaaggggtcaggcgggtgggcaaaaataaaaaattaaaattaaaaaacacacaaaaaggggatcatactaaattgtttggcaacttgcctttttccccattcacaagcaatcctctttttttcattttacttttttgagatggagtttcgctcttgttgcccatgctagagtgcaatagcacaatcttggctcactgtaacctccgcctcccaggctcaagcgatcctcccagctcagcctctcaagtagctgggaccacaggcatgcaccaccatgcccagctaattttttgttatttttggtagaaacagggtttcaccatgttgcccaggctggtctcaaactcctgagatcaagcgatccacccaccttggcctcgcaaagtgctgggattacaggtgtgagccaccacacccagcc

SEQ ID NO: 668655 - DNA, 635 bp, Homo sapiens
cggcctcccaaagtgctgagattataggtatgagccaccgtgcccagccccctgtccagtttcttttctctcctttgttgttgctgccttctttcccctcaattctttttagcattctatttatttcctctactgatttggaagttataccctctgtttctgttcttttgttggttttctagaaattataccatgcagtaaagtctaatcaaaatctttattctctcttttcccaaaaaatctatagattttaaaagacataagcaacacatcaacaaaatgcaatatgtagaccctgtttggattccagtttgaagaaaccaaatataattttttaaatctttttttagataattgggaaaatgtgaatactaactacataatgctaagaaattattgatttttttctgtatatgatactggtattatactttaagcccatatcttttataagaacaatatatttatgggttaaataatgtgattgttaggacttactttaaaatacttgggatatatataaaaacactttagtcatgaattcataactgttgaaggtgggtaataaatacataaggattcattatactcttctcttttacatatttaaaawtttccataagaggtttttttta

SEQ ID NO: 668656 - DNA, 655 bp, Homo sapiens
ttgatttataaaattggacatcgcaagtgtatgaaaagatggtggtctcagaaagaaccgcagaggtttccttctgctttgtagacattggcctttatgacagaaatgcaaagttggtgtcaccaagtttttctcagcctactttattctttgaagcattctgttagcatccaattaatagtatattctttttaccaagtcccattttcaaatgttcaaaagtaaccttttgcttatccctagcatttccagtatcctgacatctggaggaagaattaaaaatataatcacacatccagatgttggtcctgcaccaaacacctggcatgtccaaacgtgccagggattgccttgctttttcactctttatccttgtgggaacatgcaatcataatacgcttcacatttttgtagtgctgtgcccctttttcccaaacgtatctgggtaggtaggggagatgttattatccatgttttactgaggcccagatagatggaaagytgtgcttcagaccatcttggcacagtgctgggagtgtaattagtgttctgatgcccatctcagccatttgtcatggagtcatggctctaccatgtttgcattgctattcatattaatgccacaccatccctttgctaaccctctcaccaacat

SEQ ID NO: 668657 - DNA, 1200 bp, Homo sapiens
ggagactaaagcagcctctagagtgacccagcggctggctgagtgctcttctgaaacactcaaggccacagctcatgcagggagatgtcaaaggatctacaggaacctgtttccctatggagcactgtccctgagaggggcagacagaggcaaccccacacccatgagttgggtgggcaggagcaggcagtaggttcagaccaaaaaggaaaatcagtcwctttgatttagttgaatcctctatttggtgggaaaaggaaaaaatggtcaacctaggccacgttaaatatttcaagcatcccaatgaccatcaaatcccttgctaccctagtttttgccttcaacatgcttgtgggcagcgatgaacccaggagaggccagtctccagccccacaagcgccccctggtgctgggtgcagggcagaaacacagcctccagcagagcatcttaggctggacttgacgatgggctccactagcccatcgtgctcacccctggtacaccacagacacttaaggacttttcataccttcctgggaagaaagtatgaattgagagaggcctagccaccaatggcagatacactgaacaggtgtggctgcagctcccctcctccacaatggccaacgtcaacagccaaccctgaaactttctgtggatgagtgcaagtaggcactctgggagccactgacaattcactggagctgtgtctccacctttcccagttcacgtagaatgggagggcagatccctgtaggggtgaaggctcgcccctcctttaatgcactcacaagatttccggttggcccgggatcgtttcctctccctcggcaccactcgctgactgggcacttgggtggctgacttgacgatgcggtccatgatctcatcagctgcatcatctgtgacattgggcgagtcatcagttcccatagtccaggaactagtggatcctaaaaattaaacagccagagtgcacaacatactcagaaggaaaacacaaaagatatatgcagcagtattcctccaagcagttgagttctttcagcaacagatcacagggaaggccagagttaaagccccagagctagtgatagatccagagggctaacctgtccccactgcagggagcaccaccataactcgtgactgctaccctgcaggctctgagcaaacccatacgcggggcacttatttca

SEQ ID NO: 668658 - DNA, 1266 bp, Homo sapiens
gcagagaaactgaacagcctcccattctaatccctttcatacgccagcaaagatgaccccatgttgtacaaacccascaacatcttttctcgctatcctttctggtcaggaatagatgtttcttttcctttaaaattggtacaacctatttatgttctattactgagatccaccccctaagaaggcttcaactgcactcctcctgcatccaccaagacacaggggctcaagactctggtctgatggctggggtcaccatggtgcaggcattaatgttcaccttcacatccctgttggccatgtttagcctagcatacaaagcctgcaagagctgctgggcaaagacaagctcatacatgggatgtcttaggcctttttgggtgccacaaggtaaaagtgataccccttgccatgtcccccaacactgcaaaacgatttctcatccttgttttatgctggctctacactgacagtctctattgttcaccatttaatgagactgttttcttcactttctggccttccccaccttcttctctcctcttctttcttgtttacacacactctctctccaatcacttcctggaatggaggtcttttacagacagcactggtcaagaagagggtacctttccttccatatagcaaaccagacaatcagaatgtatcccacataaaatcagggttttggttctcctcagctgtgtctgtctgctcttggtcactaaaaggctaccttttcattgccaaagcataatattattttcttctcccaattccacatccaaaactatctatggaaattacagttttggaaagaggtttggaaagacccgatctcagagagactaattatctttaattctttgatgtaataataacatatgcaaatacttagggtgtctggggatcaaggctgtagtaaaagatatgatttttccaccctgtcatctgtgcctcagttggtgtaacactggggcagggagggaggaagcccttcttcaagcatattttcagctgtgcatcaaagtagaatccatacatatatatatacacacagaaatatataatacatatatattatatataacgtgtataatacacatatattatatataacgtgtataatacacatattatatataacgtgtataatacacatattatatataacgtgtataatacacatattatatataacgtgtataatacacatattatatataacgtgtataatacacatattatatataacgtgtataatac

SEQ ID NO: 668659 - DNA, 611 bp, Homo sapiens
tgtcttacatcaactggctgccactcgaacaatcagttggctaatattacaaagcatgtggggtttgtcctaataaataaattaaaaacccaccttcacttttaactgtgacttttttttaatagttaattctgtaagttctgggatacatgtgcagaacgtacaggtttgttacataggtatacatgtgccagggtggtttgctgcacccatcaacctgtcatccacattaggtatttcccctaatgctatccctccccttgcccccgaacccctaacaggccccagtgtattatgtttccctccctgtgcctcattgttcaactcccacttatgagtgagaacacacagtgtttggttttctgttcctgtgttagtttgctaakaatgatggattccagcttcatccatgtccctgcaaaggacatgaactcatccttttttatggctgcacagtgttccatggttgtatatgtgccacatttcctttatccagtctaacactgatgggcatttgcgttggttccaagtctttcctattgtgaatagtgctgcaataaacatacatgtgcatttatagtagaatgatttataatcctttgggtatatac

SEQ ID NO: 668660 - DNA, 604 bp, Homo sapiens
cattgcctcctgtaatcgacactctccactattcttgcaataggcaccaaggctcagggtagttctctatatgccacatcctggatatttcttttactaaggactgtttccttttgtgggaacacagatgtggggacacatatcctagagatgtctagaccaagagaattccatgtacggttttctttctttctttttttttttattatactttaagttttagggtacatgtgcacaacgtgcaggtttgttacatatgtatacatgtaccatgttggtgtgctgcacccattaactcttcatttaacattaggggtatctcctaatgctatccctccccacttcccccaccccacgacaggcgccggtgtgtgatgttccccttcctgtgtccatgcgttctcattgttcaattcccacctgtgagtgagaacatgtggtgtttggttttttgtccttgagataatttgctgagtatgatggttcccagcttygtgtttggttttttgtccttgagataatttgctgagtatgatggtttccagcttcatccatgtccctacaaagggcatgaattcatccttttctatggctgcagagtatt

SEQ ID NO: 668661 - DNA, 1080 bp, Homo sapiens
tgcaggtcaggaagaaatgggctttttattacccttcgcactaaagcaggaagccaatatctcatagtatttgcatctcaaggttgagtggatgctaaaaaccatttcattcactgaaagaaggacaagcatgtgttaaaagtggtttcagtgactcatgagtcctgagatgtccccgtatggaaggatagctctgaaccacccagaacaatgaagtagaaacagggactgtgtacagagaaatttcccaaaattttctgccaaaaatcagaaagggtctttaaagatagaaagtttcttcagcagcaattaacaaaaggaaagatctgtagcaccatataccacactccactgtttgcttctcattttcagctctgcaaagtgttgatgaataaggccatagtggcacatgtaaataaggcagaattaatttaggggtgaaacagatcttggtgacatgttctccccctcctgctatctcagctttttgttctgaggaaaaataccatcctacagaaagcaccataggccaaaaccacggcactaaccccatgttgataaccatttatttttcatttatgtagaattaacatagctcctaaagtactgacgaaaatataggcacccagattgcacatactatacagaaaaaccatgtctccacctccaattagagagaggccccttcttctacccttctctggggatgaaaacagacgcacccctggacagccaagagtgaactagtatatgtatgcttggtggcttattgargaaactttctctcttccacatgaggctggggagctggctggatgagaataaattaaaccactctctgctctcttcacagggtatcagcttgggaatctcatggaccagatctgtggcgatcaacccttgcaaagaagcacagcgataggacaacttccctaccaccgaacagtttacataaatcaaatatgtctcctacctgtgatggacaaggtcttggagggagcgcaggtggtgggggtaacaatcctgacttggtagctgaaaagaaaaacacatactattaaggatcaccccccaaaaata

SEQ ID NO: 668662 - DNA, 1344 bp, Homo sapiens
caaacattgcaaatttttcatcataaaatgtcataaaaaatcatagaaaaggtgctagtaacacagaacaagaagaatgtaatttctttgtctgcatgaattcttccaaaaagaaaatgtctcactgcattatctcatcctcttttacattgctccaaagataaaaaccctccttggtatgaagcagcctgaatttatgatgatcattaaaatccttgggttagataacaggacagagaggggaggtgaaaatcctcataaatgctaacaaggcacaaagcaaactactggtcagctgcacaagagatacacttctcccaacccaagcattttggcttgttgtagtgagaacacagagatcttccaacttcaaacagctgaaacgctgccagagtgcaggaaagcctggaaagcccaaggagtttgagtccccttttgcccattatcgtgcacccacacctggatatagacagaaaaagacctccctccctcctacaaaccccaggcagcaaagaaagcgacctcaggaagcctctctcccagctcaggaggctgccttggggctgggtggacagagtggaccagactcaccacagagctggggaagccctctacgcaggctgcctgcagctggctccgtggccctcttctccctcaggccccactgctttcaagaaatacatgggtaggagaggtccccgccatgataaaatactgttccccaaatcagaccatggtgactgttaattcctttgtcaagtgccattatctttgtctttttgctggtagggatgggtgtggaaggaggggtgagccctgctggtaagagatagacagacagacagatggggtgagggtgtggatgagtagtggagagacaggactagagaccaggccaggagtcctgagactaaggccctcctcctggccatgacactaactagctgttacttccctgaacctcagtctcctcacctagaaaacaaaggcaataaaaatgcagtttctttctcacagggacagataaggtgaaagtaatttaaaaactgaacgtactttagaattgcaaaatattactattgtagagtgcataaataaaggctcctaattttttaagcctggaaatctggtttctaaatttagtttcttctaggacagcaaaggaggtgcaggtaggagcaggtaatgsaaggacagaactgctctactccaataaaaacatggggtgatagttggcaatggagcagctgctagaatcaccaacaacagtctaaagacagcactgtgagggtgaaccagctgaaaacacctcaacatgggccagaaacatcaagaaaaagacca

SEQ ID NO: 668663 - DNA, 546 bp, Homo sapiens
ggcaagcgtattttcaccccactcagtatcatgcatagttttggtgctgtgttagaacacagtgactctgtataaagttggttacagtcaacaaacaagactaagatttaaacacgtcgttaattcagttaacttcttacagtatgaaaggaaagttacaacatgcaacctctttttcaatttattgatggtatattgtactaaatcatttttaaagatatacataaaacaagcattaaaaaattcacatttttcaaatcctgagcatttacctgggatttttcctctaatacaaatttctattttaatattgcttcagatcacactatataatttggaatttttctgaaagctacaattttaaaggaatttatcatttctaaaaaatggaatgtaacacataattttctcagatttaacttcttgaaccaaagatatttctcatcttttaaattttaaagctttaagtctgagtgcttagtgataccagagatgtacagagtaaayttatttgctgagttaacattccacattcatttcaaatat

SEQ ID NO: 668664 - DNA, 568 bp, Homo sapiens
ttgaaccctattccagtgcttctgcaggaggatacattccgagttattaacctctgtatcttttgtcctccctggttctcatctttctcttctccccattcaagcagctgacctggtgtccrtgcctccaggaggaatgtgattcttcagggccacatgcagctacatctgccagcgtggccacactggttgtttatggatggtggctgttctgattcgttgttttatctggactgattggtcagtgcttgtttcatattggttatgcaatactttgagtatcaccattgtagttggaaggtgtagagaatctgaattcttttttcttgtttcaaatgattgagctctgatttgagaaggaaaaggaaagacgatttcagcatggaaaaatagtcttctggccctaaaaataaataaagtgaacttgcctgaaactagaaagagagcccttagctgaggaagaagatataagaagagcagcggggcctggggtctttgaagcagaggacacctctgccctgctttctgggcctgtagccagaaaggcagcaagaagccagggagagaa

SEQ ID NO: 668665 - DNA, 568 bp, Homo sapiens
ttgaaccctattccagtgcttctgcaggaggatacattccgagttattaacctctgtatcttttgtcctccctggttctcatctttctcttctccccattcaagcagctgacctggtgtccatgcctccaggaggaatgtgattcttcagggccacatgcagctacatctgccagcgtggccacactggttgtttatggatggtggctgttctgattcgttgttttatctggactgattggtcagtgcttgtttcatattggttatgcartactttgagtatcaccattgtagttggaaggtgtagagaatctgaattcttttttcttgtttcaaatgattgagctctgatttgagaaggaaaaggaaagacgatttcagcatggaaaaatagtcttctggccctaaaaataaataaagtgaacttgcctgaaactagaaagagagcccttagctgaggaagaagatataagaagagcagcggggcctggggtctttgaagcagaggacacctctgccctgctttctgggcctgtagccagaaaggcagcaagaagccagggagagaa

SEQ ID NO: 668666 - DNA, 643 bp, Homo sapiens
gtaggacaaatatactctgcagactccataaactttcaaaggagagataaacctgttagtgtgtgtgtgtgtatgtgtggtgtatatgtgcgcacatggggaagtgaagatgcccagccagaggtgtgaacttccagacattcaggaaaggaagaagagctttagaaaaaataagagtaatatgatcagatatctacatcagctgttcagcaatctttcctcgttaacactttggggaaagtgcaggtggtgaagggtatcactcaagttgctgtggttttgtcatgagcaggcaccagcackgggcttccccatgggttgtggtgaggaaaaccacatcattgctgccttgcctttaggccaacccttctgccctggagacctgagttgcctgtgcctagaaacaatgaagaatgttattgaagagggatttttgcaacttcagctagtcccttggaggaaagtgttggacaggagggcacccatatagcataaagatgggttttcatggacactgtcaaggcaagtgtctgttggctccaccgtaaacacaagggctacaactggctggcactcctgtgctccagaggccccaaccccagctgtgaaagatcgactaggacaagaggacagctgtctgcta

SEQ ID NO: 668667 - DNA, 642 bp, Homo sapiens
gtgcctgtcaccatgcctggctaatttttgtgctttttagcagagacggggttttgccatgttggctaggctggtctcgaactcctgacctcaagtgatccagccgcctcagcctcccaaagtgctgggattacaggcatgagccaccatgcccggccctattcttactttgtatgttgtatgtactttgtatgaattgctccacctcccagcttgaagcaattctcctgactcagcctcccgagtagctgggattacaggcatccgccaccacacacccagctactttttgtattttttggtaaagtcgggattttgccatgttggccaggctggtttcgaacacctgacctcagatgatccgcctgcctcggcctgccaaaatgctgggattacaggcgtgagccacygtgcctggccaagaatttatctcttttaattctcataacaccccatgaggtaagtacattattaaagtaatattttgcatggggaaactgggactttgagaatttaaactgggaagttaagcaaattggcagtttttagactcaggctgtaactacagaactctggtttttaaccacctcactatactgcctcaaatgtgatacactgggcaatacctcaaagttttgcaaa

SEQ ID NO: 668668 - DNA, 1516 bp, Homo sapiens
tgcattccctctaggactagccccatagcaccttacttcttccaagaattagagttaatgagccaaaggttctttttctcacttacataggatgttccattcttcatttcacacaagatacaacctaagatattcagtggacttcaaaaattaaaaattcctcttttagaacaagtagttccatgtttgtttttataagacacaactgaaaacctctcagtgtatgtgttgtagatgagaatgcattcaacacacttggctccagttctgaccaacatattactgacagttatttgcctgggctagtggtttcagcttgtggccaaataactgacttaactaaattatcccatttgcaatatgctcgtatctcaactcaaaagacttgaagtgcattatgattccattttaaattgtacgtacatctttctttggggtaacagatatttctaggagcctctgctcatggaacatggctttgtawgtgcagataaagggctttcactatgaccaaaaaatggataaaaacaaagcaaagcctctgtttagcatattcaagctcctatgctgcaagtccaaatgaacaaatctcccaaagagataaattttctccagatagcacagtggcaattttgagctggtgagtagggataggccttagcacatgttcatgtatattggatggcatttatacattcttagaaagctcatcttaatagttgcctttttattttcttccataaaactgaaggataagtatatataattttttttgtcacatgggagaataatagcccttaacaatggctttgtgatttgtactgagccttgaaaagaagttggattccgtttctaaaagttacctttttttttctgaggtgtaaaattgttaaggacattgcaggagtgtattgtccttgagtactcaatagagattttgaagaccctagaagtttcttctgcataaaatggggtctcctgaaaaagtataggcaactggtagtgaaatggagactaaggtcttttgcaaatgttacattctttctttactatcactttataatggaatgtaagaattttgtcttaaagtttaagctaagaatggcatgtatcaactaacctgttttcagtacttcagtctagtgttctttgtttattgttgagatgtagtatacttattggcaagcaaaaggaacagccaaatatagagcatatattacttaggcagtgcattttctcatcaacattttatatctttctttggatcattgataagttcttcaaagaaactagtatggtatttgggaatgtgtgtgccaaaagaatatacatacattgaattagaaaaggaatatacccatttaagaggggactgactaatgtaaatggaatgcatatagaaattgaattctgagatctttaacatggttttcctcttatactcctacaaatggcttatttattcctctgtgtctgtaaggctgacctagggtcattatgtttctaatgttatacc

SEQ ID NO: 668669 - DNA, 1127 bp, Homo sapiens
aaaaaaggccagtcacggtggctcacgcctgtaatcccagcactttggaaggccgagacgggtggatcacaaggtcaggagattgagaccatcttggctaacacggtgaaaccccgtctctattaaaaatacaaaaaaatcagccgggcatggtggcgggcacctgtagtcccagctactcgggaggctgaggcaggagaatggcgtgaacctgggaggcggagcttgcagtgagctgagatcgcgccactgyactccagcctgggcgacagagcaagactccatctcaaaaaaaaaaaaaaaatcgaactttttttggcaagggtaaaatgatcaattaagtaattgaagaaaatcagtctgcccaaagttagatagcttctaggaacagaaaaagaatacagacaggtaaactggtccattgctttaagagcccaggtaagcagtaacagaggaggaaaccagacttttggcagcaggaatacaagtaaaggaactcttaggtaatattaatatatgtaagtatgcttgaatgcttaatagtgtttgtttcatatttaaacaaaactttccttattatcatcattacacaacgttatacagaccatgaactaagaattttaaaagtatttgaaagtttattttaattttccattgcactcaattatactcgttaaaattaccaataaaatattgaagctggatatttgttacctttaaagggtttattttttgacagtgaaatatgcataaatgaatgagctctaaaggtgactaaacaaatgcttcgtataggaagataatgtgcacaaataataaaatttgaaaaagcaattgagaatttgtttctataaacaggtatacaacagtggggcataaaaggtctggctaccgtggataatttagcaaccacaggaactaagatttgaaactttttgagatgcttaataaagagcattatgtgataattttactgaaaacattcaataaattcattccacaaacatttactaagcaaagctccaggaaagggcttagaaacagaatacagtaaagtctctggcttcacaatctagttggaaagagtgacagtaaaaatagatcattgcaacatagcatggtaagca

SEQ ID NO: 668670 - DNA, 857 bp, Homo sapiens
gctcataattttcacccctacacaattagaacagaaagatattttgtatctcttatgttcttcatcaataacaattgtttttagtagagaaatatcagatgtttccacattagatgacagaacttaagagacttttgctgctgttgacttctctgcagcgggcaaaaaccacatgggattgctttataccatttgtgtcttacatctcaaggaaccagggatgcagttggggaaacttgaaaagcaaattgaagatcaaaagacatttgaggagaaagttaaggtttttataggttgtatattataaatcatttcttctgagataatttttagccttttagaagtttcttttatttgaaagagtatttcctttatttatttattttgagataggctcttgctctgttgcccaggctggaatgcagtgtcacgatcatagcttattgcagccttgaactcctgagcttaagcaatcctcctacctcagcctccagagtagctgggactacagtcaggtgccaccatgcctggctaattttttaaacctttttagtaaagatgaggcctcactctgttgcccaggctattcttgaactcctgagctgaagtggtcctcccgcctcggactcccaaagtgctgggattacagacatgagccattgtgccaggccagtatttcctttaaatcgttgttttcaatttcttttcttaccagatttttttttttttaagaaaatgctggccaggtgcagkggctcacacctgtaacaccaacactttgagaggccaaggcaggaggattgcttgcacccaggagtttgagaccagcctgggcaacatagggagaggagaccctg

SEQ ID NO: 668671 - DNA, 669 bp, Homo sapiens
aaaagaaaagaaaaaaagtaatagtagtctgattctcataggtgagtaaaattaagctgagaaacaaaccatatttgcaattttcacacagggaaaaaaagctttagaagttttaatagggcacagataggtttctttccctttgaaatagattaagtttctacttaaacattcatagagttcaagctgatgagtggggaatgaaaagtgaagtttgtttttttttttttttggacagagtttcactstcgctacccaggctggagtgtagtggcactaatcttggctcactgcaacctccacctcctgggttcaagtgcttctcctgcttcagcttcccaagtagctgggattacaggaccacgccaccatgcccagctaattttttgtatttttagtagagacgggatttcatcatgttggccaggctggtctcaaactcctgacctcaggtgatccacccgcctcgggccaccaaagtgctgggattacatgtgtgagccaccacacctgaccgaaaagtgagtcttgatggtaaggttgtaaatcatttaatagaatttgaataatttggaagagattgggaaacagagctatactgacactttctatgctctttctagccccttgcccaaaaaattatttaggtttttagttttctggtggaaa

SEQ ID NO: 668672 - DNA, 963 bp, Homo sapiens
gctccagcagtcctcctgcctcagcctcccagtgttgagattacaggcatgagacaccgtgccttgccagctattgtatttggtacaatatatactgtctacatttgtagtctaggagcaataggctataccatactgcataagggtatagtaggctatactatctaggtttgtgtaagtgcattctatgatgtttgcagaattaaaagttgcctaaggacccatttcttagatggtatccacatcattaagcaatgcatggctaaagttgaaaactgctaagagcgtagattttaagtgttttcagaacaaaaaaaaattatgagtgtgtgaggtaatgcatattttctttaccttatttagccattccacaatatgtacgtatttcaaaacatcatgttgtacttaaaatatatacaagttttactgttcgattaaaaaatacaatatatctagaaaacaaaaacagcaacactgcttttaaaacgatatgtaatgatctctttgcataaaggaacattttaggctaaaataaaatgcatgctataccatttgctataaataaagcaatagaataaaatttgtgtaaatacctctgtctcagagaaaatattttatcagttttttytgactgcagaatatattataaaaacattttcagtaaatattttccacagaagaatatgagcaaattttgggggaatgaaaaaaaaaaaaaacatgatatttaattctgaaaaatatgtttcttttgccttttactctcatttttagggggtcacattagttctaactcaatagcaggcatcatttataaaaatgagttaaccaaatccaggtcttctttctcacccacaaaacacatgacttaaaaaaaatcaggctgggctggaggcggtgtctcacactggtaatcttggcactttgggaggcgaggtgagcggatttcctgaggtcaggggt

SEQ ID NO: 668673 - DNA, 651 bp, Homo sapiens
ggcagaggttgcagtgagccaagattatgccactgcactccagcctaggtgacacagcaagactccgtcttaaaaaagtaaatgcttcatggcttctgtggccaggctcttactaaaggctgcttacatgtgacacaaattacttatgaacacatttcatcagccaaagggtatccaatgcctagccttaaggggacaaaaagtacaatcctcccacatgcttggaaggagagactcagaacgtttgtgaatagtgctgaggatcaccaaaggcacccattccaattgacgttcaccccccgtgaggagtgcacacagcaaactctgaaccagagtctgagttcagctgcagctcttgctatacttaggagayggtaaaatcactgactttggaaattgaatctgtcatcctaattttgtaggtacctgctttgtaggccttacataaccttgtgggactagggaacccacacataactgagaagagatatgctgccatattcaaaatttcatttccaagacccaaagagtacacataccttggaatttgatccagaaaaataaaaaagaagaagtattttttactttctactatgtgtagtgaaacagtcacacctacatttaggagttgtcacagttcctgagcatctg

SEQ ID NO: 668674 - DNA, 643 bp, Homo sapiens
tgactccatttttcataaaaggatataaaaatggtttcagtgacttccaacatgacagaagctccccacagtggtggcagaattattccaaccttcctccttcagttctgtgggtcttttcattacgttttgaatggaatggattgaggtgtacttgtttctcaaatcacagaacactaccattaagtaatatcattgtgtcccaagaaataagtcatttttgtcaaaataaaaggaaaaacagatggtaataaacttatcttacttattccaagagctgtttcagcctagaagaagccggtaccacaaaggcaaagctgaggtctccttccttcccctccccttcccctttctcctccccsctcctctcctctgactcaccccccgcacccccgtgcagataattaatcatgacaacttcccaatgagccaggggaaggctcagaattctcagcgcagcaacttaagcagctagtcccaatgcttggagttagcccaggaaatgacaagtccactttaatagtctaaacattttgaccaggtaacacattaacaaggttacaaatcagaaaatgtaaaaaattatgatcaagatcttcctcctaccacattctccatctactcagattccttcatctccaaa

SEQ ID NO: 668675 - DNA, 660 bp, Homo sapiens
tggaggaggaaagacctttattggagcaaaagtttacctgttgcatcctttactttttaaaatctgttgtaaagaaaaatctgggcatacctgaacagaacattgattctaaatggttaaaaaggttatcaattgattacactacattgtgagggttttatgagttactttgaaaggtattaaaaactttatagatataaggaattattatttatcgctactcacagctctcttcacttgataatttactgcttagttagagatactggttggacatcttagagactrggaatttggtttctagaattgtgttaaaaagagcttccaaagtattttgcatcacttaatgaattaacagcaaaatcaaggaagtaccttttaaacaactcttccaagacctaaatattagtagttatttactaacagaaaaaagtttattcatatttatattactctccataatgctgattatggaattcagaagaaatcctggttgttgaaattctaggactagatatttaaaaattatctgcaagatgtagcgtttgttatttctcattttttctgatatatcattagcatcctacataagtgtgtacacatatttgattattttacaattttattttagattccctgcatcaactaagaaaagcctgt

SEQ ID NO: 668676 - DNA, 656 bp, Homo sapiens
taagacctattaagacagtttaacagactgatttcacttccctctttaattactcctttccttccttctttcccaaaagagtaaaagcaggtagaaccttttaaaaccttttgagctacaccccaggatgataaaggaaagagggttattaattttgccagaatcatrtatttcagggagaagatggaatttgagctattgggaagaagatgcattcttttagtcattcattcaagaaatggttgttgagtatgtgatacgtgcccattcacatgcgcaatgctggggacccatcaccgaagaagacaggccatgtccctgcccctactgagcttgtagcttaggaaaggcagatgacaggattatagtaaagcaagatgggtgttatcttagggtaagcacagggtgccactggagcatgcagcagtggcagcaaggtcacaacaggtgacaaaaggaaggtaagaggagtgccaggaaaggaggcagcctgagcaaggctgtgaagatcatgcagcatttgaaaatcgccccactccccttgccagtatgtgtagtagtcacttccttttaaaaaacgccaaataaaattaccatttgacttcattcttctgaagaaaacataattttagatgttatatatttaaatatttgta

SEQ ID NO: 668677 - DNA, 656 bp, Homo sapiens
taagacctattaagacagtttaacagactgatttcacttccctctttaattactcctttccttccttctttcccaaaagagtaaaagcaggtagaaccttttaaaaccttttgagctacaccccaggatgataaaggaaagagggttattaattttgccagaatcatatatttcagggmgaagatggaatttgagctattgggaagaagatgcattcttttagtcattcattcaagaaatggttgttgagtatgtgatacgtgcccattcacatgcgcaatgctggggacccatcaccgaagaagacaggccatgtccctgcccctactgagcttgtagcttaggaaaggcagatgacaggattatagtaaagcaagatgggtgttatcttagggtaagcacagggtgccactggagcatgcagcagtggcagcaaggtcacaacaggtgacaaaaggaaggtaagaggagtgccaggaaaggaggcagcctgagcaaggctgtgaagatcatgcagcatttgaaaatcgccccactccccttgccagtatgtgtagtagtcacttccttttaaaaaacgccaaataaaattaccatttgacttcattcttctgaagaaaacataattttagatgttatatatttaaatatttgta

SEQ ID NO: 668678 - DNA, 2499 bp, Homo sapiens
ggatcctgaaaggtgatgggctttggaaaaactgatgtgtcttacaaccagagagtttaatttgatcatgtccccccccaaatgttgccaacacctttctcggggggtacggctcgacattgcaggtctcaacgtatcctttgccggagcatccctcacatccctggcctaccaagctgccatgctggacgtgattactctactttgagcctacatccttcacacccatcaagcaaaaatgagagagatagtggataaatactttccagataattgggcaagtattgctaatttttttcctctacagtaaatgtgttagagaactaacttcccattcttttggcctttaacccacaggttgtaatgttgtaaataatgggacataacatcacttaggtaaacttgctctaactgtattgagaattttataattataacatgaaggaataaatgagtcagtaaaacttcctgaagaacccactagtctttttctaaaatggatactctcaagattaaatcatttattaaaatgtctcttgctttagctactgagattacaactaagttgtgtaagaatttatttattcttttccattttctgaatctaagatagccaaattcatctaatttgtcactttgtgaataggaatttcactttaataataaagttttacctataagctaactgtaatggggttactaaagtttatattattgcaaggatatgcttgtacctttgtaagcattgtttcatttaaaaatattcttataggaataaagcttgcttcataatatatatgaaatgaaatatatgaaaacaaagaggctttaacaaaatgcagggagttggattatattcgcatgtagcagattttgttctgcttctatatcggctgttgartcacataaactatcgttatgaggggccttcaatttattggtagtatgagaacagcctacattaggaagtggtggttcctggccaactgtgaatcatattagtgagctcagagttgagcagccaagaggaaaacactgatagtgtggcttcaggttcctaagtttaataaagaagttttgaccatgatactataattaaagacatatttattattaagaaagaccaaaatccaattacatgaaacctgtaagatacacacctgaaaaaataccctagcacagtgaaaatgaagggattttaaaaaaagatatcccaggcaattgccaaccaataaaacaactggtgagaaaacattaatattacacaatagagaatttcaaaaagcaacgttaataggtgtaaagagatctttatacctattaacgtgaattaacaatcaggaacacttacttaacaatcaggaacacttacctatatatttggaaaatcttggtttttcattggaatggaatttaaacatggagtgggtattgccttctataactttagtattcaaccctttgccttgaagtgagtaggaatttaacaaattctgaatgtctcctctttcaggtaattagtatttacatggggatcacagttaatctagtagatgcttgggaaccttacaaagctgcaaaaactgctttaaataataccctggacctttcaaatgtcagagaacaggtaggttctaatctggggacattctctgataactgcaggcctagtttatgaagtagcaaataagctaagtagatttcccaaggaatttggaagataatcacttagataatttaatgcaatgattaataaaaggtgaattttataggttagaataagataggtaattgtaggttttgttatatagtatatgtaaattgaagattaggatcccaaggaagagtcagtaccctaagacaaagaagcatggcatatgccccaaatgacttagtttacttttgcttaaagactatattctcatggccagagttggttgtaccaatagctggaattaatatgtttttataagtaggatgaatgatgaagatgataactgaatatggataatatgtcctgtcactgtaatttaaatttatcatttgtgttgtgctaaataagcaacaagactcaagacattcatcttaaaggttaaacggttatattctatctcttttgttcttacacaaggcagaagggaacatccaagtaagtagaggaataaagataaaatcttggggagcatacttgatatttctaaatggttatgttcctcatcctggctcagttactgagtttcctgtgtggataaaacaatattgactcaaaaaacttcatcatgttttattcaagtaaattgaattccataaataatgcacaaaataatttcaatgttggcacatctcctagaaatatattagagaaagtggcacttttatacttagcaacatcagatcattaatttttcattgctaaaatccctttctaaaattgcattttctcatttgtgacatttttaagaggtttcttgataccacagatttcaactaacttgatga

SEQ ID NO: 668679 - DNA, 607 bp, Homo sapiens
tagataatatgtagttcagcattgttgagtggaaatcaggacagacctaggctatctgactgaccaagcctgtatttctaatgataagtctgttctctggaatctattgaaacagaatggacagcttccttctgtctatccaggtagacaggaaacaagacagcataaaggagtaccacctcattagaggtcttcaggaaagctctggtaaaaagaaaaaaaaaatacccaatacaaattgctcaaagaaatgatacatttgaatttctgacatttcagctgggttctttaacctgtgcttcctctgtcctacttcccatcctgcacagttcatagagtcactttcygactatcctatagacacagtaattggacctgtgttttttctaatctttatatgacagcacatttcctaattcagggaccatcccctatcccaaattccatcctgtgagatgtgaaacctgtgagttcatgtgaatgagtgtttgaagggcttgacgccatgtagtctcttacgaaggcttcagggtgctcttatgttgttgctttgccattatcaaatggcattgattgatccgagggactcagaaagttagggtagact

SEQ ID NO: 668680 - DNA, 1755 bp, Homo sapiens
gctcaagccatctcctacctcagtctcccgagtagttggaactacaggagtgagccactatgcctcactaatttttgtatttttttgtagagacaaggtctcactttgttgcccatgctggtctcgaactcctggcctcaagcaatcctcctacctctcagcctcccaaagggtgggtatgataggcatcagccaccatgtttagcctgggcaggacaactttttagtgtgcaggatctgccatcctgtcctttgtagggtctttggcattcctgtttgttactgtcttattttgctagggctgccacaacaaaatactacagactgggtgatttaaataacagaaatttatttctaacaattccaaaagctggaaatctaaggtcaaggtgtgggcagatcttttttctcctttggcctctctccttggcttgcagatggccatcttctctcctcatgtggtctttcctctgcgcatgcatctcttcctcttcttttaaggacatcagtcatgttggattaggatccactcatatgacctcattcaaccttaattacctctttaaaggccctatgtccaaatataggcacactgggggttagggcgtcaacatatgaactttaggatacttgcccgtcaactcctgatagctccaaccaaggataacaaaaacagtcccacacattcacaagtgtctcctagcactttaagaggaattcctattctgaggttcaatgtgcagaatttccacatcttctttaaatagttacgaatacctgtgcacttgccaatttggctatcattttctgatgacaggcgaaacatttatctgagaaaagcgactttttaatggactctgggaaatccaacgcattacttacatcattagataaagctgacaatatttctctgttcagaggttgctagccctgaaacaatatactattaacaaaggcagaaagatttaaagtggrtatttatgtattgcctccctggatcgaatacattttttgacaagtgagtattataaaaatcaataacattctgttctgaaatctagtataaaaagaatttagtaaggaatttaaagggaggaagagtctcaggagaattaaaagatggcttccagatagaagaagaagacaaaggattaccctccagcagagttgcagttacgatattaaacacattaacctggacaggtgccgtggcttgcacctgggaggatcacttgagctcaagtttgaggctgcaataagctcaaactgggtgacagaacaagaccctctctctaataaatatacaaatgcatgaatgaataaacacattaaccaggaagtcatttgcatgtgatttccctattaatactcaccccatgtactgagtaggtacagtgttaagcacaatgctctaaacattccatatatactattgtttgatttaatattgtgaaagggcaattcaaatataaagatacttctgcagctcttcactcttcttcagcacgctcccccacccatcccaccatacacacctcttaattcaacatggagcagacagaggcatgtgcaagaaacaatggtaggtgacctaggaaagtgacagtggggatgctgagtaggggacttttttgaaagttatttaggaggtgatatctacagaatttggtgcgtggttgattatgggataagggaaaaagcatagtcaaaggcggtgcccaggttgtagtctcatgcagctcattgcctggggat

SEQ ID NO: 668681 - DNA, 1755 bp, Homo sapiens
gctcaagccatctcctacctcagtctcccgagtagttggaactacaggagtgagccactatgcctcactaatttttgtatttttttgtagagacaaggtctcactttgttgcccatgctggtctcgaactcctggcctcaagcaatcctcctacctctcagcctcccaaagggtgggtatgataggcatcagccaccatgtttagcctgggcaggacaactttttagtgtgcaggatctgccatcctgtcctttgtagggtctttggcattcctgtttgttactgtcttattttgctagggctgccacaacaaaatactacagactgggtgatttaaataacagaaatttatttctaacaattccaaaagctggaaatctaaggtcaaggtgtgggcagatcttttttctcctttggcctctctccttggcttgcagatggccatcttctctcctcatgtggtctttcctctgcgcatgcatctcttcctcttcttttaaggacatcagtcatgttggattaggatccactcatatgacctcattcaaccttaattacctctttaaaggccctatgtccaaatataggcacactgggggttagggcgtcaacatatgaactttaggatacttgcccgtcaactcctgatagctccaaccaaggataacaaaaacagtcccacacattcacaagtgtctcctagcactttaagaggaattcctattctgaggttcaatgtgcagaatttccacatcttctttaaatagttacgaatacctgtgcacttgccaatttggctatcattttctgatgacaggcgaaacatttatctgagaaaagcgactttttaatggactctgggaaatccaacgcattacttacatcattagataaagctgacaatatttctctgttcagaggttgctagccctgaaacaatatactattaacaaaggcagaaagatttaaagtgggtatttatgtattgcctccctggatcgaatacattttttgacaagtgagtattataaaaatcaataacattctgttctgaaatctagtataaaaagaatttagtaaggaatttaaagggaggaagagtctcaggagaattaaaagatggcttccagatagaagaagaagacaaaggattaccctccagcagagttgcagttaygatattaaacacattaacctggacaggtgccgtggcttgcacctgggaggatcacttgagctcaagtttgaggctgcaataagctcaaactgggtgacagaacaagaccctctctctaataaatatacaaatgcatgaatgaataaacacattaaccaggaagtcatttgcatgtgatttccctattaatactcaccccatgtactgagtaggtacagtgttaagcacaatgctctaaacattccatatatactattgtttgatttaatattgtgaaagggcaattcaaatataaagatacttctgcagctcttcactcttcttcagcacgctcccccacccatcccaccatacacacctcttaattcaacatggagcagacagaggcatgtgcaagaaacaatggtaggtgacctaggaaagtgacagtggggatgctgagtaggggacttttttgaaagttatttaggaggtgatatctacagaatttggtgcgtggttgattatgggataagggaaaaagcatagtcaaaggcggtgcccaggttgtagtctcatgcagctcattgcctggggat

SEQ ID NO: 668682 - DNA, 1439 bp, Homo sapiens
caggattatatctaaaacagcgtccacaggtgtatcaggtgataatattagttaagacataatgcttctcttagttgaaaaaaatgtagctgttgtttttattcatgaagtagtttctagaatgtcagtaatgaaacacttgttttgatctccagatatgagataaatccaatctacaaaccatattttatcgttgtgttccaaaggcctgacatgacactctacaaatttaatattaatcctcacctcttactctatatacagtgacatatttgccattaaaatttttaaatttgttactcagttgcattggatttggattgaaatgaaaaaggagatgatagttaacttacatggaattagaagattgaatttaaattagaaatttaataattcttaaattaataaargaactttatttgtaaaagtaatctgaaaacaaaacaaagcaaaaaaaaccttacactaaaaaacgaatttgctttgggctgggagaaaaatagtgagtagataaatggcataatttaacgttgttaaaactctagaaagctgagtttttgccaattatttccatttcttcccatttctaggcttttagtagatttgtactttctacctctctggtagttgagtaaggctatataaccagttctgatcaatgagtttctagtgtagctttcaaactggagcattcaattgtttgcacaggacctccaaagcaatatttctactctgacacaaaaatgagaaatatagaagatgattattgtccattagtctggatacttatagaaatatgttgagtaagatgatcttggtgatttggaaaatacatagcataaaaaagaaaatgatatatattcttttaaaacgtgaatattacaggttgttttttattgcaatataatttagtctatcctgatctatatacaaattgatgcctagaaataaggtgctacaattaaaaaaaagaccctaaaatgtgtggcactgccctaaaagtcaggctggaggtggtagagcaactgacactgaatggcagaaagatgaaaattcaattagtattattatcttaggcagcggcaaaacatttgataaaactgtagactgtgatgacttgcaaggcagataattcatcgagtgatatatatgattacacactacacacatataatgttacactataggagaagagttgggaaaatactgggatagtagcatgtattggttaatattggaagcattgacaaagtactacaagaacaataaaacgtcataagaaaagatcacctagtttgcaagcagaaaagtgagaaaacaaagtaaagaactgtatcttttttagctttgtaaaataattactacttatactcacccactaaaaatgcaatggcagtgaccactgagtaacaaaaacctatttgaatcatcatatggca

SEQ ID NO: 668683 - DNA, 1439 bp, Homo sapiens
caggattatatctaaaacagcgtccacaggtgtatcaggtgataatattagttaagacataatgcttctcttagttgaaaaaaatgtagctgttgtttttattcatgaagtagtttctagaatgtcagtaatgaaacacttgttttgatctccagatatgagataaatccaatctacaaaccatattttatcgttgtgttccaaaggcctgacatgacactctacaaatttaatattaatcctcacctcttactctatatacagtgacatatttgccattaaaatttttaaatttgttactcagttgcattggatttggattgaaatgaaaaaggagatgatagttaacttacatggaattagaagattgaatttaaattagaaatttaataattcttaaattaataaaggaactttatttgtaaaagtaatctgaaaacaaaacaaagcaaaaaaaaccttacactaaaaaacgaatttgctttgggctgggagaaaaatagtgagtagataaatggcataatttaacgttgttaaamctctagaaagctgagtttttgccaattatttccatttcttcccatttctaggcttttagtagatttgtactttctacctctctggtagttgagtaaggctatataaccagttctgatcaatgagtttctagtgtagctttcaaactggagcattcaattgtttgcacaggacctccaaagcaatatttctactctgacacaaaaatgagaaatatagaagatgattattgtccattagtctggatacttatagaaatatgttgagtaagatgatcttggtgatttggaaaatacatagcataaaaaagaaaatgatatatattcttttaaaacgtgaatattacaggttgttttttattgcaatataatttagtctatcctgatctatatacaaattgatgcctagaaataaggtgctacaattaaaaaaaagaccctaaaatgtgtggcactgccctaaaagtcaggctggaggtggtagagcaactgacactgaatggcagaaagatgaaaattcaattagtattattatcttaggcagcggcaaaacatttgataaaactgtagactgtgatgacttgcaaggcagataattcatcgagtgatatatatgattacacactacacacatataatgttacactataggagaagagttgggaaaatactgggatagtagcatgtattggttaatattggaagcattgacaaagtactacaagaacaataaaacgtcataagaaaagatcacctagtttgcaagcagaaaagtgagaaaacaaagtaaagaactgtatcttttttagctttgtaaaataattactacttatactcacccactaaaaatgcaatggcagtgaccactgagtaacaaaaacctatttgaatcatcatatggca

SEQ ID NO: 668684 - DNA, 684 bp, Homo sapiens
gattcaaattaatcaataatatgtgttctgtgtacacaatagataattatacaccgatgaatatgaatgacttttattataaattattaaggacatatttcctaaacataattttgaatgcaataagccaggcaaaaataaatttatacaatgtataatctgtttatatgaaatacaaaagtaaaaaaatgtgaaatttgcttatgcaattagaaattttgagagtggttattctttcatgggagtgactagaagggagcacaagggaagagggctttacttgtaatttcttgcaattctttctcatagttttccaaaatgtaattctttaaggcagcacacatttaatttcttgcaatttctgtaggtcgggaactgggaataacttagctgggtatcttgattcaktgtttctcacaagactgaaataagggggttgtctagggatgctctcgcctcaatgctcaactgtgaaaagattcactccttagctcacacatatggttgttggcaggattcagttccttgcacattattgaactgagaactcaaattccttgctggctgttggtcagaggctcacctgagtttcttacaatgggagcctctcctacacaacagcatgctgaatcaaaaccagtgagagagagagagtgttagcaagatgagagtcataatcttttg

SEQ ID NO: 668685 - DNA, 684 bp, Homo sapiens
gattcaaattaatcaataatatgtgttctgtgtacacaatagataattatacaccgatgaatatgaatgacttttattataaattattaaggacatatttcctaaacataattttgaatgcaataagccaggcaaaaataaatttatacaatgtataatctgtttatatgaaatacaaaagtaaaaaaatgtgaaatttgcttatgcaattagaaattttgagagtggttattctttcatgggagtgactagaagggagcacaagggaagagggctttacttgtaatttcttgcaattctttctcatagttttccaaaatgtaattctttaaggcagcacacatttaatttcttgcaatttctgtaggtcgggaactgggaataacttagctgggtatcttgattcattgtttctcacaagactgaaataagggggttgtctagggatgctctcgcctcaatgctcaactgtgaaaagattcactccttagctcacacatatggttgttggcaggattcagttccttgcacrttattgaactgagaactcaaattccttgctggctgttggtcagaggctcacctgagtttcttacaatgggagcctctcctacacaacagcatgctgaatcaaaaccagtgagagagagagagtgttagcaagatgagagtcataatcttttg

SEQ ID NO: 668686 - DNA, 1425 bp, Homo sapiens
ggaaattaaatgtatgtaaatgaaactaacattgttttcaaagaaagcaaatatatatttatatatatatacctttagcatcaattatagtaagcatatatatatgtatatatgaagaaatgtctcactacacacctatcaagataactaagataatacatagtgatatgacatagtgatggtgaggatacaaactggattactccatattgctgactggaatgtaaaatggcacaaccattctggaaaacaatttggcagttttttaaaacactttgcatgccataattttgtgactcagcaattacacctctggccrtttatcccagatgattaaaaactttcattcacacaaaacctgtacatgaatgttcaaagcagctttattcgtaataaccaagaagcagaattgtcctgatgtccttcagagcaagaatggttaaacaaaccgtggtccatacatactatagaataatactcaataatttaaaaaataaattattcatgtacacatctgggtgaatctccagggaattaagctgagtgattaaagtcaatagaaaggtaatatactatatgattcaatttgtataacattttcaaaaatgaaggaaattttgtgtagaggacaaattagtcattgtcagaagttagagaagggaccagtcagggggactagagagactagagagaagcaggcatggttacaaaacagcaacattgactgtggtaatgaattgggagcctacacatatgatatagaaaattctgtagaatgtaacactcacacacacatatagacaaatgagtataagtataattggggaaatctgaataaaatgggtggatcatctttaggtgaatatactttttatgatatcacactgttgttttacaaaatattagaattgggaaaagctgggcaaagcatataatggaactctctgtttcttcttagagctgtatgtcatctataattttatcaataaaattttccatttaaaaatttaaaaatagaaatgcaggcatagtttcctgttaaagtcagctgtgtgaaatatatcatcataatttaggagagagagtgcaaagtcatgtgagagcacatgtgtgtgcatgcatgcattcacacagagggaggtgcaagagttgcataactcttcctatatgtacaatataggatgttaaacaataatacataaaactataatatatttaagatacatgtaagcatgttacataaaaatatgaaagtaaataccaccaatgagatttaaaggagttaaaagtgcttgtccctagaaaaggggaatctgggccagaatattgctgtgttgttttaagctccatgttattttaattttaaaatatgtacacaaattattgcattttgttaacattagaagttaataaattaaaaacata

SEQ ID NO: 668687 - DNA, 598 bp, Homo sapiens
ataaatataggattatccaagttttctaattcttcttatgtcaatatcaggaagttgtattttttcaagtgcattatttttgtaaataaattatctccataaagttgtccaaaatatccactcagtatcccttcaatgtttataggttttgtgttcctgaatgcttatatctgacattgttaaataccaattggtaattggtgatgccttctctccatgttattagttcagaataacctcgatttcaaagactggcaaggacttcacacaaaagttaaataatarcaaaatccctcttgtaaacataagcacaaaaattgtaaacaatattgtagcaaaacaaatctagaaatatataaaatatagataatataaaatttatttattctaagagcttatgttttatgtaattatcaaaacaatataattaatttaccatattaacaaaataaagcagaaaatgatattatttaaaaagcataatgtaagcatttcataatatttaacatatatccatgattttaaaaaatattttagtaaagtaggaataaaatgagctttccttaatctgataaaagatatattttaaaatgtacag

SEQ ID NO: 668688 - DNA, 598 bp, Homo sapiens
ataaatataggattatccaagttttctaattcttcttatgtcaatatcaggaagttgtattttttcaagtgcattatttttgtaaataaattatctccataaagttgtccaaaatatccactcagtatcccttcaatgtttataggttttgtgttcctgaatgcttatatctgacattgttaaataccaattggtaattggtgatgccttctctccatgttattagttcagaataacctcgatttcaaagactggcaaggacttcacacaaaagttaaataataacaaaatccctcttgtaaacataagcacaaaaattgtaaacaatattgtagcaaaacaaatctagaaatrtataaaatatagataatataaaatttatttattctaagagcttatgttttatgtaattatcaaaacaatataattaatttaccatattaacaaaataaagcagaaaatgatattatttaaaaagcataatgtaagcatttcataatatttaacatatatccatgattttaaaaaatattttagtaaagtaggaataaaatgagctttccttaatctgataaaagatatattttaaaatgtacag

SEQ ID NO: 668689 - DNA, 598 bp, Homo sapiens
ataaatataggattatccaagttttctaattcttcttatgtcaatatcaggaagttgtattttttcaagtgcattatttttgtaaataaattatctccataaagttgtccaaaatatccactcagtatcccttcaatgtttataggttttgtgttcctgaatgcttatatctgacattgttaaataccaattggtaattggtgatgccttctctccatgttattagttcagaataacctcgatttcaaagactggcaaggacttcacacaaaagttaaataataacaaaatccctcttgtaaacataagcacaaaaattgtaaacaatattgtagcaaaacaaatctagaaatatataaaatatagataatataaaatttatttattctaagagcttatgttttatgtaattatcaaaacaatataattaatttaccatattaacaaaataaagcagaaaatgatattatttaaaaagcataatgtaagcatttcataatatttaacatatatccatgattttaaaaaatattttagtaaagtaggaataaaatgagctttccttaatctgataaargatatattttaaaatgtacag

SEQ ID NO: 668690 - DNA, 631 bp, Homo sapiens
tgactgacatcaacagagagaaaggtgttgactgcaacattgacgttctcaaaactatccagatggtgcagtctcagaagtcagggatggtccagacagaaacacagtaccgatttatctatatggcggtccagcattatactgaaacactacagcgcaggattgaagaagagcagaaaagcaagaggaaaggtcatgaatatacaaatattaagtattctctagcggaccagacgagtggagatcagagcccccccccccgccttgtactccaactccaygctgtgcagaaatgagagcagacagtgctagagtgtatgaaaacgtgggcctgatgcaacagcagaagagtttcagatgagaaaatctgccaaaacttcagcacaaaaatagatgtggacttcactctctccctaaaaagatcaaactttcgcaagaaagtttatgtgaagaccaaatttggatttggaaggcttgcattgtggttgactaccttttgataagcaaaatttgaaaccatttaaagatcactgtattttaactcaacaatacctgcttcccaattactcatttcctcagataagaagaaatcatctctactatgtagacattatattttatagaattttgt

SEQ ID NO: 668691 - DNA, 1354 bp, Homo sapiens
tcccttgagcccaggagtatgaggctgcagtgagctatgatcatgctactgcactgtagcctagccaacagagcaagactctgtctctgaaaaaaaatccaaagaatgttattcttttcaatattattgtaaatgaaattagtttcttaattttaatttttggattgttattgttaatatatagaaatatcatttttatactttttatattttataatgtttcaatagttaaacagtatttgtgaatacttcatactttctagataaatcccgtttttgacagtagtgaacaatggaatacgagtttgtttgaattttgactgatagcctaggcagtttgtcacggactggcttctctggaatgagacactgagatatagttgggataaagtatttttttttttttttttagaatttataccagtgaaaaggagggaggaacaggactgggatgaaataaggtgaacagcagtgcatgacagagaaatgctgaccattccaatagaaggctctgaagtgaatattcccattcaaatattctgtgttgtcaggctgaaatgatcaggccttcatacattcaccttactcagtcacaggctgtgggttacccaggaaggacatcacttaacttcttggagctgaaaagtcagtcattcattgaaagtgaaaatgggcagcacaccttcatgtctatccatgtaattttacataattattcactgaaagtttgaaaaaagatgaagttgctcgctgcctgaaagtggaagccatgttcataatactgtccttgagttacatactttttactaccaacccatgtaataaattattgctccattagaagcagagctagtaccttgcatgtagtttcatgaagataatccagaatttgttgtggcatgttttagggccttttcagtttttagcatagccttagcctctgtaagccataattttatgtaaaggttagaaaaaataattcattcaattactattggagttttttggtttgtttgttcaaaaaaagtttaattcattgactactttgtgtcttcaatgctttaactttaccaaggaaacattctaaaaggtaaaaagattattacatacgttaggaaattctcattggataaagtgctttctgaaagtgagaaaattatttttagaagtttctttttatcctttagtcttacctyactttttgttgtactcaggaaacagttttctcagtggatagaataagttcacacaagtcccacaaagtgctaaataagcccctgcctatgtattatttataaagaaaatctggccctatgtggttttttcatcaacattttcattctatttcaaccct

SEQ ID NO: 668692 - DNA, 619 bp, Homo sapiens
gaaaatatgttaatatgtaattatccagatatattatttaaggaaattacattaatgttaaagtcagacttcaaatacatgttacattgattaatattactttgagctacagcctctgacaccagggaaacaggcacactattctcattgcacatctaaaatcaaagttcctgaagtaaattttacatacctgtctgtagtattgagaggtgacagcgtgctggcagtcctcacagccttcgcttgctctcggcgcctcctctgcctggcctcccactttggcrgcacttgaggagcccttcagctcaccactgcactatgggagccgctttctgggctggccaaggcaggagccggctccctcagcttgcagggagatgtggagggagaggcgcgagcgggaaccggggctgcgtacggcgcttgcgggctagctggagttccgggtgggcgtggttgtggtgggccccgcactccgagcggccggccggctctgccagccccgggcagtgaggggcttagcacccaggccagcggctgcggagggtgtactgggtcccccagcagtgccagcccaccggcgctgcgctcaatttctcgccgagccttagctgccttc

SEQ ID NO: 668693 - DNA, 1382 bp, Homo sapiens
aataaaatcaacatattttgttagcaagaatattggttgagtaactaaacttctaaagtagacatagttaaaagaacgatcttaattgttattttagataaaatgaaacataaatgtgcttctattgactttaaaagagttaagaatgtgaatatgccataatttacagaaaaattatagwactgttattattgctctaattttcatcaattttttgctattgcctaaataatgttgtaatgagaaactttgtacttaatattttgccttcattctgattatttccctttacctattcatagaaggcaaattaatgtttcaaatcacatttaaatgttccatcttagatattgtgtaaaattagtttttcagaaacattgaatttatttcttcatcaacaatgtaaaatatttaaaatcttatagctcaagtcagaaaggaatatttttggttacttcaacttattgacgaattcaacttaattgattttaaaataaaatattcttatttaatttaattgattttaaatattacaaagcttgattatatattatatataatatataatatgaaatcagtagcctacatacatatgcatgcacacttattctgcaaattgcttatatactttatttttcttttgttgactttttctcttatgaatattggaaacctatacacattaaaaatgaactttttgtaatatgtactgtaaatatttcccagtttattttttatttgcttttatggcacttaatttacagtttaatattatttgtatacaaatgtatatatttttcttgttttccaattacacatatgttccacaatgatccaacataatctgtatttttccacttatctctctgacataagcaagtttcttctgtcaatcttcatttcttaatatgtaaaagggagtgaaaaatgtatttactccactgaataccaatgagaattacttagacaaaaccaagcttaatttaaaaatcaaaaataattattaaatcactataatcctgctagttgggtaaaatattgaaaaatcgatttatttgtttatgttaaacattttaattgtttatgttaattattttaggttgattataataatttttctaatttttaaatatttagtttgaaaaatctaaagaaaatatgcttcagagcataaaattagtgtctaatgaaagcatctttgtgaacacaatgctggattattttattggttaattttaaattatgtcagttatcaatgtgttgttagatggcttctgcttattcaaatcatgtagtttctagatataaaactaacccctcagtttgagttagattccctatgccaaaaagcctaatttattttttctagctttaggaaaaaa

SEQ ID NO: 668694 - DNA, 1382 bp, Homo sapiens
aataaaatcaacatattttgttagcaagaatattggttgagtaactaaacttctaaagtagacatagttaaaagaacgatcttaattgttattttagataaaatgaaacataaatgtgcttctattgactttaaaagagttaagaatgtgaatatgccataatttacagaaaaattatagtactgttattattgctctaattttcatcaattttttgctattgcctaaataatgttgtaatgagaaactttgtacttaatattttgccttcattctgattatttccctttacctattcatagaaggcaaattaatgtttcaaatcacatttaaatgttccatcttagatattgtgtaaaattagtttttcagaaacattgaatttatttcttcatcaacaatgtaaaatatttaaaatcttatagctcaagtcagaaaggaatatttttggttacttcaacttattgacgaattcaacttaattgattttaaaataaaatattcttatttaatttaattgattttaaatattacaaagcttgattatatattatatataatatataatatgaaatcagtagcctacatacatatgcatgcacacttattctgcaaattgcttatatactttatttttcttttgttgactttttctcttatgaatattggaaacctatacacattaaaaatgaactttttgtaatatgtactgtaaatatttcccagtttattttttatttgcttttatggcacttaatttacagtttaatattatttgtatacaaatgtatatatttttcttgttttccaattacacatatgttccacaatgatccaacataatctgtatttttccacttatctctctgacataagcaagtttcttctgtcaatcttcatttcttaatatgtaaaagggagtgaaaaatgtatttactccactgaataccaatgagaattacttagacaaaaccaagcttaatttaaaaatcaraaataattattaaatcactataatcctgctagttgggtaaaatattgaaaaatcgatttatttgtttatgttaaacattttaattgtttatgttaattattttaggttgattataataatttttctaatttttaaatatttagtttgaaaaatctaaagaaaatatgcttcagagcataaaattagtgtctaatgaaagcatctttgtgaacacaatgctggattattttattggttaattttaaattatgtcagttatcaatgtgttgttagatggcttctgcttattcaaatcatgtagtttctagatataaaactaacccctcagtttgagttagattccctatgccaaaaagcctaatttattttttctagctttaggaaaaaa

SEQ ID NO: 668695 - DNA, 1382 bp, Homo sapiens
aataaaatcaacatattttgttagcaagaatattggttgagtaactaaacttctaaagtagacatagttaaaagaacgatcttaattgttattttagataaaatgaaacataaatgtgcttctattgactttaaaagagttaagaatgtgaatatgccataatttacagaaaaattatagtactgttattattgctctaattttcatcaattttttgctattgcctaaataatgttgtaatgagaaactttgtacttaatattttgccttcattctgattatttccctttacctattcatagaaggcaaattaatgtttcaaatcacatttaaatgttccatcttagatattgtgtaaaattagtttttcagaaacattgaatttatttcttcatcaacaatgtaaaatatttaaaatcttatagctcaagtcagaaaggaatatttttggttacttcaacttattgacgaattcaacttaattgattttaaaataaaatattcttatttaatttaattgattttaaatattacaaagcttgattatatattatatataatatataatatgaaatcagtagcctacatacatatgcatgcacacttattctgcaaattgcttatatactttatttttcttttgttgactttttctcttatgaatattggaaacctatacacattaaaaatgaactttttgtaatatgtactgtaaatatttcccagtttattttttatttgcttttatggcacttaatttacagtttaatattatttgtatacaaatgtatatatttttcttgttttccaattacacatatgttccacaatgatccaacataatctgtatttttccacttatctctctgacataagcaagtttcttctgtcaatcttcatttcttaatatgtaaaagggagtgaaaaatgtatttactccactgaataccaatgagaattacttagacaaaaccaagcttaatttaaaaatcaaaaataattattaaatcactataatcctgctagttgggtaaaatattgaaaaatcgatttatttgtttatgttaaacattttaattgtttatgttaattattttaggttgattataataatttttctaatttttaaatatttagtttgaaaaatctaaasaaaatatgcttcagagcataaaattagtgtctaatgaaagcatctttgtgaacacaatgctggattattttattggttaattttaaattatgtcagttatcaatgtgttgttagatggcttctgcttattcaaatcatgtagtttctagatataaaactaacccctcagtttgagttagattccctatgccaaaaagcctaatttattttttctagctttaggaaaaaa

SEQ ID NO: 668696 - DNA, 1382 bp, Homo sapiens
aataaaatcaacatattttgttagcaagaatattggttgagtaactaaacttctaaagtagacatagttaaaagaacgatcttaattgttattttagataaaatgaaacataaatgtgcttctattgactttaaaagagttaagaatgtgaatatgccataatttacagaaaaattatagtactgttattattgctctaattttcatcaattttttgctattgcctaaataatgttgtaatgagaaactttgtacttaatattttgccttcattctgattatttccctttacctattcatagaaggcaaattaatgtttcaaatcacatttaaatgttccatcttagatattgtgtaaaattagtttttcagaaacattgaatttatttcttcatcaacaatgtaaaatatttaaaatcttatagctcaagtcagaaaggaatatttttggttacttcaacttattgacgaattcaacttaattgattttaaaataaaatattcttatttaatttaattgattttaaatattacaaagcttgattatatattatatataatatataatatgaaatcagtagcctacatacatatgcatgcacacttattctgcaaattgcttatatactttatttttcttttgttgactttttctcttatgaatattggaaacctatacacattaaaaatgaactttttgtaatatgtactgtaaatatttcccagtttattttttatttgcttttatggcacttaatttacagtttaatattatttgtatacaaatgtatatatttttcttgttttccaattacacatatgttccacaatgatccaacataatctgtatttttccacttatctctctgacataagcaagtttcttctgtcaatcttcatttcttaatatgtaaaagggagtgaaaaatgtatttactccactgaataccaatgagaattacttagacaaaaccaagcttaatttaaaaatcaaaaataattattaaatcactataatcctgctagttgggtaaaatattgaaaaatcgatttatttgtttatgttaaacattttaattgtttatgttaattattttaggttgattataataatttttctaatttttaaatatttagtttgaaaaatctaaagaaaatatgcttcagagcataaaattagtgtctaatgaaagcrtctttgtgaacacaatgctggattattttattggttaattttaaattatgtcagttatcaatgtgttgttagatggcttctgcttattcaaatcatgtagtttctagatataaaactaacccctcagtttgagttagattccctatgccaaaaagcctaatttattttttctagctttaggaaaaaa

SEQ ID NO: 668697 - DNA, 1123 bp, Homo sapiens
tatatatacatattaaaaatgtaaatatatatatatatatatcccataatcttactgtgatgcttcctctacattgttgcataggtggagagagagtgctcaataactatttgttaacaataaatttgcctatactttgaattctttttttttttttaagagggagtttygctcttgttgcccaggctacagtgcaatggcatgatcttggctcactgcaacctccgcctcccgggttcaagcgattttcctgcctcagcctcccaagtagctgggattacaggcatgtgcaaacatgcccagctaattttgtatttttagtagagatggggtttctccatattggtcagactggtctcaaactcccgacctcaggtgatctgccagcctcggcctcccaaagtgctgggattagagacatgagccactgtgcctggtctacttcaaatatttttataagatgactttgtttggctaaaactaaggttatgtttcacaaaattagaatcaagcttacatgtaaatagacttaatgtccagcaaaaatagaggggattcatcattatacattaattcctcccttgactttttaattcatcacagggagcttaaatgttagctgggtcaaactatgtcatgaattagaaagtctaattgtcatgaataattccataaatttctgatagtcttccaatatgacatatgaaagaatactatttctcttaaaaataacactgaggtgaagcccatctttgtgcaatgataaaatttcattgtaagcatgcaaattcaacccatccagaatatctacttagaatttttacatcctctcttcacattctcaaaatattaatagtaagtatctgttatgatttactattagttaattttgcaacactttgaggtcagtttagagatggtaacttagtccaatattttatacaactccatacatacgcatcataacttaaataattgtcaggttatcaagtttatagcataggaatttgattacttttattcaaaaaaacacatcaataaatatgaatagattgtctatgaattatataatcacttacttaatgtgtttagccaatagttggtgaaacctttattatattca

SEQ ID NO: 668698 - DNA, 1123 bp, Homo sapiens
tatatatacatattaaaaatgtaaatatatatatatatatatcccataatcttactgtgatgcttcctctacattgttgcataggtggagagagagtgctcaataactatttgttaacaataaatttgcctatactttgaattctttttttttttttaagagggagttttgctcttgttgcccaggctacagtgcaatggcatgatcttggctcactgcaacctccgcctcccgggttcaagcgattttcctgcctcagcctcccaagtagctgggattacaggcatgtgcaaacatgcccagctaattttgtatttttagtagagatggggtttctccatattggtcagactkgtctcaaactcccgacctcaggtgatctgccagcctcggcctcccaaagtgctgggattagagacatgagccactgtgcctggtctacttcaaatatttttataagatgactttgtttggctaaaactaaggttatgtttcacaaaattagaatcaagcttacatgtaaatagacttaatgtccagcaaaaatagaggggattcatcattatacattaattcctcccttgactttttaattcatcacagggagcttaaatgttagctgggtcaaactatgtcatgaattagaaagtctaattgtcatgaataattccataaatttctgatagtcttccaatatgacatatgaaagaatactatttctcttaaaaataacactgaggtgaagcccatctttgtgcaatgataaaatttcattgtaagcatgcaaattcaacccatccagaatatctacttagaatttttacatcctctcttcacattctcaaaatattaatagtaagtatctgttatgatttactattagttaattttgcaacactttgaggtcagtttagagatggtaacttagtccaatattttatacaactccatacatacgcatcataacttaaataattgtcaggttatcaagtttatagcataggaatttgattacttttattcaaaaaaacacatcaataaatatgaatagattgtctatgaattatataatcacttacttaatgtgtttagccaatagttggtgaaacctttattatattca

SEQ ID NO: 668699 - DNA, 1123 bp, Homo sapiens
tatatatacatattaaaaatgtaaatatatatatatatatatcccataatcttactgtgatgcttcctctacattgttgcataggtggagagagagtgctcaataactatttgttaacaataaatttgcctatactttgaattctttttttttttttaagagggagttttgctcttgttgcccaggctacagtgcaatggcatgatcttggctcactgcaacctccgcctcccgggttcaagcgattttcctgcctcagcctcccaagtagctgggattacaggcatgtgcaaacatgcccagctaattttgtatttttagtagagatggggtttctccatattggtcagactggtctcraactcccgacctcaggtgatctgccagcctcggcctcccaaagtgctgggattagagacatgagccactgtgcctggtctacttcaaatatttttataagatgactttgtttggctaaaactaaggttatgtttcacaaaattagaatcaagcttacatgtaaatagacttaatgtccagcaaaaatagaggggattcatcattatacattaattcctcccttgactttttaattcatcacagggagcttaaatgttagctgggtcaaactatgtcatgaattagaaagtctaattgtcatgaataattccataaatttctgatagtcttccaatatgacatatgaaagaatactatttctcttaaaaataacactgaggtgaagcccatctttgtgcaatgataaaatttcattgtaagcatgcaaattcaacccatccagaatatctacttagaatttttacatcctctcttcacattctcaaaatattaatagtaagtatctgttatgatttactattagttaattttgcaacactttgaggtcagtttagagatggtaacttagtccaatattttatacaactccatacatacgcatcataacttaaataattgtcaggttatcaagtttatagcataggaatttgattacttttattcaaaaaaacacatcaataaatatgaatagattgtctatgaattatataatcacttacttaatgtgtttagccaatagttggtgaaacctttattatattca

SEQ ID NO: 668700 - DNA, 2779 bp, Homo sapiens
taaatagatttatggaagtaatgtttggcaaaatatttaataggctaatagtaataaattttataagaaaagcatgacttggagatttccatacattaattacttttaggaaagagcgagagtttgaattgtgtaatgttaaacaaaatgttattgatcaagtcattgctataattcagatttcaataagtataatacataagttgattttaattatgcattcaattttttctttattaatttattccatcaattatttattcaatcacagcattagcaaatttgctagtctatgtcagtatgctggtatatatgattgtacgtgtgtgcatgcgtgtgtgcatatgcataacacctgtagtatatttctatacattcaacagttgcagatgaaatctaaactagtataaattatactgtaaaatttactgtaaaaaacactgtaaaatttaccatctactagtaaatgcccaagaaaatgcatttttattcggctcagcttaaacacagacayaaacatttagcaagctttgtgcttaatgaataagtgaaacatagacacttatagagaatatttatttgcaaataaccagaaatctattgaagaaaatatagttttaaattcttttgaataaatctaccaaaacatttattaatcttgggttggaatgcttttattcatatatatgatgaagaaaaacagtatacaaatacgaaattatagaacacaacactaatcagatttaataactaaactattaagcatatctatatatctacctatctacacacacacacacacacacacacacacacacacatataaagataaacagaaagagcaaggtaaaaattaggaaaacatcatcaacaacaacaaaaaaaatgaaacaaacctacaaaatatcagatggaaaactgaaactgaaaatagaaattaataaattagtaaacaatagagattttaagtatcttactctgaaaaaaatcaagcagatctatttgatttaccttaaagtaaaacagaaaacacaatattcaagtacatgctattaagaattaaatgttatgtaattctataccaagaagatatgaatatttactcaaatctataataattaaattcagaactcaaagaactctatttttttctcagaaaataaaatggaaaaaaccagttcaacatttggcctgaaatgaagtgatagaaacctttgaaggaaatgataaaaaattgcaataattttttttttttttatgagttggaatctcactctgttacccaggctggagtgcagtggcgcgatctcagctcactgcaacctccatctcctggactcaagtgattctcctgcatcagcctccccaataggtgggataacaggtgcctgccaccacacctggctagttttgttttttaatagagacggggtttcaccatgttgtccaggcaggtgcaataaactgtttttatgactttgcattgttatggtagtttttagtaatggtaaaaaagatatttgtatatattcaaacccatcaaatcatacttccaaaacatcatgtttgcttacaaaatatgctttaatgtaagaccaaggttattctgcatagcatgacagcatacccactaaaatattctcccttctctaattctcactaaaacaacaaaatattttatacaaattttaaatcttgacattttcaatattaaacatgtaaacttttattaaatctttatatactagtgccatagtatatagtatattttaataccttttttcttactatgcagatgtaatttttactacatattattattatgtagtatgggtgcaccttagtctgctagcctatgttctatcttctgggtcagcagcttacttttcacttgtattcattctatctaggatttatcataacaagtattgtttctgttatcagttaagatatcctcagctctgaaaaagagaaactggctcaatgatgcctccaaatgttcatttctttttttttgtcatattgtttatttgtttgatatttgatcatttatttctgctttgttttgctgtgttttactcttgttttgtatgattttaagcttgctttcccttgtggttttagaatggcagtcagcagagtttggaactaaatgcttttgtttcaagtccagaagaaatgagagggaaaacaaatgagcaagacaaaaaaaaaaaaaagtaagcataaaagtcacccaaatatgcctgaagcatgagttgtgaagcctcccactgaatcaaagtgcaaagatttaagcagctttactagaaaaattcccagtcagaacttttttaagaaaaaattattctttttgtttcaggaataagatgtcaccttatttctctgattatattaattgtattcattttaatgttttagcctctatttttatggtatttctttaaaatgttgatgctactttttaatttttatcattatttttctctccaaaatatattgatttgtttaataatgacctctgtgtaatctctttgtagttccattttctcatcggttgtcttctactgttgtttccacaattcaccattggggttttccttctgccaggcttcttgtgagtttgtaaagcatagaaaaatccctttatgaggtgcaccttagtctgctagcttttgagggtattcactcctcattcctactgaaagtggacttccagggaagagttatttcttaataatacaatatgccatattcagtgtgctcttctggaggtagc

SEQ ID NO: 668701 - DNA, 1922 bp, Homo sapiens
agctcaaagcatcaagtcatgttcaggtttgtgttgctttcccattaaaagaggaggggttttgtgttttccagaaggcaagggcaagaaaatttagataacagagggggttcttgaattctcttactatttcaataaaataagcttctgattaaaaatattgtgaaaagtgaaacattttcattgaggtcttcagcacttcaatgctgaaaagtaataatagaggaatatttgggtcatctaaaagaaaataaaatggatgaatatggaagaagaaagttgaaaagcaggcagaagaataaaagaaggaaatgaacactttccagtcacttatttgaattctaacattgcctaacatagaactctgccaaaaagagggtwaaaagacaacaatactacaatgttgaaattaccacccatggagatatttgagccccccacccccccatagctctttcagttgtccagatttcaaggtacatgttaattgtgcttttgatctacagcagcagcattttaccctgtcttttacttctggactaacactcacatgtaaatttattctcatgaccccctgggactgagaaagatggaatgtttttgtaaaagacaacagagtaagcatgtgcaaagttgtacctccctgcattatttatttatttatttatttgatgtactgacagtctgctggcaatgtgatttttgggtctagccagaaacaaagactacaaagccatacaagcatccaacccacaaggatttgagaactggctctgtttctaacaccacactcagttacaaggtaaattccaccaatgccacttgtgtgctaaatctcacatcaaatgagaaaaagattccagaaattagggccaagggagccttgagagtgagccttcctgggcaacttgtgtgggaagaatgggtcataacaggaagagagtgggtcatcaaaggaaggagtcggaccaaaatccacagaaatcccagtgggcaaatatatggcatgcactccaccacacccccaacctcctcttatggctgacattactagctgatcacagctctcttccactccagctcaggaaatgcttctcaataagcagtccaaacagccaaaacaaatcatttggagttggctctcaatatgaaacttcattgccatgttggatcctgagctgtggttaagggactggaagatgaacagtcattcaactggacacaggctgttgacccttcttttcagggcaggtgagcctcagagcaaaggaaataaatatcctggtcagctgttcccttcaagattcttatgtttttgtacagctaaaatgaataggaatcaaattgaagctactccaggtccacaatgtggtagtgagctagggccatgtagagctgtcaatcggttctaaactggatattagaagacctgaattttaatcttcattctttcactaattgtgtaactttagaccaggctcttaattttgttgggtctaatttcccatctgtaaaaattgggaaaaggttgatttggactatgtgaatttttaagttccttctaaccctaaatttccatgactcaaagaaattgcctacttggaaaataatacctcatttcagcaacaggttgtttctggttagaaaaggttctttcaaagaagaacaaatagaatcaaagaagaactgaaagactatcaaattcaacgtggtggaaatagtagcttataaaagtgcaggctaatcaaagtcttcattgcacagagataaagaatacagaccctggaatcagatcccctgagttccaggccaactgagccactttatttatatgatctgtgtatttgttatctctttccccataacaaattacctgcaagaattcacagtttaaaatgacaaacatttattatctgtggggt

SEQ ID NO: 668702 - DNA, 1922 bp, Homo sapiens
agctcaaagcatcaagtcatgttcaggtttgtgttgctttcccattaaaagaggaggggttttgtgttttccagaaggcaagggcaagaaaatttagataacagagggggttcttgaattctcttactatttcaataaaataagcttctgattaaaaatattgtgaaaagtgaaacattttcattgaggtcttcagcacttcaatgctgaaaagtaataatagaggaatatttgggtcatctaaaagaaaataaaatggatgaatatggaagaagaaagttgaaaagcaggcagaagaataaaagaaggaaatgaacactttccagtcacttatttgaattctaacattgcctaacatagaactctgccaaaaagagggttaaaagacaacaatactacaatgttgaaattaccacccatggagatatttgagccccccacccccccatagctctttcagttgtccagatttcaaggtacatgttaattgtgcttttgatctacagcakcagcattttaccctgtcttttacttctggactaacactcacatgtaaatttattctcatgaccccctgggactgagaaagatggaatgtttttgtaaaagacaacagagtaagcatgtgcaaagttgtacctccctgcattatttatttatttatttatttgatgtactgacagtctgctggcaatgtgatttttgggtctagccagaaacaaagactacaaagccatacaagcatccaacccacaaggatttgagaactggctctgtttctaacaccacactcagttacaaggtaaattccaccaatgccacttgtgtgctaaatctcacatcaaatgagaaaaagattccagaaattagggccaagggagccttgagagtgagccttcctgggcaacttgtgtgggaagaatgggtcataacaggaagagagtgggtcatcaaaggaaggagtcggaccaaaatccacagaaatcccagtgggcaaatatatggcatgcactccaccacacccccaacctcctcttatggctgacattactagctgatcacagctctcttccactccagctcaggaaatgcttctcaataagcagtccaaacagccaaaacaaatcatttggagttggctctcaatatgaaacttcattgccatgttggatcctgagctgtggttaagggactggaagatgaacagtcattcaactggacacaggctgttgacccttcttttcagggcaggtgagcctcagagcaaaggaaataaatatcctggtcagctgttcccttcaagattcttatgtttttgtacagctaaaatgaataggaatcaaattgaagctactccaggtccacaatgtggtagtgagctagggccatgtagagctgtcaatcggttctaaactggatattagaagacctgaattttaatcttcattctttcactaattgtgtaactttagaccaggctcttaattttgttgggtctaatttcccatctgtaaaaattgggaaaaggttgatttggactatgtgaatttttaagttccttctaaccctaaatttccatgactcaaagaaattgcctacttggaaaataatacctcatttcagcaacaggttgtttctggttagaaaaggttctttcaaagaagaacaaatagaatcaaagaagaactgaaagactatcaaattcaacgtggtggaaatagtagcttataaaagtgcaggctaatcaaagtcttcattgcacagagataaagaatacagaccctggaatcagatcccctgagttccaggccaactgagccactttatttatatgatctgtgtatttgttatctctttccccataacaaattacctgcaagaattcacagtttaaaatgacaaacatttattatctgtggggt

SEQ ID NO: 668703 - DNA, 1922 bp, Homo sapiens
agctcaaagcatcaagtcatgttcaggtttgtgttgctttcccattaaaagaggaggggttttgtgttttccagaaggcaagggcaagaaaatttagataacagagggggttcttgaattctcttactatttcaataaaataagcttctgattaaaaatattgtgaaaagtgaaacattttcattgaggtcttcagcacttcaatgctgaaaagtaataatagaggaatatttgggtcatctaaaagaaaataaaatggatgaatatggaagaagaaagttgaaaagcaggcagaagaataaaagaaggaaatgaacactttccagtcacttatttgaattctaacattgcctaacatagaactctgccaaaaagagggttaaaagacaacaatactacaatgttgaaattaccacccatggagatatttgagccccccacccccccatagctctttcagttgtccagatttcaaggtacatgttaattgtgcttttgatctacagcagcagcattttaccctgtcttttacttctggactaacactcacatgtaaatttattctcatgaccccctgggactgagaaagatggaatgtttttgtaaaagacaacagagtaagcatgtgcaaagttgtacctccctrcattatttatttatttatttatttgatgtactgacagtctgctggcaatgtgatttttgggtctagccagaaacaaagactacaaagccatacaagcatccaacccacaaggatttgagaactggctctgtttctaacaccacactcagttacaaggtaaattccaccaatgccacttgtgtgctaaatctcacatcaaatgagaaaaagattccagaaattagggccaagggagccttgagagtgagccttcctgggcaacttgtgtgggaagaatgggtcataacaggaagagagtgggtcatcaaaggaaggagtcggaccaaaatccacagaaatcccagtgggcaaatatatggcatgcactccaccacacccccaacctcctcttatggctgacattactagctgatcacagctctcttccactccagctcaggaaatgcttctcaataagcagtccaaacagccaaaacaaatcatttggagttggctctcaatatgaaacttcattgccatgttggatcctgagctgtggttaagggactggaagatgaacagtcattcaactggacacaggctgttgacccttcttttcagggcaggtgagcctcagagcaaaggaaataaatatcctggtcagctgttcccttcaagattcttatgtttttgtacagctaaaatgaataggaatcaaattgaagctactccaggtccacaatgtggtagtgagctagggccatgtagagctgtcaatcggttctaaactggatattagaagacctgaattttaatcttcattctttcactaattgtgtaactttagaccaggctcttaattttgttgggtctaatttcccatctgtaaaaattgggaaaaggttgatttggactatgtgaatttttaagttccttctaaccctaaatttccatgactcaaagaaattgcctacttggaaaataatacctcatttcagcaacaggttgtttctggttagaaaaggttctttcaaagaagaacaaatagaatcaaagaagaactgaaagactatcaaattcaacgtggtggaaatagtagcttataaaagtgcaggctaatcaaagtcttcattgcacagagataaagaatacagaccctggaatcagatcccctgagttccaggccaactgagccactttatttatatgatctgtgtatttgttatctctttccccataacaaattacctgcaagaattcacagtttaaaatgacaaacatttattatctgtggggt

SEQ ID NO: 668704 - DNA, 664 bp, Homo sapiens
ttattttgacagtctttaaaaggagaggcacttcaagaaaggaatcaaataacagaagcagaaaaagagaaataggcctcgttgtatggtgcctgttcacattttgcagccatttactatcatcttactgctggttctaaatatgtccagtggaatgcagagttagagtaagtgttcaaattattaaatcaaataatgtgaccttttcccaattgctttagaaatattggatttacatattaagtccttcaattttaagttatttttcaaaaagatttttaaaataactttggaaataacttctctttgtctatgacaaatcacctgaatttacttattaagtrtagatcagtggataattcagttaccatttggaaaggaatcttttattttgagcagcagatctcaacagtgagcttaaaaccacgctgtaaacgaatgtgctgttgtccaggctttgatgttccatttacatagcatatcataaacttatgcttacttagacaacttgtctttttcataggcttctttgcttgtggttttgaataacttataaccagagaaacaaaaatgtccaggtctctcttagcatcctgtgagtacaaaatgggaattgcatttatatccaagcagactagtgctggattaagctcttgactctcag

SEQ ID NO: 668705 - DNA, 1509 bp, Homo sapiens
aggtcctttgaaagacaaaattatatcttctcatacattagtctataagaacaattcattattagtctataagcacaatgtactattccagctcccatttatccatatccacttcttacaaaactgctttgaaaacatctcaattctaatgtctacgtcaggagtacaataattggatgcctccaaagctgccaattttctgtgactcactgggtcctaccataaaaggaaatggcaaagcttccataaagtgatgtgggaaaatatccataccatatactggtaggttggagaagcagctatcagaaatatatttatgttattatgtcataaatacatgccgtttttaaaaatcttgattgcaaaaatgtgaggaagcaagaggttggatgtatatgtattaaaattaacagtgattatctctgagtggattagattataaatttaaaacaattttggcttctctgtattttctattttatcttttaagaaaatgtaaattatcttaaatttaaaattttaagcacacacacacacacacatatatataatcccaaatgatcagacagacatttttaaaaattataactattatgcatcttcctaccaaagaaaattacatttttctccttcctgagaagttaaaaaaagaaaactaaagatatcaattacataattcatgacgagtcatccaaccwgcccctaacacctatttacaaaaagtatgaaggttagctttaagttgcttggtaaagtcctgaaagtagtatcccaaagtacgtctatttattccgtcaagcatgcaactacattatttcatggaattaaatatgtaatattgaaccatgtacttcaattaaaaatatatgtatatagagttcagatctatccataaagatcataaaactgaaaatttaaaacaaaacaaaacgcttttttaaaaatcagctaaattcatttgtctgggaagctgtttacccaatacatgatttctggtcgggttcactcatttttctgtttttggcatcaatggaaccctttattgtataccacataattacatcccttcttagctagccaacacattatttgtgctaagggaaaatggataccttggtttttgtgtcataaatataacaaggtttcttgttacgtttaagagatttaacccaaatttttctcttaggattgatattgttgcaaatcactaagtctggggttataacatttgggatattacttatctttaaaatttattttctatttttctatttatattttggtgttgaaataaatgtatttataagtacattcctacttaaagacaatctgtcacatggaaattaaaatgtgcaagaggcccctgtaattctaggactttgggaggccaaagcaagcagataaagaccagcctgggtaacacggtgaaattccgtctctacaaaaaaaataaaaaattatctgggtgtggtggtgcacatctgtggtcccagtttcatgggagactga

SEQ ID NO: 668706 - DNA, 631 bp, Homo sapiens
taattcttaatgagttgaacatttaaacaatataaattgagattttcaggttataagattatttgtgatattgatatttttataatacatttttatataaataagtattttatttaattcatttgtccctggcattgttcttagaagcataatggtttcaatctgcagttctatttactatgtgatgtacagttgaactttttttaaattccagtttcctacacttaaataaaatatttgtgctactcaactcattgttaaaaatatttaatgwtgtcaaccatttcaaattgataaatttaaatgtatatgttacatatcagaataacaataattattgatccctgaccaaatgctggttgctctgcttagtgacttagatgcattattttatttagcattcaaaattgtctcattattattattttaatttgagaaaaatccagtgaggtagatattaacattattttcattttaaagacagacaaagcagggtttgtagagatatatatttgctgaaagttatgcaattgataaggggcaatgggatgcttaaccccatactttgaaattttaggttatgcagatttcacccattattgcttcactgcttatattaatctaataggtg

SEQ ID NO: 668707 - DNA, 631 bp, Homo sapiens
taattcttaatgagttgaacatttaaacaatataaattgagattttcaggttataagattatttgtgatattgatatttttataatacatttttatataaataagtattttatttaattcatttgtccctggcattgttcttagaagcataatggtttcaatctgcagttctatttactatgtgatgtacagttgaactttttttaaattccagtttcctacacttaaataaaatatttgtgctactcaactcattgttaaaaatatttaatgatgtcaaccatttcaaattgataaatttaaatgtatatgttacatatcagaataacaataattattgatccstgaccaaatgctggttgctctgcttagtgacttagatgcattattttatttagcattcaaaattgtctcattattattattttaatttgagaaaaatccagtgaggtagatattaacattattttcattttaaagacagacaaagcagggtttgtagagatatatatttgctgaaagttatgcaattgataaggggcaatgggatgcttaaccccatactttgaaattttaggttatgcagatttcacccattattgcttcactgcttatattaatctaataggtg

SEQ ID NO: 668708 - DNA, 766 bp, Homo sapiens
tcacaaaactgctcaccgttactttctcaatgaataaaaagaggtacctgccagccccttctggactggggttggggagaggcataacgtttattgccaggttcaacagagggcctcaacacagggaaagggkttttctgtaagttggtttgtttattttcttgagaacctagattttctatgtatatcttcgttttctagcttagtatttattcaatggctttctcctcgcctgctttgcctggtcttgtgctttctgctaagaaagcaatcagagctgccctgcacacaacctggtcctgaccacaggtatcctccccgcatccttgctggcccatcagctgttatcccttttaccatcctgcttgctcactcttacctggtttcctcttccatcatgcaagattcacacagacgtttttctgatcattccagtggctacaaaatctcaccagcacacagagccgcgtacatcacagaataccaacatagttccttccttcaaagaacttggacttacagtgaaggagcaacaagctgagaagagcacattagaggggtgcccagagatgtgggagaattcagagggctcccttcatccatgtgtcgatcccaggggcctgctcatacaccaccaaggacaggcctggtttccagggaggcagtctgtttatgtgcaaagacactttggtttcccatcctcatagcatgtgggtaggtttttccacccattgagatgagttgaaggtgaagaaaactgtcctgt

SEQ ID NO: 668709 - DNA, 766 bp, Homo sapiens
tcacaaaactgctcaccgttactttctcaatgaataaaaagaggtacctgccagccccttctggactggggttggggagaggcataacgtttattgccaggttcaacagagggcctcaacacagggaaagggtttttctgtaagttggtttgtttattttcttgagaacctagawtttctatgtatatcttcgttttctagcttagtatttattcaatggctttctcctcgcctgctttgcctggtcttgtgctttctgctaagaaagcaatcagagctgccctgcacacaacctggtcctgaccacaggtatcctccccgcatccttgctggcccatcagctgttatcccttttaccatcctgcttgctcactcttacctggtttcctcttccatcatgcaagattcacacagacgtttttctgatcattccagtggctacaaaatctcaccagcacacagagccgcgtacatcacagaataccaacatagttccttccttcaaagaacttggacttacagtgaaggagcaacaagctgagaagagcacattagaggggtgcccagagatgtgggagaattcagagggctcccttcatccatgtgtcgatcccaggggcctgctcatacaccaccaaggacaggcctggtttccagggaggcagtctgtttatgtgcaaagacactttggtttcccatcctcatagcatgtgggtaggtttttccacccattgagatgagttgaaggtgaagaaaactgtcctgt

SEQ ID NO: 668710 - DNA, 766 bp, Homo sapiens
tcacaaaactgctcaccgttactttctcaatgaataaaaagaggtacctgccagccccttctggactggggttggggagaggcataacgtttattgccaggttcaacagagggcctcaacacagggaaagggtttttctgtaagttggtttgtttattttcttgagaacctagattttctatgtatatcttygttttctagcttagtatttattcaatggctttctcctcgcctgctttgcctggtcttgtgctttctgctaagaaagcaatcagagctgccctgcacacaacctggtcctgaccacaggtatcctccccgcatccttgctggcccatcagctgttatcccttttaccatcctgcttgctcactcttacctggtttcctcttccatcatgcaagattcacacagacgtttttctgatcattccagtggctacaaaatctcaccagcacacagagccgcgtacatcacagaataccaacatagttccttccttcaaagaacttggacttacagtgaaggagcaacaagctgagaagagcacattagaggggtgcccagagatgtgggagaattcagagggctcccttcatccatgtgtcgatcccaggggcctgctcatacaccaccaaggacaggcctggtttccagggaggcagtctgtttatgtgcaaagacactttggtttcccatcctcatagcatgtgggtaggtttttccacccattgagatgagttgaaggtgaagaaaactgtcctgt

SEQ ID NO: 668711 - DNA, 1323 bp, Homo sapiens
aggtaattatgagtatgtcttattaaaatgtttctgtacttcttaattattcatttgtagattagttccaaataattttattttcaaaatgggaaatatttttaaaaggtcccttgtatgtttccagaaggcagtaaaatgttatattgtgtactgctggctctggaggctaggactagatttcratactggctccatattttatcagatgcatgtctttggggacattccttaacctctcagtgtctcagcttctgtatttacaaaatgggcatgaaagtagcccctacttgaaaccacacgagagcacacactggaggacatactagtgctcaataaataaatgctagatatgattgttctaacaacagcactggcagcaaaaattatgactaccatttatgagtgcttctttgccaagcaaatttatatatttcattgcatttaataattataatatgatgagactgatattattattcctatgatgcagatgaagaaattgaagtttagagagcttaagcaacttaagctaccaaatagaaaatgtcatagtaaacctagacctgtctgattacagagttcatgcttacatacattccagagttcatcttgttaagctgtaagcttcctaactaacatttaaggggtaaaatttagattgtattgtatttattcattagttttgtttgaatatcaagtttcataaaagtctttgaggaaataaggccaaatttatctagctatttatagagtctagaaataaatctgtgactacaaacatatatactttaaagacttacatatttatagaataattctgaacttgtgcagaagtaatgggaaaataactgagtcaaaacaagttagctagagtggacttagtcaaggctaactatctgtaaatgtgttaaactattgtttttttggaaattccgtaacacagcatatggcgatttattgagtttgaggaaaatattttctctaagaatatttgtctgacacaaatactgtagttgagttcgtgtctctaatattcacaaactattataatttttattttaaaggattattgtggtcatgaaaatggcacatttcgtattttaacggagagtgttccatgctgtgaagatgggctaacgtgctcaagaaaaattatagttgcttttcaggtacagtactattttctttattttttcctctcacattgtgagaagccaaataaaactgttattgtaaatctgtctgaatttacaggatcagaatattgtcttgcaagacggtaaagtaacagcagtcaaatctacagaaagtaagaaatgt

SEQ ID NO: 668712 - DNA, 962 bp, Homo sapiens
cgcgcatgcgcgcgggggacggttcccgtgctgctaggcctgccgccgcttcctgtccgccggcggagagctgggattgggcttgggaggcggggtttgtcctggtcccgccccggggcgggagcgctcctacgcggagatagtgctccgctacgtgttagagctgctgaggaccttcccttgggctaaaatggtccgtggaagatgtaagcagggctgctttcgacttcttaamgtcacaagtaacagaggttttttttcttctttttctgcctctcttggtgcaccacagctaccaagtaaacaaaaagtcccaacaagcagtaattatagcggcagctgccccagtgatgcgaacataaatgcaaagaccttcaagcagcaggaaaaaaagacaccatgtccgagatgtaattttccgagctctttacaaatttatgtcacagactaaggctttagcctttgcaaaagcatgcaacctgaaccagactgtcttgaatctccagtccagaaaatgtcctcttttctctctgtcacatctttgaagcgaatccacgcacatcttctccccaacttcttaaagcttgtgtttgttttctcgtaactcattttgattctttaaacttggatgtcatgaactagaactttttatggccatttaattagatattcttcatctatttggtatcgtgcttgagtaggccgaattagggagagtgtgtgtgtgcgtgtgtgtgtgtgtgtatgtgtaaattgttttgttttgctttctaaagacaaggtctccgctgtctcgccaggctgaagtgcagtggtgtgatcatagctcactgtaacctccaactcaagccgaattagggagagtgtgtgtgtgtgtgtgtgtgtgtaaattgttttgttttgctttctaaagacaaggtatccgctgtctcgccaggctgaagtgcagtggtgtgatcata

SEQ ID NO: 668713 - DNA, 657 bp, Homo sapiens
cccaaaaatctaaggagaatatccaaacctatccattcgtgatgtttcaaagaaactgggaaagatgtggatatggtgcatatgacaagcagccttatgaaaaggctgtgaagctgaagaaaaactaagaaatggatattgctgcatactgagctaaaggaaggcctcatgcagcaaaaaaaaaaaaaaaaaaaaaaaagggagatgtcaatgctgaaaaaaaaagaagaggaaggtgaggaagttgaaaataagaaggaaaaggaggaagatgaaraggatgaggaagagaagaaagatgaagatgatcataatgaataagttggttctagtgcagtgtttgtccttgtttataaattatttagcacccctgtacacaactcactccttttaaagaaaaacctttaaaggtaaggctttgtttttaaactgtacagttaacacactaacagttaaccacactatcaaatgtgtctctagatagcccatccttgacagtcagttgatgagagagcataaagaaaaaaaaatacagatggatggaaggacagacagacggacagacagcccatcctggtggtattttcaataaccactaactttgcctgaaacagtatgagagctgtaagccagcatgaaaatctaaagcaggttctt

SEQ ID NO: 668714 - DNA, 654 bp, Homo sapiens
tcctggcttgtgaccctgcctgggggaaacctccaggaccggattgcctccccagtctcagctgctgaaagcaccaggcacagcagtcactctaactcggggcagatcctagggacacggcctctggcggccctttgttyagcctcctgtgaggggcgggaacctggcgctgtgggcagggtgggtgcaggggccgcattgctggctgggtcctggaagtgggcgccactcccacttcccaccccggcccctgaagtgtggccactgctccgcgttcgggcccgacccccacgctacgtgtgcaagtgccgaaccaccactggcccagctccatcttgggacctctctctgctcacccctccctgcctgaccacgccctacgggcagctgggcctagccccattgcagcggctcccagaggaaggctcccagggcaactggctctggggatctcctgcctctgtgtctgccccctaagacccacggccagcgcctgcacctcactgcagccagcttcatggcagcagccacttcagactgcctgccgctgccgtcagtagtgggattgctggatgaaatggtagatctacttatacttctttaaggaacctctgtactgttttctgtagtggctgtactagtttacattcccac

SEQ ID NO: 668715 - DNA, 654 bp, Homo sapiens
tcctggcttgtgaccctgcctgggggaaacctccaggaccggattgcctccccagtctcagctgctgaaagcaccaggcacagcagtcactctaactcggggcagatcctagggacacggcctctggcggccctttgttcagcctcctgtgaggggcgggaacctggcgctgtgggcagggtgggtgcaggggccgcattgctggctgggtcctggaagtgggcgccactcccacttcccaccccggcccctgaagtgtggccactgctccrcgttcgggcccgacccccacgctacgtgtgcaagtgccgaaccaccactggcccagctccatcttgggacctctctctgctcacccctccctgcctgaccacgccctacgggcagctgggcctagccccattgcagcggctcccagaggaaggctcccagggcaactggctctggggatctcctgcctctgtgtctgccccctaagacccacggccagcgcctgcacctcactgcagccagcttcatggcagcagccacttcagactgcctgccgctgccgtcagtagtgggattgctggatgaaatggtagatctacttatacttctttaaggaacctctgtactgttttctgtagtggctgtactagtttacattcccac

SEQ ID NO: 668716 - DNA, 614 bp, Homo sapiens
tccactgggtaaggaagggactgatgtttgtcctcacaactctgcacatcagcttgctacccgtggcccccaaagccaccccctgctccctcatctgcttgtgaatgtgtttgggacatttgtgttccctaaagctatrttcaccacagggaattagagaagacatttctgtggagacagagaactgtagaagggaaggtccccagagctgtgctaatctccctcaaggtttgcaatagtggtccagagtcacctggagctctgcctttccctcacattaggaacctgcggcagcaaatttcccactcaaatttgataacagtaatgcacgcttaggtaatccttctagtaagttgcagagccaggattacaagcccctcccacccccactcctccctgccccccagtctggctcccaaggccacgctctcatctgctgttccatatttactgagttgagtctagagacaaatggtggagctggccactccatgcaagagggctggctgttgaaacaaagtttttcccaccgtaagttcccacacccccactaccctccacccccatgcctagccttgctgccagcccctgctcctgtgaggccaggcatcctg

SEQ ID NO: 668717 - DNA, 1391 bp, Homo sapiens
ttttaaaataaagttggtatgtagtatttgaaaacatattgttcagaatttaagttttaatatctaggaataaacagagcattaaatcaagcaaaactgtgacaaggccaatatgcacatggatgatgccagcaaggcatcttcagccctttgttcacagcttaacaaaactgtgccgtcacaccactttagttcaacagtgcctgtcgaatgggcatcagcagatcagccaatgcctgtcatacacagagctagaaaacggtttgaaagcaagggcttattcgacccccaagtctagttggaaagtaaggaggattttaaatcatctagtaaaaacaccagccccctcccactccaaagttagaagagacggggmaggatgacaatttttttttttaagacatcaaggagaaaaaatgttctcaggcaaaggaaacacttttcatatttgttttctttgtaaaagcaattatacaagttttgcaatcatagaatttttcttaaagtgaccttgttgagagtaaaagttgagtatcttagacatcttaaggttttgccatgttttttgaccttttaaacaacttaatacgtgttctcatattaccaggatagtagggcattatttgacagagaacttgcaaacccatgtcattcaaaggagtatctcttcaaatataatttttgctacttgtactggctttttgttagccaaaatgcattagcttttgaatggacagtcccctgagctctagtctctgtgaacatttaatctactcagaagagaacccccaagaaaacaaacctggtaaagagagggattgttcactttcctacaagttaacaattagaaaaaaaaaaaaaaacaacaaaaaaaacaaaccaccttaatttcctcctataacactgatcatgagatttggctttcaagctttaataagtgctggggaggtgcctcagaactttccttccgtttaattaagtgtgcccactcctctttaggcatccaatcagattaagtgagagcaaacccccggagcaaggctggtgagccctagtggtaagaattagctgaaggtgttctgaatctcaacctttcaagctccttcaggatatggtgctgctgagatcagtacaggaggagctgagatttcccgcacactaaagttgaaaagctctcgctctcaacctccccccacccctctgtctttcactctgctgctgtcagtttgctgcctgtactttggctgtctcttttccagtctctaccctgtgagtttctggcctgccaatttcaacttgaagcttgactgggctgatttgatgcaaatacctccagggaaaaccctgaaactgatgaacagttatgtcaagtcgattttgcaccatcggga

SEQ ID NO: 668718 - DNA, 1930 bp, Homo sapiens
tcacttacatcatttatttgtaagattctccaataactggaacttttaaaaattggcatgtctctattgaaatgtcatttgattttcatatttgtgaaattgatagctgatgtcctgcggactcttaatatttttttgatgcccatcactaccctactaacatcatgcgcttcttatattttaggaaaaagtattgggggacgtggccacaaaattagcgactattttgaagtaagttcattgaggattgtctccatttcctaattcagtactattctgctgtgagctagaaataatttcttagaagcacaaggtcagcttttgattacttacttgattagagcagagctttattactatgtgatatctttctaggaaaattagatttacatttacattgggatgccatatcatttttttctaaatactttctcacatagttgtttataataacctgtaagataggcaaaatacatattagtgtttcagtttacagatgatgaaactgaagaccagaaatgtaaagtagcctacaccgtaattttttgaatttttgyagtcagaccgtggcagcagtgaccttgagcaataatagaacactaggcataaatgggttaacccatttaaggcaaagtctgaattgaagagtaaagaatagaagttaaagttcactggctctctagttgagaattctttctactatcaagtgtaattattaaaacaacaaacatggtctactcaattgaaaaatatttatgtttacttgagagagcagaattggctgattaagggaaggactgatttttttttccaccactgctttctttcttgggttcgtaaaatctaaagtaaagcagttgctgaccatgagatacctgatgctctttggttgaggtcagtcacttactgatatcattaattaagaacctttgccaaaggtacgatgaattcaaatcaacaaatgtctcttgaatgcctactatgtgctaaattttatgctaggctctattgataaaataaataaggcaaaatccctaggttgcaggaagttgtttaatgaacatgctgggaagttcctatctgtgctgttcatgtaagtaaagtaattaaacaagaaatgatgaaatggacaataatctacacccccagaggaactttgctgcagcaagttattttcttttcccatccttcgtatgtgaacttgaaataggagaaaagatagctatggaatagatcagttggcttctcttcatatgcagctaagtcatgcactttgtacagaagaattgattttttaaagattttgtgctgttagagggaagggacctattataattctttttatatagtgccatgaacacttgggtatcttgagaatgatattctgtttaaaatagttgattatgttcactaaggtctatgggtaaacattttgaaatttcttgggattagggactatatggctcaataaacatttgtaggggacctgtgctaagatttggggggaaaacaaaatatgtttattgctttggaggaatttatttgtctttgagttgaccaaaataacagatgatagtcagaatatagagtaataaggatctttataaaacagtctcgtcatgttcttgtgatcagtagtctcttagtcttttaggacttggctgaccttgtgttttttttttttgttctggacccatttaaatgactacttattttaaaattaggtatatttagattaattcttaatgtcatatctgaaataactgtctgagcctgctttagtaaataataatgcttcctttttcttttactcagtaccagggtggaaatggctcaagtccagtaagaggcatacctcctgcaatccgttctcctcaaaattcacattcacattccactccttcctcatctgtaagtcatctttcaagtt

SEQ ID NO: 668719 - DNA, 389 bp, Homo sapiens
tttgcaaaattgtttcagtttcttgaatgggaagcattgattttatttttgttactttcccatttttcagagccatgctaatttttcttgctattttcttgtctttttccccttaaattatcaaaaaaatttttctcataaatttcttatattaaggttaatttgtctcatttcaaaacaccaacttcccattaccaattttttttaacaaaagtagatttagaaaataactctcttcayattaaattcatatttgccttttgtaaatttgtttgcaaatactgtggtgagatgcatgtgtaacatataccccatactttaatagtttggggtattgttttatctcatttcattcaagaaacatttactgagcaaaggtaagtgatgat

SEQ ID NO: 668720 - DNA, 1406 bp, Homo sapiens
tttattcagaaaatggagccctgctccattccccactgtgaactggcctgggcatgcagccttagtgacacagcgcaaacagaaacagcccccagcccctcccggaccctggctgtacaccatgaggtgctgtggtctctggagcctcttccatggtggcgttattaatgaacattactgtgggctctgttctcctttaatttttttttttcttttttttttgagacggagtctcgctctgttgcccaggctggagtgcagtggcacaaccttggctcactgcaagctctgcyttccgggttcacgccattctcctgcctcagcctcgcaagtagctgggactacaggcgcccaccaccacacccagctaattttttgtatttttagtagagatggggtttcaccgtgttagccaggatggtctgtctcctgacctcggatctgcccaccttggcctcccaaagtgctgggattacaggcgtgagccaccacgcccggccaaccattctcctttcacttgcacctcagttacctcctctgaacaaagaagggaatgaactcaccccatggtgctgttacgctatttaaatgtgacagtaaggcaccaagcagagggcctggcacaacacaaaggtctcctgtaaatggtagctgctgccgttgtccccagctgtatggtcctgggcagcatgtgtaaatgatttaatattttctttcttctttgcaaaatgggatagggagagtttctctggtgatgaaatgcgatcatagtggcataggaggtagcgcatgcccatcacggtgtagctgctcagagtgctgcctctctcattgctgatccatgtcctgattccttcccagcttcctgacactaaggatgagtataagatagatgctattgtcatccctgttttatagacgaggaaccaggctcacagagcttagatgacttgcccatgattacagagccattaattgatggagcctggaattggaccgaaatttggcaacagagttctctgcctttccagacctgttgattttggtctttcagacgttgctaggagagccctgaagtacttgatcagcccaagtctgtaagagggcataagagcaggtcctggttgtgtttggcccagtctgagagggcctagagttagaaggtagagtgcactttgaggagtttgtgggccagggttagctcatccctccctggggtggggagtgatcagttggcagctgtgccgggagagggagctggtggcctggggcgcggtggttgtgtatgaagctggaggcttgggctcaggggagacctgagcatggggaaggagcatcgtgagcatggtgggagttgtggcactgtggggggggctcatggggaccgtgtccatcctccctccaga

SEQ ID NO: 668721 - DNA, 1406 bp, Homo sapiens
tttattcagaaaatggagccctgctccattccccactgtgaactggcctgggcatgcagccttagtgacacagcgcaaacagaaacagcccccagcccctcccggaccctggctgtacaccatgaggtgctgtggtctctggagcctcttccatggtggcgttattaatgaacattactgtgggctctgttctcctttaatttttttttttcttttttttttgagacggagtctcgctctgttgcccaggctggagtgcagtggcacaaccttggctcactgcaagctctgccttccgggttcacgccattctcctgcctcagcctcgcaagtagctggractacaggcgcccaccaccacacccagctaattttttgtatttttagtagagatggggtttcaccgtgttagccaggatggtctgtctcctgacctcggatctgcccaccttggcctcccaaagtgctgggattacaggcgtgagccaccacgcccggccaaccattctcctttcacttgcacctcagttacctcctctgaacaaagaagggaatgaactcaccccatggtgctgttacgctatttaaatgtgacagtaaggcaccaagcagagggcctggcacaacacaaaggtctcctgtaaatggtagctgctgccgttgtccccagctgtatggtcctgggcagcatgtgtaaatgatttaatattttctttcttctttgcaaaatgggatagggagagtttctctggtgatgaaatgcgatcatagtggcataggaggtagcgcatgcccatcacggtgtagctgctcagagtgctgcctctctcattgctgatccatgtcctgattccttcccagcttcctgacactaaggatgagtataagatagatgctattgtcatccctgttttatagacgaggaaccaggctcacagagcttagatgacttgcccatgattacagagccattaattgatggagcctggaattggaccgaaatttggcaacagagttctctgcctttccagacctgttgattttggtctttcagacgttgctaggagagccctgaagtacttgatcagcccaagtctgtaagagggcataagagcaggtcctggttgtgtttggcccagtctgagagggcctagagttagaaggtagagtgcactttgaggagtttgtgggccagggttagctcatccctccctggggtggggagtgatcagttggcagctgtgccgggagagggagctggtggcctggggcgcggtggttgtgtatgaagctggaggcttgggctcaggggagacctgagcatggggaaggagcatcgtgagcatggtgggagttgtggcactgtggggggggctcatggggaccgtgtccatcctccctccaga

SEQ ID NO: 668722 - DNA, 1406 bp, Homo sapiens
tttattcagaaaatggagccctgctccattccccactgtgaactggcctgggcatgcagccttagtgacacagcgcaaacagaaacagcccccagcccctcccggaccctggctgtacaccatgaggtgctgtggtctctggagcctcttccatggtggcgttattaatgaacattactgtgggctctgttctcctttaatttttttttttcttttttttttgagacggagtctcgctctgttgcccaggctggagtgcagtggcacaaccttggctcactgcaagctctgccttccgggttcacgccattctcctgcctcagcctcgcaagtagctgggactacaggcgcccrccaccacacccagctaattttttgtatttttagtagagatggggtttcaccgtgttagccaggatggtctgtctcctgacctcggatctgcccaccttggcctcccaaagtgctgggattacaggcgtgagccaccacgcccggccaaccattctcctttcacttgcacctcagttacctcctctgaacaaagaagggaatgaactcaccccatggtgctgttacgctatttaaatgtgacagtaaggcaccaagcagagggcctggcacaacacaaaggtctcctgtaaatggtagctgctgccgttgtccccagctgtatggtcctgggcagcatgtgtaaatgatttaatattttctttcttctttgcaaaatgggatagggagagtttctctggtgatgaaatgcgatcatagtggcataggaggtagcgcatgcccatcacggtgtagctgctcagagtgctgcctctctcattgctgatccatgtcctgattccttcccagcttcctgacactaaggatgagtataagatagatgctattgtcatccctgttttatagacgaggaaccaggctcacagagcttagatgacttgcccatgattacagagccattaattgatggagcctggaattggaccgaaatttggcaacagagttctctgcctttccagacctgttgattttggtctttcagacgttgctaggagagccctgaagtacttgatcagcccaagtctgtaagagggcataagagcaggtcctggttgtgtttggcccagtctgagagggcctagagttagaaggtagagtgcactttgaggagtttgtgggccagggttagctcatccctccctggggtggggagtgatcagttggcagctgtgccgggagagggagctggtggcctggggcgcggtggttgtgtatgaagctggaggcttgggctcaggggagacctgagcatggggaaggagcatcgtgagcatggtgggagttgtggcactgtggggggggctcatggggaccgtgtccatcctccctccaga

SEQ ID NO: 668723 - DNA, 1759 bp, Homo sapiens
acactgctgaacttataagttcaaatactcttttagttggttccttaggattttttatatacaagatcatgtcatttgccaataaatatagttttacttcatcctttccaatccatatgactttttaaagttacctaattgccttaacaagaacatccagtatcatgttaagcagaagtacagacatccttatattgttyatgatcttagggtatatgcttccagtctttcaccattaagctattgttagctgtgggttgttcacacatgccttgtatcaggttaaattcccttctattcagttttctgagtgttttttttttttaatcattaaagtgtgttggattttgtcaaatactttctttgcatctattgaaatgattgtgtaatttgttttgttttttattctattgatatatattccatcaattgattttcaggtgttgaaccaagcttgcacaattttgtcagcagcatcttatgttttattacttttaactgacacataataactgtacctatttatggaatacaagcatcttgtgttttgacaggagccaatcatagtttaagcttgacattgtatgtttaagtgttcagcaacaatccctctttctgaagctaactgtcctcattgtacacttctacctgtgaatgtccccttcacatagtttatacatgatattgaaacactacttttgggctcatgctgtaatcctagcactttgggaggttgagatgggaggatcgcttgaggccaggagtttgaaaccagcttggttaatatagtgagacccccatctctactaaataaaacagtaatttacaaattactttgtaataatttaaatcaataatttaaacatatgtaaattataaaaaaaacccacaactctgcttttgggggaaactcctgctcctgcctatgctgctccctcgtgccctgccgcacttctctgctaaatctctaagcatatgtctgtccgctagctcctctttttaccctcatctctttctcctttaccaacttagatgatgacatttttatattttgtgcaggactgcccttatttacctgagcctgttcttctttcacttcatatttctcaccttttatgttttattttatccctgcgctcctttcttcattctatatgcattatattcaaaaaaatatttgaggttaagcttaggaaatctcaccacttagcaatattcactgagcacttactatgtggtaggtactaagctggaaatcagagaaacagagtgacaagatcagaggccctgtcctctgggagctcaccaagaggcaaagaaatgactattgatgatgtacctgtgcaatgcaatgatggacccaagattcagtcctgataaaaagagaggaaactacagattgtataatctgaaacctggcagctctattgccaataaacattctttgtaaatctaatttcacataattctttatttccttctcacttgttttattatcttatgtttctgggttttgcactagctgtcactcttttctgcagctaatggaagtagagacaaggtagtgttgagagcatgaaagtggcaaggcgtcttccctgatatctagtggaaccaccaattcttcccattgccactgccttgagggtggctctcaggcagcaggccaagtgctatgctatccaacggaagcacaactaagtcaaaccaggatttgtgcttacctgactttattcacaacaggttaggcttggtgaaa

SEQ ID NO: 668724 - DNA, 3500 bp, Homo sapiens
actttttcaattgaaatagggcatgagggataaaaggaagttggagaaatagcaaaaaagaatgagagaaattctaaaaaccaaaaccttaagatctgtgcaaaactgctgaatttccaatttcaaaaagacttactggaaggcaatcttcctacattaaatttctagaaatgcttaatattttaaatatctaaggctcccttgagcttcaacaggaacatgaaatcagacttgaatttattactgccaattacattgaaagaatctaaatggaaatgaatcgtatttttcatgacccatatgccaaagccagaggcatagcctcgtggaaaaagacactatgaccccaaaaccccctttactgtgcttcacaaaatagggagagacaggtaacccacagggtcttgctgagttgctatgactaaataggactggccccaccagcctaggtcaactccagttcaatttcacacttactgcatgactgatagtattctacaaggcttcgtttaatgatgcaaaaagaataaggtacagtccttgagctacttggaattacagagataatatggccttatgtctaatatgcatgttttagagttgcactgcttgggtttaaatctttcctaaactctaatcagctctgagtcattgcccaggttatttaagcctctggtactccgcatgaatatagaaatgatgatactacatgcctgtgtgtatgttgtatgtgtctgtttaggatctaatatatgtaaaatattgcaactttacagagttatgccacaaccgtataaaattcttaatgtttgactatttttatctacaaaagtgcaaattcctcatggttaaaccaagtaataagttatcagtaaattgtagcaattattaacaaactgtatagagaggttggttttgtctatcaaataactagaatatgcaccaatattttacataatcaacaataaaaacctggtaacactgtaattgctcaacagattcttcctgcccactgcacatacagaactaattcactaagaccatggtattgcaataaagaaagagtttaattaacaggagactggccacatggaagatagagttattactcaaatcagactccctgaaggcttggaaattggagttatttaaagatagtttggtggccaagggactcaggaacaggttttgctgattggttggggatgcaatcatagggttgtggaaaatgatccctacatactcagtctgcctctggatagggggaccacaggaccagttgagtcatgagtccacaacgggccagtgagttgtcagaatgcaaaaatctgaaatacacctcaaaaggcgactatttgcctgtacaatactgatgttatctatagaagccattgagaaaatcacaagtcctgtgacatctgaccacatgactccagagcaaaaaggaattataaaaattatgcatacattttagcagaactcaggcccttcccacaatcctcatctcgtggcctttcattagtcttacaaaagttgttttgtgcccctaagcaaggaagcgtttagttttagggagggactattataattcttgctttcaagttaaactataaactaaattcctcccatgattaacttggcctatacccaggaataagcagagacaatcagcctatgagggtagaagcaagatggagtcagccatgctagacttctctcactgccataatctctgcaaaggcagttcaacaccataatataaaaaatgctaagtattcaccaacatgagatacatggtgtcatatatcaaataataagtacacattcagctagagcagtgcttctcagcttaaatatacatatggatcacctggggtattattagagtgcaggctctaatgacccagtaggtgtggatgggacttggtccatgctgtccatagaggacctcgttgaacaccaggaaccagagaaacagtttaagagcaaggggcaagtgattatggcacagtttaggacagatgggcacaaactgagggcatcctgatatactkaagcaaaatggaagattagacaggagaaagaacaagaagataagaaaggggggaccaagagaggtaccattttattagtgctgggcagtaaagggagaggctaactgggtcatgtttgatgtaaatagaggctgattcactgggtgggactaggatgaactctggagtcataaatacctccaagttttgtggaacctgaagtttattgtttattgggggtggttcttttaaagaaaaaaatacaaagtttaaatatcaaactagaatgagaaaactaaatcctcgatgtatataaattttaaaagtaatacaatatcataattattacaatatcaagaaaaataacataatttgagggaattgaaccacatgaattctcaacatttttttcttatggttccaataccccaggacataaggagaagtgtcatggagagaaagttgaagtacacaaatcatagcagtttcaatcctcagtgggcaatatattttacttttgcaaattttactggccctgtgaacatagagctaagaaaagtttgtgtagaaaaaaatacctggaagcttacacttcatggcctgcagggtttatctgcctcggcctggacttccatattttgtaattaatatttgtttaagtaccaaagcttgggaaaaagctcatttttttttctattgtgagaggttattaccatcacaatactaccactgacttgcacttaaatatagtttctttaacaaaagagaaaaaaagtggattttgaaacatcatgcgtggtttgagcttcaacccgagtgggtcatgtgagctggctgaaaacatgagtgtacatcttcacgtgagctgcccactgaggcagaatgcccctgactattttcctataacttagggggccaagccactgagtttggaaaaagcagccttaagtattatgaagaggtatctttaaaataggaccttatcatacaaaggatatcaatatatcaatttttaaagagctgtcttatatttcagtcccttatatctgtcactttttcaagctttcaaagacaaccctcttaaggacagctccagttgaacctggggttgctaggagatgtagccaacgatcaggagagtgttggtgtctttcttgccccctcctcacttctgttaacatcaccctggggagcgaagggctgatgctgtcagactttttggcatacctgtcctgctactgatgaggaggacagaaaggtcacacagtctgcttaaaagaccaacaaaataggccgggtgtagtggctcacgcctctaatcccagcactttgggaggccgaggcaggtggatcacgaggtcaggagatcaagaccatcctgactaacaaggtgaaaccccgtctctactaaaaataccaaaaaaaaaattagccgggcgtggtggcgggcacctgtagtcccagcta

SEQ ID NO: 668725 - DNA, 1222 bp, Homo sapiens
aggcttttgttggggttttttgtccataccctgtggtgatttctggttgcccgctgctttcactccatgtctgagacttaagaagcaaacaggaagcccagggagtccctgctgtgtcgctggttctgtcctgagatctgtagctcatctgccttcttctttctaccttttagagtcttcttgcattgatttttatttttaaatatacagtcaaggattttttgttcttagcaggaggaacagagaaacatatgtctaatccatcttcctgaaagcaaaaaccctaccattttctctttaatcataaatgaggtacaaagatgttaaataatttgctaaagcttacacatctattcatccagtagacatgatgttgaagttaattccctctcctcacttttttttcaactctaatagttgtaatgatagtttagggccamataattgaatgttttaaatgctagtttaaagaatgtagacttttttctaaaggtaacacagaagcgttgaaaacaatttagaagagccagaaagggcatgtgatcaagtcatttggaccaagtttttatttaaaatgggacttaagtctgcgtctatgtctaaaacattttctcttcaacatactcatataatttcttctgaacactggctatcttttggattgtatagctatttttggtttctgcttctaattctcacttgcatttctcgagcctcaaaatagatcaactgggggaacaaggctgcaccttgtcagtttaccaacaatctcaggcagaggatgggtaaggagagtgtcaagggatattctgacagaattgccaaattaaaacagctttaaacatatgtatttagccagcacaccttagcagagcagctgtgagtgcctcttgaaagagccaacatgcattcatctcacagaatccagcttttttgtgctaatttatttgaacagaataagtgtttgtgtatgagtatttatacagaaaacacacgtccatctcatacacaactagaactactgcatatcagatataccatgacaagcaggaaaaacatacgttttattttttcttggatgtattttttcaaaagttccaatgaaatgttttcatccaaacaaataagaatttattgaagtcctagtgtatgcttggtttataacaggatagagattctttatacgttttagctttgagacctgtttcatctttatcaaccc

SEQ ID NO: 668726 - DNA, 634 bp, Homo sapiens
caaatcattttcttgaagtaattatyacggattggtcaacctaagtaaatggggaaaatgcctacggcatgaaagaaaatattggatagaaaacaaatactgaggtttctgaaatgtaaatagctttgtaggttattcagatgtgcagccaacatggggacccaatgttctacattttctaccttattcattttataaatgccatttatctcccatcatgtttaaattcatggttcctgtagttttgcctctgacataccatatgactctgatgtccattttttcctgcttggcatttccactgctctgcattagctttatctcagcatagccaataagcaagtattaacttggttcaaaatttatattcctcttcaattcccaatctcgggaaaatggcatctacctaacatttggtctagcaaacttcaaactagccttccattccatagctctatacgtctactcagatgttaaatggcatagattctgtgatccctttctaagacagacactgcttattctccactctaactgctaactgacatcttatagtgcagtatattgcatttgtgatttaacacctataatcccaactgatctgtataataactctgtgatgtgggagagggag

SEQ ID NO: 668727 - DNA, 634 bp, Homo sapiens
caaatcattttcttgaagtaattatcacgkattggtcaacctaagtaaatggggaaaatgcctacggcatgaaagaaaatattggatagaaaacaaatactgaggtttctgaaatgtaaatagctttgtaggttattcagatgtgcagccaacatggggacccaatgttctacattttctaccttattcattttataaatgccatttatctcccatcatgtttaaattcatggttcctgtagttttgcctctgacataccatatgactctgatgtccattttttcctgcttggcatttccactgctctgcattagctttatctcagcatagccaataagcaagtattaacttggttcaaaatttatattcctcttcaattcccaatctcgggaaaatggcatctacctaacatttggtctagcaaacttcaaactagccttccattccatagctctatacgtctactcagatgttaaatggcatagattctgtgatccctttctaagacagacactgcttattctccactctaactgctaactgacatcttatagtgcagtatattgcatttgtgatttaacacctataatcccaactgatctgtataataactctgtgatgtgggagagggag

SEQ ID NO: 668728 - DNA, 622 bp, Homo sapiens
ttttaacccgtcctagattgcacagcaaaaacccagtcttataattttaagatgggcatgtttatcacctctccagactgtggaatgatctgtgttttaataaagtttattgtaagacgcttcaatgcaataatatacctggctcaatattaaagtgctaaattaatgatgcagaaaagcagcaattaatgctcacaggaataagatcaaataatctaaaactaaaaatacctctaacagagaaaaatggagtttgaatcyccggaataaagattttatttttttcatttcaaatttccccagtgttcatctgcaacattaaaccaaagatgttttaaataaagagcatggcctcctagactctctccagtggaatcctcagaagaaataaaaatatacatcctggattgctcaggatattgactaaatttcagcatttgacattatgctttctaaaattacattgaaaaatagcagttaaattctgaggcaagatttaacagaaaaataaagaaccttgctcaatcatcgtagggttctgaagactggtcatagcttaatagacaattgcaataatccaaagagccagagagctgatgcaaaaacaatgataatagatcag

SEQ ID NO: 668729 - DNA, 965 bp, Homo sapiens
tgggttccatgtttcgaaatggctaggacaggagctgtggagttctcaaatcctaattgagggctgtctcagggaaaggtgctgatacaaaaatcagtctcatcctaggtgacctctgtcagctttataagctctttgatgacttattaktccatttataaaacaaagagaataatacagatgttattgaggttcgtgtttataaaatattctaagatggccagatgaaaagtgtgactcacaggaaatgccaaatctgaaataaatcatccttctgagtcacaacaaatacctttcaatgtgatggaaacttgatatttgaaaactcccttgattagattcctgttttcatcagctgtacttttcctatgaaatttgtttacatatttctttcctctttaccatgctttcaaattggttgacatttataacttgaaagaggaccattgaaaaattacttaagggagaccagcacaaatacaatttttttttccaccagggaaaggccatgtgcgtgtgtttaaatgtaattatcgtttcccttttgatttttgtcaatcaaggaaatagtgttactaaaatgtctgattgttttatctcatcactaccaacaaaaactgttccattacagtctgtgaggctttctattttagagtgttttctaggcaatatgtggtaattcaaagagatcaaagtaaatgtctccacctcaattcatacaagccttgataataatatattttcaaaacttgtccattctaaagtaacatttgtctactaagcccttttttgggggaaatttaaattagtgggaggagcttatacactatctttttcataaataacacttttcttgattattaagaagtaaataaaatgatcttcaattctagcacacagagataagcgccattgaaatgttggtgtgctttggtctagtcttttgtctatgcatgttttaatat

SEQ ID NO: 668730 - DNA, 428 bp, Homo sapiens
ccatggaacctatctataggttaaaacagcatactgataaaaaacacatatactttgatgcagagatgtacgataatcatgaattagaattagcatcctgatttagtgttctaccaaaaaccctaagtgaacacagaatctatttaaaaccaaagaaaacaaaaaaatcttgtgtttacttaatagtcattgaaaagaattactacaaatttctagaatttaaaaaggttaaaaattttaaagtgttgcctaactatacttagcatacaatagtttaccaaaatatccatgcatttgcagcaaytgaaaaaaatcttaaaacataagcaagtattagtatacatatgaaactaatccaaagccaactgtgattagttcctgtaaggaaagttaacaattgccaagaatggaaggtgactagagttgca

SEQ ID NO: 668731 - DNA, 672 bp, Homo sapiens
ggaaaaggttttgttgttgttgttgctgttgttttaaacacaattgcctaaaagcacatcagaagcctcaaagatattaaaatcaagactcttagaagacagatgtcaagttcgaaagcattcaccttctgaaattcttgtccccttttatttttatttttatttattttttacctttgtgaccacagctgttccatgaacccaaactctcacayacaagtttctgggggaaactctgacatttgtgcgtgcaggtgggtgaagagacgttgggggaaagaatcagcctctctggaatttaaaggaggcaaaagaagcgcccgcgggctgtgtcttctctgcctttgtgagcaaccaagcaggcaagttcctctccgcagcagcccgatgctctcccggcccctgcggcctttcctcggccccctctacccatttcctgcgcccagactttgtagcctcttgcaccctgacagcaacggtgccagacagcaaacccgccctcgcatcccaccgagagggaaaaacgccgcgtccctcccctctaaaaccgcccgggctcggtgcccaaggcgtttccgagggtgcgggcccgtaggcgcaggaatgaccgtccgctcctacctggagtggtggctgcacgcgaaagccgtccgcgctcgccgccgccccctg

SEQ ID NO: 668732 - DNA, 655 bp, Homo sapiens
ctttttcattttgtgctggtattatgagtaagcaaaacgaaataaacattattgtttctcttactattttcttgctgaaccagaacaccttacacctttatatattgcaatatatacatatttattgcatatatatatatatatatatatatatatatatatatatatatatatgcagccacattaacttcttaattcttggttgaatacttttaactgcagtcttttaatttacctacttaagaaagtacttaaaataaaagtaaacacagcattmttatagaaagagcagtcttttattttgaaaaaataaataattcagtaactgtcacttactatgtcttgttgggctgcgaccaaggcagtgtgagcctcaattttggcccatttgtctgttctcttttctccacatctctaaggtattatatcttgggaatataatcctgggtggaaggatatcattttatttttatcttaataatttatgctaattatgtgagtgtaaatctctattacaaattagaaaaatacactatgatttatccttgttagtattgttggtaacgcactttgagtgaggcttcaaatcctatttactcggtcctctggcattacccagatttgagattgctctcttggcagtaaagtgatgttt

SEQ ID NO: 668733 - DNA, 655 bp, Homo sapiens
ctttttcattttgtgctggtattatgagtaagcaaaacgaaataaacattattgtttctcttactattttcttgctgaaccagaacaccttacacctttatatattgcaatatatacatatttattgcatatatatatatatatatatatatatatatatatatatatatatatgcagccacattaacttcttaattcttggttgaatacttttaactgcagtcttttaatttacctacttaagaaagtacttaaaataaaagtaaacacagcattatkatagaaagagcagtcttttattttgaaaaaataaataattcagtaactgtcacttactatgtcttgttgggctgcgaccaaggcagtgtgagcctcaattttggcccatttgtctgttctcttttctccacatctctaaggtattatatcttgggaatataatcctgggtggaaggatatcattttatttttatcttaataatttatgctaattatgtgagtgtaaatctctattacaaattagaaaaatacactatgatttatccttgttagtattgttggtaacgcactttgagtgaggcttcaaatcctatttactcggtcctctggcattacccagatttgagattgctctcttggcagtaaagtgatgttt

SEQ ID NO: 668734 - DNA, 655 bp, Homo sapiens
ctttttcattttgtgctggtattatgagtaagcaaaacgaaataaacattattgtttctcttactattttcttgctgaaccagaacaccttacacctttatatattgcaatatatacatatttattgcatatatatatatatatatatatatatatatatatatatatatatatgcagccacattaacttcttaattcttggttgaatacttttaactgcagtcttttaatttacctacttaagaaagtacttaaaataaaagtaaacacagcattattatagaaagagcagtcttttattttgaaaaaataaataattcagtaactgtcacttactatgtsttgttgggctgcgaccaaggcagtgtgagcctcaattttggcccatttgtctgttctcttttctccacatctctaaggtattatatcttgggaatataatcctgggtggaaggatatcattttatttttatcttaataatttatgctaattatgtgagtgtaaatctctattacaaattagaaaaatacactatgatttatccttgttagtattgttggtaacgcactttgagtgaggcttcaaatcctatttactcggtcctctggcattacccagatttgagattgctctcttggcagtaaagtgatgttt

SEQ ID NO: 668735 - DNA, 729 bp, Homo sapiens
aattagtgtctcattcaaaagtgggaaaataaaagatgagcagacaggggcaattgttttaccattcccatctcacttattattttgtctgcctgaaccccgtacatatttaagtttgtgatctccagtacacttaactattttttgaaacaaatatgcacttgtgtatgtatgtgtatgtgttaggggatttcattagttaaattcagagaagtgatcattgacttaacaaggggtaatgactgtgtaacactgtgttaggaactgaagatagagaaatgaagatagagaaattcaggagacataatattgttattatggggtgcatggtctaggtaactataatggaagtccctaataattgttttctagttcattttacatttttaaaaacatacttgtttttattatgtgcgtcatgataatccctttaatccgagctgacttccccgtctcattaattgttagtacaaagatatactaattttttgatgtargcaaaaattaaaacttacaaattcgaaggttttaagtctaagaaacaagttttccagtacttttatgtttttattgatgaaacagtaggaacatatgcagtgctttttaatactgtacattaaaaaataccttgatcactgatgtgttaaagaggataagatgatttctgtttatgaaaaggtaattcttggtaagaattatacagttatacctaaagaaaaggaaaaattt

SEQ ID NO: 668736 - DNA, 1443 bp, Homo sapiens
gtggggcttaaaacctagatgatgggttgataggtgcagcaaaccaccatggcacatgtatgcctatgtaacaaacctgcacgttctgcacatgtatcctagaacttaaagtaaaattttaaaaataaaataaaataaaaagaggaagtcaggagaaaaaaaagaaaaaagtgctcttcttgcaaaaaataaattaaaaaatatttttataaaaatgtctgtttctaaaattatgtattcgtacaaaggagctgtccaaactatagaaatgaacaagtttttatggttcattataaaaactccaatttgtaatttgatagagaatgtaccaggatatatcaattatctattgctgaaagaacaaaacatagagacaaaaacctcggtggcttataacatcaatcatcgcatcagctcatgagccttgttcagtgatttaggcccagataaaaggggcagctcttggctgttctgcctggggtcgctgctgtggttgcagtgctggtaagtggacttgggttaggtggtccacagtggtgtctgtcatgtgcctggagcttggcgctgcccatcctctggcattctcacttgccacatgatcttttatctttaggaggctaagcaagatttcctcatatcatgttacctaccatataggtaggtaacgtgcaggtagggagaatggaagatttaagtctttttgaggtcaaggttcagccctcccaacatagcacttctattgtgttctgttggtcaaaacaagtcgtgagaccagggataaagcatgagaattagactccattccttgatgggagaaatcatattgcaaaagcctgcatatgtggggctggaaggaattactgtggccatctttgaaaaccgtctgccataatcagcaagtgtttgagaattatttttatattttacacacttggccagttgttctgaactcccaaaataggcattgaaaaacacaagaaaaactattttttaaatagacttcatttttaaagaagttttttttaagcaacttttaatttagagcccagcaaaactgagcagaaattacagagatttcccatatactctgtactcgctctctcagacagcctccctcactatcaacataccctcccagggtggaaatcgaagaacctacaccaacacattattatcacccaaagtccatagtttacratagggtgcattcttgattttgtacatcctatgagtttagacaaataaaatgacattcatccaccactatggtacatacaatatagtttccctgccctaaaaatcctcagtgctccacctattcccttatttaaaatagtttttttttattatactttaagttctagggtacatgtggacaacatgcagatttaaaaattatttaaaatatatatgaatagcatcatatagtgctaatctaactgc

SEQ ID NO: 668737 - DNA, 610 bp, Homo sapiens
ttcaggagtgcatatatagtatttcttctttgatttattagagaatattttcacaagtccacactgttcttgattgctttggaagaagagaagtttatttgataacgggttccagcataaactcagagctactaaattctctctgagtcttcttaacacctcaaactatgtcaagaattaataaatagttattcaaagacagatggtgagtattggaagcaaktaaacagagaattgggcttatttttctggttttcaatataattacgaaaagaactaatgcataaaaataagaagtagaggaaaagggggagtcaaataatgctcatttagtattatctttgttttcagaggagtaataagcatacttttttaaaactagaaaatagctttattatttcttggataataaaaataatacatactcataaaactgtttaatactaaagaatgatataaataatcccttaaaagcataaaatctagatgatttagtaaatttacttctgtctccttctgtctttctatatctatacacacacatacagtcatataattttaaatatatagaattatacatgcacctaatagatattttaaaatatatgtg

SEQ ID NO: 668738 - DNA, 598 bp, Homo sapiens
tttttttacggcatgaagcattagtttatagatatataatataaaaaattagttctgctttttttwaaaaaaaaatattatcaaaacaaaacactgaattgtgtgattccaatagaaaaacactgctctttcacctcctaaggtgtagttacttttatggaaactaagctgtattgtagacttccatttgcactttgtagattgtttatagccttatgttctcttctcaagtcttattataaatgtcactttgtaagaacgtaggacttgtcttcgatttccctaacatatatgaaaactttgtcctcattatcgacaactcagaacaatataatacaagtagtcctcttttatttctcacagagagcctcaaattttcaccaaaatgttaacagaaattatctctggggtgtataagaattaagtctgttttccaattaaatgtcactttgttttgtttcagactggcagtttcagttctggagaaaaaaaatgtcatttgtgtacattctacttgaaaacatgttgcctgaatcaaaataatatattttatatggcttgtgaaatctgaacaatgctaaacatttgaaaatattat

SEQ ID NO: 668739 - DNA, 1463 bp, Homo sapiens
cagtagggaaaatacattatttacatcctaatcccctcttttcaattgtcttaaatttcatttgaaaaaaaaaaaaacctttatgaatttaccctctgtggattttaaccccaatggttgatatctttattaagtttcattgaatatgatttagttatgtgtatatggagttatccatctttggggagattactggattggtgagggcgggggaccctggtgtagaatgattatgtgaaaaaacaatttaacttgttaagctcatgatactgtttgaggcatacagcccctgcygtttagtacattggtctgggtcctgaaaattaccagttagataccatcagttgattattgatatgtatgagcagatactagggtgcaatatttcaggtttcataagactggtattgattgtgaccactctcattttttattgtgtaagttcatatggggttattttcaaaatgttaacaaggcaaaaatatattaagaaatagttgaataagcacatgtgaattgtgttgtaaacaaaaagttagaataaaaaaatccacttatttgaattatgcagaatagaatacatacctagaaataaaacaaaaacgtcttatcatgagtattaagataaaatttaaggcataaactcacttcttagaataagtaactcccaactaactttctaggattttaaaacataacacagtgaaaacatacataaacataactctacattttatttattcttaaagtttaagtgtattatacaagaagaagagtttatattcgagagacagaaaaagtcagaatttttgtttggatcaccaatatatcatagcttacaaaaaaactgtcttaattaaaacccacaacataatttttttagatttttaagaaagattctattattcttctttatacttaaaaatggatgattcctactttgcccacttttatttttattcacatagattttctttatttctattagagaagcactagaattcatgaatagtgttgatttgaagttcaaagtaattaattcagataaaaagacatttctgcatgtatgaaaatttctaatgtgaatttgcatatttaattatcaatccttcatttagtgtagacttatttttaaaaatgcaggtaatgaaccagaaatagaattggttgtgctagagtagagaaactttatttgatgattgttttgaaaaaaaagcttctgagaagaaacaacctctagtacagtattaattcattaagatagctcctttctcagacatttcctttcatgtagcctgaaagttcaatttgaaatttgttctttccaatttattcagactaattctgcctactttcttccccccataagaaccaattactgcagctttattgagactgaaaaaagttaatacacctccttctttgctgaaccaaggaatggcttggaactcttgggaaaagac

SEQ ID NO: 668740 - DNA, 614 bp, Homo sapiens
tcaaaagaagtatgtgggctgggcgcggtggctcacacctgtaatctcagcactttgggaggccaaggtgggtccatcacctaaggtcaggagttcaagaccagcctggccaacattgtgaaaccctgtctctactaaaaatacaaaattaaccaggcgtggtggtgcacacctgtaatcccagctacttgggaggctgaggcaggagaatcacttgaaccagggaggcggaggttgcagtgagcygaggtcacgccactgcactctagcctgagtgacagagtgagactcagtctcaaaaaaaaaaaaaaaaagtatggcacgtctaagaaatagcaaggaaagggtaaaggaatgttgattttataagcaattcagaaaaagagaaactttgatagtcacataaataaggccatacagagaaatggtgagctggctcttttctttagagagcagacaggaatcaagattaaatgttatgaggaactaagtgacttaagaggttgtatcataaaggacctgactcagtttgaatataagaaaaggcaattggcagttacatcagtgccggtcagaagtgtattcaggaaatctgtctagatttacttgtaaat

SEQ ID NO: 668741 - DNA, 2647 bp, Homo sapiens
gattttcttggtaatcagtgacatcagagcaaacatctgataattgtttcttctctttttaaaaaggtataataattatttcttgtaaatttctttctggatattgaaaaacaataggggtagtgycttccttctaacctcaggggatcccttcagtgtttcataagtaaacataacaatgtctggtaatatgtggtatgacttttcatcaggctaggaaatatccttctagttctgatgtattcacagatttttctttttaaaaatcatgcaaagttactgagatacagacattttattattaagcaatctttgcatgttgggagtaaatcctatctggtgaattatttccttaagaaaccactggactagattttttagtatttaatttagaatgtattatattcataagtgagattggtttgttaatctttttttgagttaagcttgttagattttgtcattcacaaaataacctgaaaattttccatttttacctctagtgctcccgactagtctaaatagcacgggaattttctactttttgagtcattaaataactcatttgtagaatagtcagggttcagcccttttgtatgggttagtttcttagttctattcctattttctttcaagcttgtgagtctgttcagttttttatttctgtgtcagttttctgtgtcccagaacattggccatttcaaccatatttttaaaagttacatggtattttgtgttgtattttctttaaaatttaaaaaatcgatcagtatctgtattattttcttctcttttaatattgtgcatatatattttccttttcctcatgctaagagagtcttgctcaaattaatatttttaaaagtgaaaacaggaattttgttttattatttacaattttttctatttcctaattcagtattttttccatttgtaaatatatattaattctatgtttctactttttaaaggcttatttagtttttctttttgtatctcttgatttaaatgattggctcattagtgtcatttcattcttgttaaataatataaagaaccaaaggtgtatgaatacattttttctcaattataacttgggctggccacatctaatttgttttggtaagttatgttttattaccctactttctccaagtagtctgtaattgcaatttactactttttttttttgaggtggagtctcactctgttttctaggctggagtgtggtggccgtatcttggctcactgcaaccgccgcctcccaggttcaaatgattctcctgcctcagcctcctgagtagcttggattacaagcatgccccagcaatcccagctaatttttgtatttttagtagagacgaggtttcaccatgttggccaggctggtctcgaactcctgacctcaagtgatatgcctgccttggcctcccaaagtgctgggattacaggtgtgcaccaccacgccctgcctatttacttttgaccatagtgttagagagggatatttgaaattgtcaagtagctatgttttaacactttaaatgtttcttactaatttttaggtttattgcatagtgatcaataaagatataaatttcctgcctttgaatttatattgaggatttctttgagttctaatacatagttgcttttcataaatgttccatgtgttggaaaagcagatatgttttctaataaactagaagtttaatatgtatctaataaatcaaatttttgcatttttattcaaattctccatacattttgcttatgcaaattatcagacttaatgcaatctctcataatgattgtttccaccaattttacatatatttctggtagttttacttcatagatttcaatgacatattatacaaatataaagatttattactactaaagcttcattgtgaattatactttttatgaatataaaatagttttttctcgaatttttctttgatattatcttttgacccatttttctttctatttttaactatttatcatactcatgcacatcttacattttcccttttttgtcaatttcacattcaagtgctttgcatatctatctatggggtcttaatgtttttcagtaaatttgcatgaggatttaaaatatgacaaatattaatcctttgcctctttcctgtaagtattctcttgaattataatcattgtatgttgtgtacaaaattccttttggatccaatctattaacatttctctacgaggtttcttgtgtatgtagaaaatatttctttatgttctttcatttattaatgtgaattttataatttaactttttaatttatatgcagttaattttgatgtagagtgtaaggtatagatctaaatacatcttttttaaactagctacccaaatgctttgtcatcatttattaaataactcttcttttctagctgatgtgaaatgctatttttggtagatactagaattcacttgctcaaattccactctaacatccaagtgagccttcctatattatagtggctgaaaatttgaaaatgagctttcctggggttccttgcagctatgtttcagatgtaattttgtttccaccaatcagatgtgccgatacctcacttgcttttgaaactgcattaatggcagacaagt

SEQ ID NO: 668742 - DNA, 1543 bp, Homo sapiens
gacacttcagtgcatctctaatttgggaaatgatcaatggtcaacagaggggagactgtgtctagtagtttttacaattgtattcattaggcacaggaaaatgtaaactcagagagtctaagatagaaccaagcctccaggataaacttcagcaagcctaacccctttgtttctctttttctttctagacacttgtaacagcactaatctagaagtgagtacatatgagttctggtcctggcttagctaatttgggcaaaccgtttaacttctttgagacttaggtttccattctaacaaggtgtaggtgataatatccattttgtgcaaggtcattggtttttaccgtataacgtgtgtaggtgttacacacactgtaccatcccatacaaatgtgagttaatgtattttctgtctttattatctcttttacctgccttaatcaccaagacattgtgatctgtcactccatcttctccattaaactcttcaaccatttctattttttttggacaattacttatctcagtcatcatttcttataattccctgtctaaccctaaatgtctgtgagatccttgcccctcttctcaagtggttcaacacttaagaatggggacaattttatttttatttttatttttatttttatttttttgagatggagtctctcgctctgtcgctcaggctggagtgcagtgatgcaatcttggttcactgcaacctctgcctcccagattcaagagattctcctgcctcagcctcccgagtaactgggattacaggcactcgccaccgtgcctggataatttttgtatttttagtagagacaggtttccccatgttgtccaggctggtctcaaactcctgacctcaagtgatccacctgccttggtctcccaaagtgctgtaattacaggcatgagccaccacgcccagctgggacaattcttgttatatgttartttcttaaaaccaccaaagtctattcaatatatgatatagtgattaagaaataaaggtgtacattgataaaaagtatgaagtttcacatatgcacattcttatagcactcataatggcatctgttaaatcttcatctaacttttaaaataaaatggcttgtaaaagctatgaattactaagctgtgggatgcttttgggatctcaagtagtaatgtggaagtctaggcactcagcactgtatggaatcaaaattcccagtggaatatggagagcagaaagattgggcagggagaacttgtgaaaatttaaacatgattttcaggttcatttggcaaaaaaaattaggtgacaatggatatttttaaaaaaacaccaccaacaagggcattgcctggccataatttattgagttattttaacactttcattctttgtgctttaggtattctgcttcctcatacttaaggtaattttgtaaaactttatggaagaaaaaacaatgacacacactcacacatagaatatttgtttattgctgttataataaattaataaaaaacccaagaaacctaaaacc

SEQ ID NO: 668743 - DNA, 656 bp, Homo sapiens
tagtatctgacatgtagtaagtacctaataaaaggtagctcttattactacaggttcaaaactatgctgtgttttgtcctcacaaaaggcttgtacattaaaatataaatataaacgcatccrggttcttctgtcttcacatgtataagtgttttggttagagctcaatgaaggaggaatcagctttctaggactgctgattatttattataaacattctttttgtttgtgcagttgaatatttcccctttctgctcttcttaatcttgccaacattatttctttgattgataatgattggtttcatcaggaattaaaatacttattgtgcattgaacactcataggtgtattccttttatcagccgggaataggagacccgtgctgagtacatcctagcactcctgatgttaaggctaatttacaaaggaaaaatagtcaccttttctcttttcactactggttaagaagcagcttatgaaggcagtgccatgaggaaggatgagaggattaagtgattaataactgaatgggaggggcctgctattgggctgctggcaggctctgaaaatgttgctctccagatagcagaagccaagcactgagtgcttactgtgcctatgcagcatgtaaagggatgggcacgaggttgaaga

SEQ ID NO: 668744 - DNA, 617 bp, Homo sapiens
aacattatttttccaagtgtttaggtaataatgtattactttgaattcagattaatgttctactacttgtgactgagaaaagtttaatgccggcatggtaaaaggaagctgtctcccttctgacatttcctaggaagctaggaaaaggaaagtgaaggaatggtctaaagaaatgaccattcacactgattttgtctggacagtctggccgcaggttattcatagattattcagcctttgcaggacttggattcagggttttactcagtccctttaccttaggtggaatcttcttaaattgaaatttttggtaaggaattcatttcacaggtagtgtttcagactctgaaagccctgacttggttcttggcttctactgtactrgttactagttactggtactgttgccaagcaatctgcttggaatttgtggatccctgctgttccctaatcccaccccctgccctgagacagtgaatgtagtccgtgaagggagtgcctctctgggaccccctgtgttgttacaggctgtgcagtgcaacaattccagcaaaaataccctatccccgcacttagtcattcgtggtaactaacaattttgaaatactcatataaaa

SEQ ID NO: 668745 - DNA, 610 bp, Homo sapiens
tagctgggtgtgctggtgcatgcctatagtcccagcttctcaggaggctgaggcaggaggatctcttgaacctgggagacagaggttgcagtgagccaagattgtgccactgcattccagcctgggtgacagagcaagattctgtctcaaaaaaaaaaaattttttttttttttaggcagagtctcactatgttgcccaggatggtctcaaactcgtgcctcagcttcctggtgctcttgtttgtgttcctgcccagggtattaggatatctctgggctgaagacattcaggccacactacccagcggtctcttgctgtcttcagtcatccacccttcaacatttacaaacagatgaacactaggctaaatatacagttagtgttaccgtcaggcaaagcaaatgaataccagccatttaatgatgccttcttwtcgttctgctatatggtatttaataagctctagttacagtgatatattgctggtgactcagatacttatttgtaaattagccctgacccctgattcataaaccaataaaatatgaacttgtaatttattgtatgtacccgcagtgagcctgtttcaccactagaaggcaaaggtgc

SEQ ID NO: 668746 - DNA, 604 bp, Homo sapiens
ctcagtcactctgtggagatttgaacccaagttggcctaactgcaaagcctgtggatgcacccacccctaacaccccactgactttggttagtagagaggctgtgttccacactctcccttgccagggtgcacatctgaacatggcccgacaatctccccggggaggagaaggtgtcagtgcatggaacagaataaggatgattgtgtatggacatgtgtgttgtgtgtatgtgcatgtgttgaataaaactgtgtctgtatgcacatgcatgcttgtgagcatgagtctrtatgtgtttgtatctgtgtgcatgcctgcatgtgtctatgtgcacatgtgtgtttgtatatgcacacatctgtgagtgcactgctgtgtgcttgcacctgtgtgtgtttgaatgtatggatgtatctgcctgcatgtatgtatgtgtctatgtgtcctcgttgtcagtgggtatatatgatacatgtatctgtgtgtgtgtgcatttgtatgtgagtgtgtaaatgatcccatgtatgtcagtggagatttaggagactgggtcccctacagtggaaagttattcatttttttcagctaatagaaaacaaagg

SEQ ID NO: 668747 - DNA, 585 bp, Homo sapiens
cactgcctgtagctctctctgtgttacaggtgagaaagcaccctttggagaacttctaagatcatccaggttttcatctaaaggcagcactgtcagcttctctctctctctttctctctctctctctcacaaatacacacacacactctctttctcatacacacagtctctctctgtctctctcwcacacacacacagtctctctctgtctcacacacacacacttctctctcacacacacatacacacactgtctctcaaaaacacacacacaaacacacacacattctctctcacacaaacacacatgcacacacagtctctcacacacacacatacacaaactgtcactcacacacacacacatacacacatacacacacacatactctgtctctctctgtctctctctctctccttggaagtcccctacatttattcacatgttcattttgcaacatttactgtgcgcttgctgtgactcaggctctactctgaccctggaggtgcgatgctgagcaagccagtgcagccctacccttgcagagctgacatcctggtggagacacccctttttgtctgtac

SEQ ID NO: 668748 - DNA, 632 bp, Homo sapiens
ctgcccaaccctgttagccactctccgttttcctccagggcacacgtttggagcaataatcagaccagtcctcagcatcccctacagtgcctgatgctgctggacatcactgatgtgccccggcaggggctcagacagaattttgattcacatttgctccctgaccacctactcccaccaggcactgtgccaggttctgggggcacagcaatgatgtggtttccaagccaaaggcactcacatctaggaaagacacagacacactagcaaacccctcccgtgcagtgttgcacaggagaaattgggaggccttcctagaagagcagagctttcaaggagactttcttggctgagtgaaaacattcactgtatcaatgtgttcctggaaaggttcacagggattagcgtttccactggcatctaccgtcagtccacgagtccttaatcctgacttcttaattggtgacggctaggttctggttgtctggtccctggttcttgatcatgtaatttaagatttgtaaacacacaaatgggatggagtcagagactgtttacttctgggacccttcgtgccagtaggagggttgctgacctgagtcacccctyccttactaggtttgtttgaaaaa

SEQ ID NO: 668749 - DNA, 1326 bp, Homo sapiens
caagtatccagttgagtccctgctttcagagttctcctggatgtatacgtaggagtagaattgctggatcatatggtaattttatgtttaattttgggggtaactaacagccaaactattttccaaagcagctgaaccattttacattcctactagcaatggacaagtgtttcagtttctccacattctcaccaacacttgttatttttcatttttttgataatagtcaccctaatagatgtgaatattgtttttaaattaagaattaaactgcatctaacaatctttttaatggtagatccctcagatcagtgtatggaaagtgtgtttcattgaaaagaaagtcaaggaaattgtctctattcactgttagctttgtttccttattataagaattataataattccttatttaattatagtaatttccataacttattatagttggggataaatcttcaatgtaagcctgggctttttagaagaggaatattttaaacttttatatatatcattttaaagtttggaaaatataactcttcctacattttctgtgacattaaagacaacagaaaccagtggtaggactctgccagacaagggtgaagaggcctgtggatatttcttgaacccttccttaatgtcaccagaatgtttgccaacaaccacgaaaaagaaaacagaagacatgagtgacctcccctgtgaaagtcaaaggagcatacctctcgctgtgactgatgctttagagcatattatggaacaactcaatgttttgacacaggtgggcatgacacaggttgcatgagttgcacttgggggtaaaatacacaaaacaattctggatacagcaagttgcagaactagcagagcaggggagatttctctatactagcaaagcaaactcaaggtggcaatgccctaaacaagatcttgtagagataagctcagagcctatgcatttgtgtgcacacgtgcacacacacacacactcrcacagcttaagccatttgtaagaaaatatttagagccataagaaaaatgtattgggagtaaccatttctggttagtatgaaatattgctaatgtttatagttttttactttgaaaatgttctcactgtccagtatttaacttctcttatcccaaagcctcttaccttgatgcagtgatcttccaggcatgatggttttgcattcccatgttagaatattatccacttttttgaggccagtttacctttgcaaagaaaaatacaatgcatcttaaataatataccaaaattcttggttacaaggtacagacataatttaagggaagtggtat

SEQ ID NO: 668750 - DNA, 1685 bp, Homo sapiens
tcgtttctgtttccagtatttgyccttttgacattttagaagaaataagatccaagtttgatgttgaaaagaaagcattgatttctttagtgagaggatttctcctccctatttctgttttccctagtcgtgggcgaaacacttctttaaggagttagagcagctcctttgagcaaatcttcctggggaatcacaggaatctttctgagcagatgttttggagctgacattaggccccttgctcggcagcatgttgagtttttgaggccctgtctttcctctgagttttatattctgaattgacaagttcttgacctccaacattagtttgagcaacccatgaccaaccctcctcacaaaccatgatccaaaagaaacatccaatagtttcccccaagttctttgcctggtggttgccctagaaccttaagcctcaccctttatttgattccaaaattcccttacctccaaatgtccattctgagctttccttgggagtaagcaaagacattcatgaaataaattgtaaatatgccctattgtacatggatatgaaattaccttttggatgaacgcctctccagttaacacaggaaagactgggaacatggcttgagaagaaaaaaaaagttggggggaagacagggagggcctccttgcccaccccacccctgctttctgtgtaccttagccagctcaccctttaaggaaatgaacaattttttctgtgtgtgtgcgaaaggtgtcagaagttttctgaggctgtagctttatgcaaatatgctactcaagaagaaggctttaggggagagttatttatatcccacaggcattacacatgcaaaaggtgaaactgtgaatctctgaatttccaggagtggatgttcttatgataagcacatccttgcggttagctattttggtggccatatctcactgtcagatttttgcaggcaggagactacataatcattccatacttttataatgaccctagatgtttctctccaatgggacttcataacctgaactcctcttgggctttagatttactactaccttggatttgtagtaataggtgcattcatttcttttactcctaaacaggtacatcacttagccattaaaaagtaatctggtggcatgtttattgctctttcattttcatattgactcctggaattagccaagaaaatgaccttttctctaggaattattgccctgatccattgctggctcaccctgtccaaaaatatagaccattctccaaattgaaatatacattaatcacctcaggaaattgcttcccccattggaaactgatagctctcattggaatgtttccaaagcacagctgatgacaattacgactcactgaaatttcagttttctttgattgtgacataaaaactaggacataaattaaaacctaattatcctttaagggtaattggggttacaaaaccgagagactgtgagtcagtgtgtcaatatcgctggagtacagcatctgtccccaaaacagcctttcatatgaaatgcttgtggataaggttatatctgtgcaccgagcatgccaagagagaacatcaaaatgggtgatagacttggagacatatagttagcttctaggacatcttggaacaattaaagtatgctaaaactgcagtgggaaggggttaaac

SEQ ID NO: 668751 - DNA, 1376 bp, Homo sapiens
tgtacagggaggattttgatagatggaaaaattctggacacagaaactaactcaatagaagagcacatagacagcaaagtaaggagtatgtttgcaggtgcatgagacatccagccagttgtttgggtgttaggctagtgcagagcagtgcaagataagcccagaaagataggttggcacatctatattgaagaattataatagctagcactttccaagctcttatatgcatgacactgttttaagcacttacatgtattaactcactgaatcaccaaacaactctgtgaaataggtactatcattatcttcactttacaagtgaggacactgagacacagagaagtacagaatgtgattaaaggcacatagattctaagtgcaacgaatccagggttttaactcaggcagcctactcaagcacgcatggtacctgacaaccttgacagcatgctctatagagcatacatttattctttgcttcttcttccatccccacatccctagccatggaaatgctgagtaacttttaaggccaaactcatctctttcctagcaatgcctcttccaacttcatcataagagaaacttatctttccctgttagaggcctctctttttttgtacatacagtaattttcccaaccttacttatattagagttaagaatgtgttcatctgtgaacttcttcagacaagaattggcatcatattcctctgtatgtcctcagaatctgggacagtgatttgcatgtagaaagtgctcaattaacattgcctgagtataattgaataccggaggccactaactgaggcctgaagaaaagtttcctaatcctaccatacctctttaagatcatctttccaaattcaaaacaaagcaaaacaaacaaacaaatgccaagcyctatagggaactctcccactcctgaaaacctacatcctataaaaaacactttggaaaagcacaatgtagaccctcctaggccacacacctaacacattattccagctttagccttgcttgactgtaaaagaatgctaatggcagcagtgcttctaaaggcaaaagcacagccacacatgaatgatgtatctcactaagaactgtggggttccaggatttctgagaagactcctttcattctgataaagttctcagcttctcgacccccaaatcctaactccctgaggaagattcaaaaacacccaatttaattaaagcctttttttttctcatattgaagtcacaagttttcacagggtgcaacgtgttgctaacccagcaatttccagacaaggctgctcagcaaagcaggtgctgttttctttttagggcccatgtccttaaattgctttgctgctcagatgtctcaa

SEQ ID NO: 668752 - DNA, 2248 bp, Homo sapiens
ggagtagtagtaacagtgacagagaaaatgaagaaaatcttaaatggttaattcatcttagaatttaggcagtttgcctttagtgaatccagtgtgaaatgcaactgttttttttttccaaagggcaccacagctaaatttttttaatcatcattcctttcctcttccttcccttaaacttgctcccttctgtgtcccctgtgtacccattccctgcagcgttccctgctggctgtggtggagattggtgtgctgtgaattgcataatcacccaaatgagtaccagaggagtctaagaaaccctggcaactgactgcttgctttcaccaggaatagggacctttttytgaatttcctgccctcaggtaatacttctattccccatgcttttttttttttttcattctataaatgcaagcacttaatatgccctgcataaagatactttgagaatattttcttactgttttagtcagatacctatttcattttctttactatgtagctagaggctcatgtaattcctctctgagtgtcttctctttcttttttttgagactgagtctcgccctgtagtcagtgtcttttctaatagataaggtttggcaacatacttaaagttataaccatctcttcctgatgttgcaagagagttttgtaacttcctgccagctgtttggaaatagtagttagcatttgatctacttttaaatgaatgggtaaggcttcttagtctaatgtaattagtgaggtacaaagtctcctttgataaagaggctgttttgaataattcattcatcattgagggatttaagaatttattttgtgtatttaatgatagttatctttatcaaagagattgaaataagtctcacaaacagcagtgcaaatgggattctttttttgttttttgaagtggtaggggtggtggggggaaaaggtgttgctctgttgcccaggctagagtgcagtagtgcagtcacagctcattataacctcaaactcctggtccccagttatcctcctgcttcagccaccagagtagctgggactacaggcatgtaccccatgcctggctgagtttttaaatttttatagagatgaagtctcactatgttgcccaggctggtctcagagctcctgggctcaagcagtccccccacctaggcctcccaaagtgctaggattacaggtatgcaccagcatgctctgccaggattcatttttgaagaatttaagggttttacagcattctcttctaccctctcctgtctttttaaaaatttcattatcagggaaagcaattatgttataaaaccaggttattggaaatggtgctgaatttctttcaatttaggactcaatgaaaaacctagaaactcatatcactgaatacttctaattcttgggaaatttatccacataaatactttgaacttccaaaagtcttgtaataaattgttaattaaatgccacaagtagaattgtgcaacttattacatacttacctaagagtaatggacaaatgagaaacttattggctatatgctaaagcaattgtataggcctagtggcctaaatattgttttacgttcttgcctgcattgattccatgctttcatttgggaacctggatctcaaacagaattgccaagggaaaggtgccaagctttaacctcaggtggaaacctttgagattcactttagtatattaatagttaaggtcttttattgtttaaaatggctttcaaggatggttctgattttgtgtatacctctagcaaatcctctgagacgcttgctcgtgaagtataatcacaagtgtagccctttgttttttctagattatacctccttaaaacatatctttttttttttttggcctggtttatgcttagcttattcaaggtgaagtgttatgattgtattccaagttttaaccacagctatccatgtgtttattcaaatcacctaccaagattcattcctttttcttctttaccttcctgttttaatcagtcatgattactttatattgaaataactattgaacttatcttctttatcctaaacctaggacatagcaggctgcttggaataaagtagatatcagtaagatttgaatatctctcatcaccagatttcattaattatttattgcatcagttgttgcaactaaacactgagtattttcatctcctttgggtctcatacttctgtattccatccttggcgctgttaagagaaa

SEQ ID NO: 668753 - DNA, 586 bp, Homo sapiens
atggttttttttgtttgttttgcgacagtctcattctgttgcccaggctggagggagtgcagtggtgcgatttcagctcactgcaacctccgcctctcgggttcaagcgattctcatgcctcagcctcccaagtagctggggttagagacgtgcaccaacacgcccagctaatgtttgtatttttagtagagatggggtttcaccatgttggccaggctggtatcaatctcctgacctttagtgatccrtccacctcggcctcccaaagtgctgggattacaggcataagccacatcgcccagccaggtgaagtatttgtttttcattaaagcagagtttattttagagatctatatcatcacaaagtgagtggaaaaatctattgagcacctactatgtgccaggagctgtgctaggtgctttgcacactttgcacactaatcctaataggcctgtaaggtgtgatcttatttcgtagctgagaaaacttattctggtcagttaagtgaaagagacaagatttacactcattcagtccgtgtaactgtttatactctacctgattccaaaagaggatttctatga

SEQ ID NO: 668754 - DNA, 612 bp, Homo sapiens
tgagtactacaattttagcctgaaatttttttaataaaagcacctttttctggctccaaacttcatacaccatatgcttctagtgtgaccatggatatgcctcacatttgagttttgactgatcattatgttcaaaaagactggtaggctgagggrcatagacttggggcaaatctatgtttattcctacaatcaaactacagacattaacgtctctatctcatttacctttatataaaagtcaaacactgcctttactagcaaccaaggtcaccacacaaaggaacatatccaaaacacaggaggaaaaaagacaaaaattggaactgcatccagtaggtataattaaagtagccaaactgtatttctactgtgggaactttcaaaagaacttccataaagttttaatataggataggtaaacacaattccaatggcttttgatagcagtatatatttatggccccattttaaaatgacttattattggattcaggctctatcagtgagggtaagtaaggagacagaaaccccacaccagatacttgaacagggaagttttaatataatatttgctaactagtagaagctggtaaattatttgtaggggca

SEQ ID NO: 668755 - DNA, 611 bp, Homo sapiens
tttttcctttcactcaattatgaattgtgaaagaaagaatacagctttaaaaagttgtaagaggaaagcagctgggtgcagtggctcacgcctataatcccagcactttgagaggccaaggcagatggattgcttgaggccaggagtttgagaccagcctggccaacacggcaaaaacccgtctttactgaagatacaaaaataagctgggtgtggtgctgcatgcctgtaatcccagctactcaagaggctgaggcacgagaattgcttgaacccaggaggcagaggtcgcagtgagctgagatcgcacccttccactccagcctgggtgacagagcaagaccttgtctcaaaaaaaaaaaaaaaaaaaaaaaaaaaaaaaawatatatatatatatatatatatatatatatatatatatgaaagttattttgttcaagaagtttccctctcatatttatactagatttaggactaaaagactctttttaaaaaacataaatacccaagcatttactatgattttctaaaatagatatttactagtttttgattataatttcttcattatagagaggttggaaaaagaaagattttggttattacagaa

SEQ ID NO: 668756 - DNA, 665 bp, Homo sapiens
ttaataaattttaagacatagcaaaagaaactatccaaaatgacagacagagagggaaaaaaaagccttaaaaaaaaagagcatagcaccagtaagctgtgggacaacttcaaatagcctactatatgtgtaattgcagttcctaaagtggagaacacgtatccctacaaagattatttttttcctgtgctcactgcatgaattggcaatgcaaaggtgattcagagaatgtcaccagaaaatgatgccatccctgtcattaaactgtttcttagggcccagatgtttttcaggtccctgacttccaattggaaaagtgggctcagaagctcccccagattctcaggccttttccattattgagctttttagtgaggtggatctgatccctagaaatctcaatagagcaagatgaaggagactccctctactcacactgtttccaggaactaaggcctcccagccattgcaaaaagctgacaagtctgacagggaaaccagcagttcagcctcaaaattttctgggtagcaagtttctctaacagcagactcttactggggacagaaaccttcgggaccgctrctagtgaggtgcctgtgactttaatgccagacctgagtctccttgtgacagttctgtggagaatgaagttattcaaaattgc

SEQ ID NO: 668757 - DNA, 607 bp, Homo sapiens
tccttaccccacatttattgtgatattatctggtatttcaccattatcaagcagtttaattctttagttataaaaatatctagaattcagatatttaaagagagataattcaatcatgtattagttcgattttgttttgtttggttcagattgtatgttccaaaaaagaagctgaaatttatactttaagtaaatggatgttttcgttggctggcaagcagaaacatgscattttgaaggatggagcaatgccatctggagtatgattctgtgtccagagagaggacagatgagagtactttgtcccagagagaataggtgttgggaaaatgagtgttgctcaagaaggaaggcagagtcactcacagcaaacattacattttttgttgcctcagagatttggtttctcaatgtctgatacgcctgacttacaaagaattctctgaattttgtgtatatatatcacagagaggattctgaacccacatccgctatatcttcttcagttgtaacataaacctccatctctttaacaaaatccagggaacagaatattaatgcttactttgtttcctttcaatattcaaaaacaagaaaaggaggaagg

SEQ ID NO: 668758 - DNA, 319 bp, Homo sapiens
tcttaatgggactcttttaataagtcaaacatttttgcatctaagtatattgatgagcgccactttatctcaaatgtttacacatactagggaaaagcatctgcagtttctgaactctttgtgaatcagtatcactttttcatgttacttcagagatcaatattcagtgcattggttttatttaccatcttttctcccagttgatcttgtaatcatcagaaagggaaaaaaaaatctccttcacaaagccctttgcgacaaacttaygtaaataataatctaaggacagctagaaaaaaaatacaccatacaggggaat

SEQ ID NO: 668759 - DNA, 654 bp, Homo sapiens
tgtcttggttgacacctaatacatgactaagaaactaagaaatcattttagacgtcgtttttgtgtctgtgttttatgctttgttggcttgaaaacttcatccaataaaactttagttatttttattaccatttcttcctttatgaccccacagcatcctccatgtgccagggtccaaatcatctttaacccggactattstatcagtacccaaatatattctttcatcaaaatatattctttctcttctctggctgtaatctcattcatttccaggctacttcttttcaaactaaaaagcaaatataatcacactattctctttcttcaaacactttcccaattcctagagtaaaatcccccttttataacatataaggcctcagtgacctaccctcaggacttctttaattattctcccatattgtcctattatgtacctgttccatcatccttacaaccctcagaactccctaatctgttttaatgccacattgttatgctcttaatttcctttgataaaatgattctttccattcataaactagttgattaccacaacttcttaagtattctattgaagtttatcttattagtccatttcacactgctataaagatactacctgagaatggataatttataaacaaaaga

SEQ ID NO: 668760 - DNA, 670 bp, Homo sapiens
tgtaattttctcactcagcttcacgtacagtattttcttggttattactaaacatgcaacagatacggtttgttctatatcttcctcatgcttttggtcagatgccattatcccagtgaggttttccatagccactttattcaaaktccaaacaatctgtccccttagacattctccattcttaattttttgccattgtacttactacagtctaacacactatacatgttacatttttgcttattgtttattgtatagtccctagaatattagttccctgaggacagagatttctgtaagcttttccaaagatgtatccccaaagcctagaatgctacctggcaacaaatacttgttataatgaattagaagtgggtagattcacacatcagagacagcgtagtgtatataatgattttttaaagcattagagtcatagatattaggatttgtattatgtcttcaccatttacaattatgctaccctcaacaagttgtttaatctttccattcctcagtttcctcatgactcatatattggaaatattgtctaccttagagctcttccaagagtaatattgagacaatgtttcaacaatgtttagcacattgctgaatattaatacattatttctattaatgtaagaaatttcatagacttgctagaaat

SEQ ID NO: 668761 - DNA, 670 bp, Homo sapiens
tgtaattttctcactcagcttcacgtacagtattttcttggttattactaaacatgcaacagatacggtttgttctatatcttcctcatgcttttggtcagatgccattatcccagtgaggttttccatagccactttattcaaattccaaacaatctgtccccttagacattctccattcttaattttttgccattgtacttactacagtctaacacactatacatgttacatttttgcttattgtttattgtatagtccctagaatattagttccctgaggacagagatttctrtaagcttttccaaagatgtatccccaaagcctagaatgctacctggcaacaaatacttgttataatgaattagaagtgggtagattcacacatcagagacagcgtagtgtatataatgattttttaaagcattagagtcatagatattaggatttgtattatgtcttcaccatttacaattatgctaccctcaacaagttgtttaatctttccattcctcagtttcctcatgactcatatattggaaatattgtctaccttagagctcttccaagagtaatattgagacaatgtttcaacaatgtttagcacattgctgaatattaatacattatttctattaatgtaagaaatttcatagacttgctagaaat

SEQ ID NO: 668762 - DNA, 670 bp, Homo sapiens
tgtaattttctcactcagcttcacgtacagtattttcttggttattactaaacatgcaacagatacggtttgttctatatcttcctcatgcttttggtcagatgccattatcccagtgaggttttccatagccactttattcaaattccaaacaatctgtccccttagacattctccattcttaattttttgccattgtacttactacagtctaacacactatacatgttacatttttgcttattgtttattgtatagtccctagaatattagttccctgaggacagagatttctgtaagcttttccaaagatgtatccccaaagcctagaatgctacctggcaacaaatacttgttataatgaattagaagtgggtagattcacacatcagagacagcgtagtgtatataatgattttttaaagcattagagtcatagataytaggatttgtattatgtcttcaccatttacaattatgctaccctcaacaagttgtttaatctttccattcctcagtttcctcatgactcatatattggaaatattgtctaccttagagctcttccaagagtaatattgagacaatgtttcaacaatgtttagcacattgctgaatattaatacattatttctattaatgtaagaaatttcatagacttgctagaaat

SEQ ID NO: 668763 - DNA, 670 bp, Homo sapiens
tgtaattttctcactcagcttcacgtacagtattttcttggttattactaaacatgcaacagatacggtttgttctatatcttcctcatgcttttggtcagatgccattatcccagtgaggttttccatagccactttattcaaattccaaacaatctgtccccttagacattctccattcttaattttttgccattgtacttactacagtctaacacactatacatgttacatttttgcttattgtttattgtatagtccctagaatattagttccctgaggacagagatttctgtaagcttttccaaagatgtatccccaaagcctagaatgctacctggcaacaaatacttgttataatgaattagaagtgggtagattcacacatcagagacagcgtagtgtatataatgattttttaaagcattagagtcatagatattaggatttgtattatgtcttcaccatttacaattatgctaccctcaacaagttgtttaatctttccattcctcagtttcctcatgactcatatattggaaatattgtctacctyagagctcttccaagagtaatattgagacaatgtttcaacaatgtttagcacattgctgaatattaatacattatttctattaatgtaagaaatttcatagacttgctagaaat

SEQ ID NO: 668764 - DNA, 590 bp, Homo sapiens
gattagatttagagtttggttttcataattcatcaactggtcatacaactttttctaatttttaargttatacagctaattctaaaatatctaaaaatttccatcatctttatttgaattacttggcatatgataggcaatctgctccactgtaaccatttatgttaaagctatgtctttggattataatgtaatccttttggggacaccttaaaataataattaggtatccaaatttaaggttctgtcacaactacaaggtgtttaactgaggcaagtaactgggtgaatagttatcttctctgatgactaagtccactcatatagacgttaagaactattaatgtatcacactccacttcgttgtgtaaaattgacaaatttcttttgacactaatcacaagatgcatcatgaattcagaaatattgaagtgtgaaggtaatatccattttatgattgaatcatgtgctaaatactgcatgcatcttatttaatactgcatctcatttaacattcacagcaactttataagattgctattaaaaatattcctattttatggatgagaaaactcaggctcagggagggt

SEQ ID NO: 668765 - DNA, 1118 bp, Homo sapiens
caagaggtttgcataggaataattgattgtctgraacaagatgccgcagatggatatttaatttggcacactttctgaagggctagatggacctagagtctagaaaatcgtcatatccctttaactctacccacttctgtaaatagagtctaagcagatcatctcagctagggaaaaagtctgattcaaggatgtgcctcaaagcattatttttaaatgtggggtgcgggggggacaaccaaaagtaggagtaaactcagagtgatagaatagaatactgtacagccatttaaaatattcttttttttctttttatttatttatttatttatttatttatttatttatttattatactttaagttttagggtacatgtgcacaatgtgcaggttagttacatatgtatacatgtgccatgctggtgtgctgcacccactaactcatcatctagcattaggtatatctcccaatgctaaccctttaatattctttaaaataactttgtaataacaggaatgagtgttcatgacatgatgttaaagtaaaaaaactagaggccgggcgcggtggctcatgcccgtgatcccagcactttgggaggctgaggcaggcggatcacaagatcaggagttcgggaccagcctggccaacatggcaaaaccccatctctactaaaaatacaaaaaaattagccaggtgtggtggcgggtgcctgtgatcccggctacttgggaggctgaggcaggagaatcgcttgaacccaggagggggggttgcagtgggccaagattgtgccactacactccagtctgggggacaagaatgagactttgtctcaaaaaaaaaagccaggaaccacaactgtgtgctatgtgtaatatgtaaccaaatacgtataatagtgtaaacagtacacacgtgtatggaatactaagcctaaatgtttttttctgtatctttggggttgagggtaatttctgttttcttctttattctttttagtgttttgcatgatttctgtacctgagctacttaggttttgccatgaggaaagcaaaaacaaagtttttttaaatgatcacagttaatacgtgggagtcctgaccatgtactaga

SEQ ID NO: 668766 - DNA, 1384 bp, Homo sapiens
tttttttaaactctccactatgttaatgaggaccattyttcttctgctttgcaaaccctgctcaccccttcagacgatgcttaaagaccctctcctcctggacatctttctgattctcccagaaaaagtgaatggcagggtcttttgtgctttcaggcctgggatttatggttaggttataacttactaatttatgtctctttgttcgtccatctgtgtgtctgtccctccacctgtggcttctaagcctgactacaaaatgtcctggagggattgctaaaaacaaagaaagaaacaagcaagcaaacgatctccatcactacaggcatttgcgtatatttttacattcccagggggttctgaagtaccctaacatctgaaaacagctctgtattgttgctcttccttgttcagatctggctgaaatgtcacctcctaaaagaagtgttccctgaccttttgtagtattaatgacaaggttggaagaggtggctcgaggatttatcactggaggctttgaatgccaggttaggcaagacaacgggacatggctctgtgggcttcttagggtttttaccagagggagggaggtgattcctggtgagtgttggcagtgttagtccagcaggttggtgcaagatgggtgcaggagaggtgagggctagatgtggggagttcctactaagagttcttgtagcaacttgggaatgaggaaaccggggcttgggctggcttgaaggctgtgagcatggagcttcggggagaggagagaaggggacaatgtcaacacgtcttagacaggtccaggcactgattagctatggggatggctgtgatgaatgagtcagacatggcactcagagttctagccttggcaccagaaggctggtgctactgccagaggtagaaaaggcaggggagagctcctctcctgagggtagatgatggatcaacactgggacccactgagtttgagatcctaagaggatcatctaagagtggactgagaggaaggtcaaaagaggggaaactagagaggaatccctggaaacacacgatgcctcatttcctgagttcaagaaatagctcttccggcatctcctacgtgcaggcccccacgccaagtgtgcgggtgaagtgatggattaaacgggtgtgattcttgccctcatggaacttcccctgtagtgagggagagagaggaaagaaatgtaccaaatattttccaaaattaataatggctgggcgcagtggctcacacctgtaatcccagcactttggaaggcggaggtgggaggattacttgaggccaggagtttgagaccagcctgggcaacatagacctcgctaacaataaaaaatattggccgggcgtggtggctca

SEQ ID NO: 668767 - DNA, 1384 bp, Homo sapiens
tttttttaaactctccactatgttaatgaggaccatttttcttctgctttgcaaaccctgctcaccccttcagacgatgcttaaagaccctctcctcctggacatctttctgattctcccagaaaaagtgaatggcagggtcttttgtgctttcaggcctgggatttatggttaggttataacttactaatttatgtctctttgttcgtccatctgtgtgtctgtccctccacctgtggcttctaagcctgactacaaaatgtcctggagggattgctaaaaacaaagaaagaaacaagcaagcaaacgatctccatcactacaggcatttgcgtatatttttacattcccagggggttctgaagtaccctaacatctgaaaacagctctgtattgttgctcttccttgttcagatctggctgaaatgtcacctcctaaaagaagtgttccctgaccttttgtagtattaatgacaaggttggaagaggtggctcgaggatttatcactggaggctttgaatgccaggttaggcaagacaacgggacatggctctgtgggcttcttagggtttttaccagagggagggaggtgattcctggtgagtgttggcagtgttagtccagcaggttggtgcaagatgggtgcaggagaggtgagggctagatgtggggagttcctactaagagttcttgtagcaacttgggaatgaggaaaccggggcttgggctggcttgaaggctgtgagcatggagcttcggggagaggagagaaggggacaatgtcaacacgtcttagacaggtccaggcactgattagctatggggatggctgtgatgaatgagtcagacatggcactcagagttctagccttggcaccagaaggctggtgctactgccagaggtagaaaaggcaggggagagctcctctcctgagggtagatgatggatcaacactgggacccactgagtttgagatcctaagaggatcatctaagagtggactgagaggaaggtcaaaagaggggaaactagagaggaatccctggaaacacacgatgcctcatttcctgagttcaagaaatagctcttccggcatctcctacgtgcaggcccccacgccaagtgtgcgggtgaagtgatggattaaacgggtgtgattcttgccctcatggaacttcccctgtagtgagggagagagaggaaagaaatgtaccaaatattttccaaaattaataatggctgggcgcagtggctcacacctgtaatcccagcactttggaaggcsgaggtgggaggattacttgaggccaggagtttgagaccagcctgggcaacatagacctcgctaacaataaaaaatattggccgggcgtggtggctca

SEQ ID NO: 668768 - DNA, 641 bp, Homo sapiens
tgcagcctcgacctccaaggctcaagggatcctcccacctcagcctcccaagtagctgggactacaagtgtgtgccacmatgcctagctagtttttaaaaatgtttgtttatttatttatttatttatttatttatttatttatttttttgagatggaatctcgcattgtcacctgggctggagtgcagtggcacaatcttggctcactgcaacctccacctcccaggttcaagcaattctcctgcctcagcctcccaagtagctgggattacaggcacccgccaccacgcccagctaatttttttgtatttttagtagagatggggtttcactgtgttggccaggcgggtcttgaattcctgaccttgtgatccacccgcctgggcctcccgaagtgctgggattacaggtgtgaggcaccacgtccggcttaaaaattttctgtagagacgagggtctccctgtattggccaggctgttcttgaactcctggcctcaagtaatcctccttccttggcttcaaaaagtgctgggagtacaggtgtgagccaccatgctcagcagaattcaattctgttgagagtatttgaccttagggcaggtaggtagtggctaattatattgccccacattgcgggct

SEQ ID NO: 668769 - DNA, 641 bp, Homo sapiens
tgcagcctcgacctccaaggctcaagggatcctcccacctcagcctcccaagtagctgggactacaagtgtgtgccaccatgcctagctagtttttaaaaatgtttgtttatttatttatttatttatttatttatttatttatttttttgagatggaatctcgcattgtcacctgggctggagtgcagtggcacaatcttggctcactgcaacctccacctcccaggttcaagcaattctcctgcctcagcctcccaagtagctgggattacaggcacccgccaccacgcccagctaatttttttgtatttttagtagagatggggtttcactgtgttggccaggckggtcttgaattcctgaccttgtgatccacccgcctgggcctcccgaagtgctgggattacaggtgtgaggcaccacgtccggcttaaaaattttctgtagagacgagggtctccctgtattggccaggctgttcttgaactcctggcctcaagtaatcctccttccttggcttcaaaaagtgctgggagtacaggtgtgagccaccatgctcagcagaattcaattctgttgagagtatttgaccttagggcaggtaggtagtggctaattatattgccccacattgcgggct

SEQ ID NO: 668770 - DNA, 454 bp, Homo sapiens
  misc_feature 3, 4, 5, 6, 7, 8, 9, 10, 11, 12, 13, 14, 15, 16, 17, 18,19, 20, 21, 22, 23, 24, 25, 26, 27, 28, 29, 30, 31, 32,33, 34, 35, 36, 37, 38, 39, 40, 41, 42, 43, 44, 45, 46,47, 48, 49, 50, 51, 52, 53, 54, 55, 56, 57, 58, 59, 60,61, 62: n = A,T,C or G
  misc_feature 63, 64, 65, 66, 67, 68, 69, 70, 71, 72, 73, 74, 75, 76, 77,78, 79, 80, 81, 82, 83, 84, 85, 86, 87, 88, 89, 90, 91,92, 93, 94, 95, 96, 97, 98, 99, 100, 101, 102: n = A,T,C or G
ctnnnnnnnnnnnnnnnnnnnnnnnnnnnnnnnnnnnnnnnnnnnnnnnnnnnnnnnnnnnnnnnnnnnnnnnnnnnnnnnnnnnnnnnnnnnnnnnnnnnngtctccaactcctgacctcaagtgatctgccgccctcggcctcccaaagtgctgggattacaggtgtgaaccaccacacccagcccaggcatttctttatagcagttcaagaacagactaatacagacttctgtggtacaaaaacagcctcccaggtactggtgactggtgttagagagctgcttgcrgtctacctcatccctctcccaccagctcacacccccacaatactctttttcttccaattgtcataatattttgctgtatctatttaccattaaccatacactagacagcctttccttttctccttttaataaactcactttttaaacttgaatgtggccatttt

SEQ ID NO: 668771 - DNA, 597 bp, Homo sapiens
gtgatcacaaagatgttaagactcacagtgaccaccttatataccatctctggacacacacaattttacaatttcargaggatcagggactgcagtttaaaaacctattctttacaagatagcttaaccaggacgtcatgcggatgaataaatatgcaataagtgcgaaggacatgttttaacagaagagtagtgtggcagctttgttttacctgctttaaaactttttataatttaaaaaagcatagtactggcacaaacacacaaattaatcaatggaatagaataaggaaacagatccttatttttgtagatttgcaaacaatatatgatacaggtgatgataatccttagggttcaatcagagaagcagaaccactgtcaatactatagagtggtagttcttaatgggaataattttgccccccagcggacatttgaaaatgtgtgcagacatttttgtagtaacaactaggtagaaaagtgctaatagcatttagtgggtagaggccagagatgctgctagacatcctacaatgcataggacaacctccacaacaaagaattatccaacccaaaatgtcaatagtgatgagg

SEQ ID NO: 668772 - DNA, 597 bp, Homo sapiens
gtgatcacaaagatgttaagactcacagtgaccaccttatataccatctctggacacacacaattttacaatttcaagaggatcagggactgcagtttaaaaacctattctttacaagatagcttaaccaggacgtcatgcggatgaataaatatgcaataagtgcgaaggacatgttttaacagaagagtagtgtggcagctttgttttacctgctttaaaactttttataatttaaaaaagcatagtactggcacaaacacacaaattaatcartggaatagaataaggaaacagatccttatttttgtagatttgcaaacaatatatgatacaggtgatgataatccttagggttcaatcagagaagcagaaccactgtcaatactatagagtggtagttcttaatgggaataattttgccccccagcggacatttgaaaatgtgtgcagacatttttgtagtaacaactaggtagaaaagtgctaatagcatttagtgggtagaggccagagatgctgctagacatcctacaatgcataggacaacctccacaacaaagaattatccaacccaaaatgtcaatagtgatgagg

SEQ ID NO: 668773 - DNA, 647 bp, Homo sapiens
atttagagttaggctgtcaatgggcagctctgggtaagacagagaatcctaaggtagttaaaactactgtaaattgaagttactgactaacttgaaaaatgagactgaaaaacaggaacatgaaataataaggctttgtatttcttgcattcttttttatgtatttctttattttttgagacaaggtctcagtctgttgcccagactggagtgygctggtgcaatcacggctcactgcagccttgaccttctggcctcaggggatcctcccacctcagcctcctaagtagctgcaactacaggtatgcagcaccatgcctggctaatttttctttttcttttttgtagaatcttgctgcgtttcccaggctggtctttaactcctgggctcaagcagtcctcccacctcggcctcccaaagtgctgggattacaggcgtgagccaccatgcccaaaggccttgtattttccattcacctttcttccaagcactttgaaatatattataatatagtttgcacagatctcaaagcctcaaaattctttgtcttctaagtattttttgttccccttcctaacctaattaaataaggcttttgtttccagtacttacatttccctctctgggctattttgggaaacagtga

SEQ ID NO: 668774 - DNA, 647 bp, Homo sapiens
atttagagttaggctgtcaatgggcagctctgggtaagacagagaatcctaaggtagttaaaactactgtaaattgaagttactgactaacttgaaaaatgagactgaaaaacaggaacatgaaataataaggctttgtatttcttgcattcttttttatgtatttctttattttttgagacaaggtctcagtctgttgcccagactggagtgtgctggtgcaatcacggctcactgcagccttgaccttctggcctcaggggatmctcccacctcagcctcctaagtagctgcaactacaggtatgcagcaccatgcctggctaatttttctttttcttttttgtagaatcttgctgcgtttcccaggctggtctttaactcctgggctcaagcagtcctcccacctcggcctcccaaagtgctgggattacaggcgtgagccaccatgcccaaaggccttgtattttccattcacctttcttccaagcactttgaaatatattataatatagtttgcacagatctcaaagcctcaaaattctttgtcttctaagtattttttgttccccttcctaacctaattaaataaggcttttgtttccagtacttacatttccctctctgggctattttgggaaacagtga

SEQ ID NO: 668775 - DNA, 647 bp, Homo sapiens
atttagagttaggctgtcaatgggcagctctgggtaagacagagaatcctaaggtagttaaaactactgtaaattgaagttactgactaacttgaaaaatgagactgaaaaacaggaacatgaaataataaggctttgtatttcttgcattcttttttatgtatttctttattttttgagacaaggtctcagtctgttgcccagactggagtgtgctggtgcaatcacggctcactgcagccttgaccttctggcctcaggggatcctcccacctcagcctcctaagtagctgcaactacaggtatgcagcaccatgcctggctaatttttctttttcttttttgtagaatcttgctgcgtttcccaggctggtctttaactcctgggctcaagcagtcctcccacctcggcctcccaaagtgctgggattacaggcgtgagccaccatgcccaaaggccttgtattttccattcacctttcttccaagcactttgaaatatattataatatagtttgcacagatctcaaagcctcaaaattctttgtcttctaagtattttttgttcccctycctaacctaattaaataaggcttttgtttccagtacttacatttccctctctgggctattttgggaaacagtga

SEQ ID NO: 668776 - DNA, 682 bp, Homo sapiens
agtctttctacattttgcagatctctaagtcttgcttaataaaagacagctggattctcatttctgcttctgtgttcaacttgttacagtatatttcatgtaacctctgagaarttcaactgtacactcatgacagaatagacccaaaaatgtaaatgttgttttatgatgaaaacagttttgggccgggcacggtggctcacgcctgtaatcccagcactttgggaggctgaggcaagtggatcacttgaggtcaggggttcaagaccagcgtggccaacatggtgaaaccccatctctactaaaaatacataaaaattagctgggcatggtggcgtgtgcctgtaatcccagctcctcgggaggctgaggcaggagaatcgcttgaacccctgaggcggaagttatggtgagctgatattgcgccactgccttctagcctgggtgagagagcaagactctatcgcaaaaaaaaaaaaaaaaaaaaagttttgacctcacagccctcctaaaaaggtcttgacaccctaagggtacccagcccacattttgattagtctaaactacactggaataagtattatcttaattgggtttggttgtttgcctctgcttgacattattcgtgtttgtgagtctgtcacagtgacacgtttctctaaaggctgccgtccttttattg

SEQ ID NO: 668777 - DNA, 682 bp, Homo sapiens
agtctttctacattttgcagatctctaagtcttgcttaataaaagacagctggattctcatttctgcttctgtgttcaacttgttacagtatatttcatgtaacctctgagaagttcaactgtacactcatgacagaatagacccaaaaatgtaaatgttgttttatgatgaaaacagttttgggccgggcacggtggctcacgcctgtaatcccagcactttgggaggctgaggcaagtggatcacttgaggtcaggggttcaagaccagcgtggccaacatggtgaaaccccatctctactaaaaatacataaaaattagctgggcatggtggcgtgtgcctgtaatcccagctcctcgggaggctgaggcaggagaatcgcttgaacccctgaggcggaagttatggtgagcygatattgcgccactgccttctagcctgggtgagagagcaagactctatcgcaaaaaaaaaaaaaaaaaaaaagttttgacctcacagccctcctaaaaaggtcttgacaccctaagggtacccagcccacattttgattagtctaaactacactggaataagtattatcttaattgggtttggttgtttgcctctgcttgacattattcgtgtttgtgagtctgtcacagtgacacgtttctctaaaggctgccgtccttttattg

SEQ ID NO: 668778 - DNA, 682 bp, Homo sapiens
agtctttctacattttgcagatctctaagtcttgcttaataaaagacagctggattctcatttctgcttctgtgttcaacttgttacagtatatttcatgtaacctctgagaagttcaactgtacactcatgacagaatagacccaaaaatgtaaatgttgttttatgatgaaaacagttttgggccgggcacggtggctcacgcctgtaatcccagcactttgggaggctgaggcaagtggatcacttgaggtcaggggttcaagaccagcgtggccaacatggtgaaaccccatctctactaaaaatacataaaaattagctgggcatggtggcgtgtgcctgtaatcccagctcctcgggaggctgaggcaggagaatcgcttgaacccctgaggcggaagttatggtgagctgatattgcgccactgccttctagcctgggtgwgagagcaagactctatcgcaaaaaaaaaaaaaaaaaaaaagttttgacctcacagccctcctaaaaaggtcttgacaccctaagggtacccagcccacattttgattagtctaaactacactggaataagtattatcttaattgggtttggttgtttgcctctgcttgacattattcgtgtttgtgagtctgtcacagtgacacgtttctctaaaggctgccgtccttttattg

SEQ ID NO: 668779 - DNA, 587 bp, Homo sapiens
gacgaaggcaaagaagctgcaacatctttcgaacctttgggctcacgccattgatacctctgattctgaagacaaacgccaatttgggttctgcaggtacatagaagttgccagcttttcttgccatcctcgccattcgaatttcagttctgtacatctgccaaagactattgacttacaggtcaggtctgactttgagatagccatcgaggggtgaggcccacaggcctatagggcactgaagakggagaaaggggggtgtctgggaggtatgcaaagagaaagtggtaagtggcgggccctaaccctgcaataccctatccctgccctttagtaagccatgttccggtgagtgttgttctctgagcaattacattcatcctttcttttcttggggaggactcatgggtaaaaagagttggcagctttcttcccacaagacaagagcgatatcctctcctttatggactaaggaagaaatgtggaatctggggaagggtctgtccttaactctcaccttggttttcagaaatgaggaaattgacctcatttgtcttttacccaaatcaattttcatccctttggca

SEQ ID NO: 668780 - DNA, 587 bp, Homo sapiens
gacgaaggcaaagaagctgcaacatctttcgaacctttgggctcacgccattgatacctctgattctgaagacaaacgccaatttgggttctgcaggtacatagaagttgccagcttttcttgccatcctcgccattcgaatttcagttctgtacatctgccaaagactattgacttacaggtcaggtctgactttgagatagccatcgaggggtgaggcccacaggcctatagggcactgaagagggagaaaggggggtgtctgggaggtatgcaaagagaaagtggtargtggcgggccctaaccctgcaataccctatccctgccctttagtaagccatgttccggtgagtgttgttctctgagcaattacattcatcctttcttttcttggggaggactcatgggtaaaaagagttggcagctttcttcccacaagacaagagcgatatcctctcctttatggactaaggaagaaatgtggaatctggggaagggtctgtccttaactctcaccttggttttcagaaatgaggaaattgacctcatttgtcttttacccaaatcaattttcatccctttggca

SEQ ID NO: 668781 - DNA, 587 bp, Homo sapiens
gacgaaggcaaagaagctgcaacatctttcgaacctttgggctcacgccattgatacctctgattctgaagacaaacgccaatttgggttctgcaggtacatagaagttgccagcttttcttgccatcctcgccattcgaatttcagttctgtacatctgccaaagactattgacttacaggtcaggtctgactttgagatagccatcgaggggtgaggcccacaggcctatagggcactgaagagggagaaaggggggtgtctgggaggtatgcaaagagaaagtggtaagtggygggccctaaccctgcaataccctatccctgccctttagtaagccatgttccggtgagtgttgttctctgagcaattacattcatcctttcttttcttggggaggactcatgggtaaaaagagttggcagctttcttcccacaagacaagagcgatatcctctcctttatggactaaggaagaaatgtggaatctggggaagggtctgtccttaactctcaccttggttttcagaaatgaggaaattgacctcatttgtcttttacccaaatcaattttcatccctttggca

SEQ ID NO: 668782 - DNA, 628 bp, Homo sapiens
agggcaatagattggttttgcactcaggtctgccagacaccacgagaacctgaccttttaaccatcatgttctgcctggtaaacgtgctcaaggaggggttctagaatacatgggaaggtcagcccctggctcatctggcaattaaaggcaaggcactttctcatggagctttgaattctccagctgtaaaattaatgggttagctctaagcccttgaattaaccaggtagccctgttttagtggtgagctccctgtccctggatgtaagcttgaagcatagctagggaaccacatggcaacaacatgacagaaggggttcaatcacaggacagcaagatgggtccacacgacctttactgttctttcttctatgagagtcttatgccaatttgtcttaaaaattgaaattttcaaattttcaaattgaaaaggccaatgcttgtgctccctaggacctgatcttgccaattttgaggctgctctatttgtctgctgcaatttgctatggtgactcagcaggaggcagggaggaggcacgacagccagcgctcagccttcctcctgaagatgttgcttggcwaagggaggggacactgggtgggaggtccccaagataattgctctga

SEQ ID NO: 668783 - DNA, 671 bp, Homo sapiens
cagttcccagagaactcttagcccagaagagaaaatagagtacacatatatacagatagaacctatggtcaaaattgtgaatgtgagactggagagatcatttccctagaaaacaaagcaggctacctggaggaggtggcataggcatgggttcaggaggagttgtaaaacycagtggtccttggctgcatgattaacagagcatttcatcaactccctaatctggtgaggtcataaaaaatgtcatctgatactgtgttcttagatagaaagcattcacatcataaaaatgataattgtccctaagttaatttataaactctaggcaatcctaataaaaataccatcaggttttcctttttcccgcagctgaaaaaattgattataaagttcattgggaagaacaacaaatcagaatagtggggaaaatcaaaaaggaagaacaaagaggaaggcttaccctaacagatactaaagcatgctataaagcctctataagtgaaatgaaacagaataggaaagtcagaaaaagacccaattgcatatgcaaatgtaaaatattataaaggcaacagctcaaatcagtgggaaagtaatagacttttagatattgagataattagagagtcatatagtcatataaaaaaagctaaaattggattcattcctca

SEQ ID NO: 668784 - DNA, 605 bp, Homo sapiens
taaaaccgggaaatcctgagcaaaacaggacaagttagacattcttacaattgaggactgtaaaactgtaaaggaggaatgagcactatctctttatactagtgtggagtgatcatcagaatacatagttacatttaaaaaatgcaagctagaggaaagtatttagagtgtactactgtgtaagtaaagggtgaatatgaaacatacacagacacacacacctgcttatattaaaaagaaagaataaaaaataaaccatcaccattattttaagtcgctaaatataaagagataaagagaatagagtagaaggtacagaattacaagctagatttctgtggataatcttgtttggtagatttgacttggaatcgtgtaaatatttaatacaattacaaacttaaattwtaaaaagcaattcctaaaaataaaaaatacaacttctgcttcaaaccgtgctataataactgggtttggaccagcccttccccaattaagaaatattaaagtaactatttttaaatgttgcagttgtgcaacatttaaaatagttgccctggctttctactagaaggcaccgctccagaccacacaacgcagagagg

SEQ ID NO: 668785 - DNA, 622 bp, Homo sapiens
ttggaaggatgctgtttgaccacggagttttctgggtgacctttcataagaattgcatgcaaatgtcctggcgaaaggttgcggggattggtctggaaaggttatctccattcgtctagaccgctgtcttcacaaaaagagcaagtgcaggcaaggagcccagggctggagaacagtggaggataaagggcatctagtctaccacccttcgtcctctgggccccacctgcaggtgtccacttccatgagcttctggcctagaataaccccgctggctgaggcaccatcctggggcttcctgcagatcgcctggtccctcagaacaggctctctttcagcggacgtaataacatcccccaaytgccctgagataggccatgcggaggaatctcccctctgaacaactgaggctctgttaataggttcttaaagggttttttgaggggaaaacgtattaatggtttgtcctccaaacaaccctttttaaataactgccctttctgaaccagaaaaaaaaagaatctttctggaaactaggttgagattaatgggttccttattgccacagagcagtctgataaccccttatccgcagtctcaggcaggcaatgggtgagagatg

SEQ ID NO: 668786 - DNA, 622 bp, Homo sapiens
ttggaaggatgctgtttgaccacggagttttctgggtgacctttcataagaattgcatgcaaatgtcctggcgaaaggttgcggggattggtctggaaaggttatctccattcgtctagaccgctgtcttcacaaaaagagcaagtgcaggcaaggagcccagggctggagaacagtggaggataaagggcatctagtctaccacccttcgtcctctgggccccacctgcaggtgtccacttccatgagcttctggcctagaataaccccgctggctgaggcaccatcctggggcttcctgcagatcgcctggtccctcagaacaggctctctttcagcggacgtaataacatcccccaattgccctgagataggccatgcggaggaatctcccctctgaacaactgagrctctgttaataggttcttaaagggttttttgaggggaaaacgtattaatggtttgtcctccaaacaaccctttttaaataactgccctttctgaaccagaaaaaaaaagaatctttctggaaactaggttgagattaatgggttccttattgccacagagcagtctgataaccccttatccgcagtctcaggcaggcaatgggtgagagatg

SEQ ID NO: 668787 - DNA, 558 bp, Homo sapiens
tgaagcggtcttcactgaaagaaagtcatttgaaactattcattcaaatacttggctatcactaaattaacccttaccaaaattcttcacttatagaaatgaaatagcaaaaacattccaattccacatttgattttaacttgttcctttccagttaagctgttacctctgttgaggctgcccagttctccccaagatactccacatttgctttatgattcataaagtactcctatgtatatgtaagctgaggctctcacttgatyctgctaaccagaagtagcaaaacagacaccccactgtataggtggataagcaaaaactacgagggctaagagctcgggagcgagactaactccacagcccccaactaactgagctggtaacttcaaaaccacagccacatttcaagccatgaacactgaaggttttgttttttcaaagttcctaagagcttacgtggagtgcttcgggcactcgaaggtacttggtctcctcggtggtgagggccttgtggggtgtgtagccgcatctctcagacctggctgttgctcaaaa

SEQ ID NO: 668788 - DNA, 600 bp, Homo sapiens
tgccaccatgcctgcctaatttttgtattttagtagagacagggtttcaccatgttggccaggctggtctcaaactcctgacctcaggtgatctgccctccttggcctcccaaagtgctgaagttacagttatgagccaccatgcccagcccagaaattgaaattttctgaattaaggatttactgaaagctattttagctgggcacagtggctcatgcctgtaatgggtacctgggaggctgaggcaggagaatcacttgaacccaggaggcagggattgcagtgaaccgagatcgtgccactgcactccagcctgggcaacagagcaagacttcatctcaaaaaagaaaagaaaacgatttcaagtaataatgggaggcattttggcatgagagagaatctggactttggaagtaattaatctagatttcagtcttcactccaccatttaccattatctagatattcctagacaaggcgtgtaactttttgaatctttggctttctcagtgatgaaaataagggtttcaatacttacagtatctrttttattacacggtaatagatgtttagtaaatgggagctgctggtacttaatt

SEQ ID NO: 668789 - DNA, 540 bp, Homo sapiens
acctctttcttcggcctctcagctcccttggcctttggaggtaggttagcttagatctgctcacagcagaacaccacgctttctgcctgaaggaatttcttttttcttttcttttttttttttttgagatggagtttcactcttgttgcccaggctggagtgcaatggtgtgatctcagctcactacaacctctgcctcctgggttcaagcgattctcctgcctcagcctcccgactagctgggattacaggcatgcgccaccacacctggctaattttgtatttttagtagagacggggtttctccatgttggtcaggctggtctcgaactcccgacctcaagtgatccgcccacctyggcctcccaaagtgctgcgattacaggcgtgagccactgtacccagcccgcctgaaggaatttctaagctgctaggaaggtaaggggaacccaaacagagtccagcagtctcacagaggcaagagacagagataggagtttggggaagttgaagtggctagattgcaggtaagtactgaga

SEQ ID NO: 668790 - DNA, 683 bp, Homo sapiens
  misc_feature 2, 3, 4, 5, 6, 7, 8, 9, 10, 11, 12, 13, 14, 15, 16, 17, 18,19, 20, 21, 22, 23, 24, 25, 26, 27, 28, 29, 30, 31, 32,33, 34, 35, 36, 37, 38, 39, 40, 41, 42, 43, 44, 45, 46,47, 48, 49, 50, 51, 52, 53, 54, 55, 56, 57, 58, 59, 60,61: n = A,T,C or G
  misc_feature 62, 63, 64, 65, 66, 67, 68, 69, 70, 71, 72, 73, 74, 75, 76,77, 78, 79, 80, 81, 82, 83, 84, 85, 86, 87, 88, 89, 90,91, 92, 93, 94, 95, 96, 97, 98, 99, 100, 101: n = A,T,C or G
cnnnnnnnnnnnnnnnnnnnnnnnnnnnnnnnnnnnnnnnnnnnnnnnnnnnnnnnnnnnnnnnnnnnnnnnnnnnnnnnnnnnnnnnnnnnnnnnnnnnnttaggataatggcctctggctgcatccatgtagctgtaaaggacgtgatttcattcctttttatagctgcgagtgaattttcagtttaaatgtatgaataaggcttcccaggaaaatctcccagagtagatcgagcccaggaagaaggcactcagcctgggagcccaggcccgttctctgagctcccggaagccaggccaggacacctggagggaagtggaacagggtcacagagcagacaggaagagggaggtgggccctggagacaaatgcttgggggaccacatagctgcatctgcactgaccttggctccagggatccctggtggccctgggggcccctgtggtccgggaggcccctgtgtgtgagagtgaagccggtcagtgtcatgggttaggcagggcctcccttcgytacccatccagctccccacctggaaccaagtccccgtccagctgagcagagcaggggcagggtccttggggactgcttcttccccagtcaggtcaggccacactgtgcaaggctttatctggcctcccaggcttgggggaggccaggaggtgacacccagcatttga

SEQ ID NO: 668791 - DNA, 433 bp, Homo sapiens
ggaggctgaggtggcaggatcacttgaggtcaggagtttgagaccagcccggccaacatggtgaaaccccgtctctactaaaaatataaaaattagccaggtgtggtggcgcatgcctgtagtcccagctacttgggaggctgaggcaggagaattgcttgaacctgggaggaggaggttgcagtgagccgagatcacacccagcctgggcgacawgagtgaatctccatctcaaaaacaaaaacaaaacgaagtccatctcccaactccctgcactcacagggcttctcccacaaggctaggtcagcctgggacacatcatgcatgtgcctgccgtctgggccatgccacgccacaccgtcacgccacgccacgccacaccatgcatgcctgggggtgggtgccacagttactgccaacttgtacttcccca

SEQ ID NO: 668792 - DNA, 433 bp, Homo sapiens
ggaggctgaggtggcaggatcacttgaggtcaggagtttgagaccagcccggccaacatggtgaaaccccgtctctactaaaaatataaaaattagccaggtgtggtggcgcatgcctgtagtcccagctacttgggaggctgaggcaggagaattgcttgaacctgggaggaggaggttgcagtgagccgagatcacacccagcctgggcgacatgagtgaatctccatctcaaaaacaaaaacaaaacgaagtccatctcccaactccctgcactcacagggcttctcccacaaggctaggtcagcctgggacacatcatgcatgtgcctgcygtctgggccatgccacgccacaccgtcacgccacgccacgccacaccatgcatgcctgggggtgggtgccacagttactgccaacttgtacttcccca

SEQ ID NO: 668793 - DNA, 433 bp, Homo sapiens
ggaggctgaggtggcaggatcacttgaggtcaggagtttgagaccagcccggccaacatggtgaaaccccgtctctactaaaaatataaaaattagccaggtgtggtggcgcatgcctgtagtcccagctacttgggaggctgaggcaggagaattgcttgaacctgggaggaggaggttgcagtgagccgagatcacacccagcctgggcgacatgagtgaatctccatctcaaaaacaaaaacaaaacgaagtccatctcccaactccctgcactcacagggcttctcccacaaggctaggtcagcctgggacacatcatgcatgtgcctgccgtctgggccatgccacgccacaccgycacgccacgccacgccacaccatgcatgcctgggggtgggtgccacagttactgccaacttgtacttcccca

SEQ ID NO: 668794 - DNA, 701 bp, Homo sapiens
  misc_feature 222, 223, 290, 291, 308, 318, 362, 369: n = A,T,C or G
tggccagcgtcctggctgatcgcccaggctgtggcccgagggcrggagtccagcgcaagagtccgccagggctggaggcagccttcggcaggtcaagcgcgccctctagtgttccctggccgggcacgagagccagcaggatggacgttcattcagagaatcgttcccttcaccgttgttgatccattcagcgggtatttactgtgttctcgttaatgtacnngaggcgcttcggccactttgggatacggtagcaggagaacacatgccaggggtccctccccacttgnngagcctgtggcttgagnctggcagacnagaacaaaaaacgtcccacaaattgccagcttcactatgcctcngtggccnagggctagaagccggggctcccgttacccagacctggcctggtgggggtcaggggcaccgccttgaggaagggaggtgtgagtcgaagtcagaaggtgaagaggatgctgataagtggggagtttcagggggaacatccagagagggtgcacccaagatgggccgggatggtaagggcgtagggggaggtgagaagcctgtgtcctggagcacccagccttgaggaattggccatctcttgtccactctggagttccaccccgggtggctggacaaaggggcccacagccccacccacccaagctgagagccctccctgggctggaacctga

SEQ ID NO: 668795 - DNA, 593 bp, Homo sapiens
tgtcctggactgtgctgtctgcttctgaaagataagatgtttggttctctctctgttgcaatttccattgaaaccattaattttttggtttaggggaggtgtgtcctcagaaaacatcagtcctattaaaagtggcaggtgcggtggctcacgcctggaatcccagcactttgggaggccaaggtggacagatcacttgagatcagaagtttgagaccagcctggccaacatagtgagacctcgtctctactaaaaatacaaaaattagccaggcgtggtggcgggtgcctgtaaccccagctactcaggaaatcgaggcaygaaaaattgcttgaacccaggaggcagaggttgcagtgagtcgagatcgcaccactgcactccagcctgggcagcagacagaatgagactccgtctcaaacacaaaaacaaaaactcatgtgtttggggggaaaaaatcagtcatacaggagtcatgttatattttaatttgtagatgaatgcaggcacagaattccacaggcttgacctgtttgccggaacgttctgtgaccattttcctagcaagagagccagcgcacaagcctggctg

SEQ ID NO: 668796 - DNA, 593 bp, Homo sapiens
tgtcctggactgtgctgtctgcttctgaaagataagatgtttggttctctctctgttgcaatttccattgaaaccattaattttttggtttaggggaggtgtgtcctcagaaaacatcagtcctattaaaagtggcaggtgcggtggctcacgcctggaatcccagcactttgggaggccaaggtggacagatcacttgagatcagaagtttgagaccagcctggccaacatagtgagacctcgtctctactaaaaatacaaaaattagccaggcgtggtggcgggtgcctgtaaccccagctactcaggaaatcgaggcacgaaaaattgcttgaacccaggaggcagaggttgcagtgagtcgagatcrcaccactgcactccagcctgggcagcagacagaatgagactccgtctcaaacacaaaaacaaaaactcatgtgtttggggggaaaaaatcagtcatacaggagtcatgttatattttaatttgtagatgaatgcaggcacagaattccacaggcttgacctgtttgccggaacgttctgtgaccattttcctagcaagagagccagcgcacaagcctggctg

SEQ ID NO: 668797 - DNA, 2138 bp, Homo sapiens
aactaaaaaatgaggaattctacactactctgaactgtctttattccagaatgccgggacattctgcttcctgtcatcaccaaagagctgaaggagctgctggagcagaaggatgacatgcaacaccaggtcctggagaggaagtactgcgttgaattgctcaacagcatcttggaagtccttagctaccaggatgcggtgagtcctcctgatgatgtagatatcctggactcagactagggctaagttgattacattgtgaaatattgatactgatggatagcagctggagtctaaagataaaagtcaacggcttgctcagcaggcctacttttcctgtgactaacccccattgctgtgaaggatggctaggggactggagttaatcatgttagcattttgtctctgtgtgtcttgttggccaggctttctcagaatgtgggtatagacattattgcagccttttaagatggcttgtccacgtactcacgccctagtttgcaggggtgggaggaggagtttcctatgcctagacagcaagaaaactctcgtgtctgctttcttagctgatttacttcggttttgtttcttcagttaccttctgaaatgacaaaaatgattaagcctcttcctggatgagcagattgctggggctcagattccagagatagggtgtggagtaggatggtggtagggagatgcctgtggccgtgaagttactgtgtattttgtagacgtcattcagagattagctggggacggaaaccaaaggaaagtctcagtgggagtaagtggagggcttccaaagggctgaatctgcagaagataagccagatggggtggtgaagactgagaggtagtgattagacccaggcctggaattcttaagcattggaagatggaaggagggtgctggatctgacccaggttcctctggcagctcctctttgtccttgagtaatgtccaggaggtattcagtccttagatgggactggcttcagaggactacatagacccaaacaaccaatacatttttttctaagcatttgtgtgagcattgcccctttctctctcctccctagaacatcctcagagaagagctttctgaatgaactgtgtctattattgactgtaattcgaaaactctgcagagcaatgttcctttactggtcagatccatagtcaaccattatgatcaatttccttgcatactgtcttctcctgtctcttcctttctacacttaccatcccaattaagccgcttcttgtcttattactacatatgcatagcttgcttcattcattcatgcagaaatattaatacatatgacatacccggtgtgcgctaggcactgggaacaagaaaacctatccccaatatataacgactaaaatctagatgcatatttggggtacaagagctacaaagtgtgtgtgtgtgtgtgtgtgtgtgtgtgtgtgtgtgtgtgtgtgtgtgcgcgcgcgcgygcgcgtaagcatttttgtcaaggaagcctacacaaaggaggtgaagcttcagctagtgttcagtggtgaataattaatgatcatatctctatttgttggtttctaggcactgtgctaaatgcaatctgcgcattctctctgctcaccctgatcctagatactaaggcttattattcccattttagagatgaaaaacctgaaattcatagacttcattagcattcaaggccaaataaatagagcaaataaatgtcagggtcaaaattcaaacacaggtcagtctgattcagactctgtgtaatcacaggcataggggatacaaaggcatggtctttttctttctactcctacctcatttaatggaaagacagtataataaccaaaagcttagatattctagattcattcagatgatgatgttagggtgatgatgtttctataaggacattcagtagccagctgttgagctggttccagtcttagctatttgatctttttaaaaattgtttttttaaagggagatttcagtcttactcatagtgtagaaacatgagggtttgtctattatttctgtggtaacatcctatataatgttgcctcagccagggaggttgatcatgcctgtgatcccagcattttgggtagccca

SEQ ID NO: 668798 - DNA, 613 bp, Homo sapiens
agtatgcccaaccatgtcactcctctgctgaaacctgccaatggttgtccatctcactcagaataaaatccaaacattgccaggcctgaaatgcctttgccccatgcttatttatttatgtgttcctcccacatataaaacatgatagatgtgctgtttccctttttttgagtctgatatcacctaagcatagaggcttgccttctctgatcaccctgtctacaattcccagtacctctccatccactaaaagtcataccttacttctttatttttctaattacgtataatcggaaatatacattatcttatttggttattgtctagctatcctcatgagaayatgagctccaggaaagtaagcatgtttttctgttttgtcattgctgtgtctctaggtcgtataacagcacttggcatatagcaggtgctcagtaaatacgtttgaatgaataaatgcatgacatgtgccaggcagggactctaatgtttaaaaaaggatgagggctactcagccttgactgattgataccatgtgggattggaccatatagttgctaggattcccaatatttcaagagaaactgaaaatttccatgttttgtatgaaatt

SEQ ID NO: 668799 - DNA, 687 bp, Homo sapiens
gaaaggaattccatttgccaacatatataatttagtctcagaatctcttgacaattaaacctataattatatttcctttaaaaaaggacgcaaaatacttagacatccacaatagcctctggacaacatcctgtatgattcgtgtacttccattccacatattcacattactggatccaaaatgttaatatcgccaggcacrgtggctcacgcctgtaatctcagcacgttgggaggccgaggtgggtggatcacctgaggctggaagttcgagaccaccctgaccaacatggagaaaccccatctctactaaaaatacaaaattagccaggtgtggtggcacatacctgtaatcccaggaggggattaatactcgggaggctgaggcagaagaatggcttgaacccgggaggcggaggtggatgtgagccagagatcatgccattgcactccagtctgggaaacaagagcgaaactccgtctcaaaaaaaaaagaaaaaaaaatgctaatatcaaaatgagtactacattagtggatttaaacatatttcagactagagttttaaagtaagacaaagttattaagtttatagttaagcttaggagcattttgaaacaaagatgctttttagagaaaaagttaagtaaactatggtccaaggttaatgaggagtactatagaggagt

SEQ ID NO: 668800 - DNA, 640 bp, Homo sapiens
atattttcataggtacttatttatgagtataaaatccacaggaaagggtctggaaagatccaatccaaactgttaacagtagttgctttagagggaaaagggggtctaggcaaaagatcagagggtttttcagtatcttatttgcattcttctgcatgcaagcaggctcttcctttctaaaaacaattattttgcaaccaaaatgtttccagattatctttagtcactgataagagagagagaaaaaattctgtaattctgctgcctaaaacgtacaagtaaaaactrtacacaaaaaagaaatgtggtatttggttgcttttttaaaacatgaagagacagatcctttaatagtttgcttttctaatttccactaaaattttattaatgtaaaatgtgtttatattttaataacattttaacttgtgtttcctaagaataatttggcacatcataaaattaagttaaattcaataaactaaagcaaaataaatcattaaactctttccagagcaatgcgtgttttcaagcccctgcttttacgtgtctattaaaagagcaacaagatacttggttatctctttattaccattactttccctacagacttacacagcattttcagatatgctttattttc

SEQ ID NO: 668801 - DNA, 651 bp, Homo sapiens
tctttgtcctgcaagaactttcaagaacacctggcagctagctcctgaggacctgggccagggggaggaattttgacttcagagtaaggtgctttctgccctactgccaacatgctgtgcagttccatgggcaatggggtttccgactttattcctcctctctccactcccttgtcctttccttcagccgaggggagaggctacataaatactgaagcatgaaacctcaactaatacgtacttactgttttgctaattattattgctttttttttctttcgagtcccattaatgttgtgaaagccacatccatctgtgtgagcaatctttagggaactgggactgctaagttccagcttgtgggggcttggagggagaggtragtgtgcatttgtgagagtgtgagtgcacacacactacagtgtgctgcccacagaatgtctcttgactgtagtcaagggcaaagtaatgattttagagtacttgttatttaaatgtgtccctggcaggctcttcttatctcccacatgaatatgaataatcaaaagtgggtggtagaaaatgagatgtgttcctcttctctgtctcttctccctttccaacagaaccaggacatcagaggaagaaaatcagcagacagaaaaatactgg

SEQ ID NO: 668802 - DNA, 644 bp, Homo sapiens
aaaaagccaaaagaactctagtgctaccagccaatatctggttggcattaaccaatgccaacatctacctattactgtatttcttgtgataagagaaaaataaactcctttttgtttaagttttttgtaacttgtagctgaaagcattcttaactgatacgaagaccaaagtaaataattcaggacacagaaaaacaaaaaaacccacaacttactcaaatctgtgtaacatccttagagaaatcaaatattgattaatcattcctccaaaagagagtatttttatgaatttctcatttctagtatttctttaagtacaatatatattctttttttttttttttgagactgagtcttgctctgtcatccaggctggggtacagtggcacaatctcagttcactgcagtcttcacctcagcagttctcctgcctcagccacccaagtatctgggaccacagacatgyaccaccatgcttggctattttttttttttttttttgtatttttagtacagatggggtttggacatgttggccaggctggtcttgaattcctgaccacaagtgatccacccaactcggtctcacaaagtactgggaatacagatgtgagccaccacacccagcctaaatacaatatata

SEQ ID NO: 668803 - DNA, 644 bp, Homo sapiens
aaaaagccaaaagaactctagtgctaccagccaatatctggttggcattaaccaatgccaacatctacctattactgtatttcttgtgataagagaaaaataaactcctttttgtttaagttttttgtaacttgtagctgaaagcattcttaactgatacgaagaccaaagtaaataattcaggacacagaaaaacaaaaaaacccacaacttactcaaatctgtgtaacatccttagagaaatcaaatattgattaatcattcctccaaaagagagtatttttatgaatttctcatttctagtatttctttaagtacaatatatattctttttttttttttttgagactgagtcttgctctgtcatccaggctggggtacagtggcacaatctcagttcactgcagtcttcacctcagcagttctcctgcctcagccacccaagtatctgggaccacagacatgcaccaccatgcttggctattttttttttttttttttgtatttttagtacagatggggtttggacatgttggccaggctggycttgaattcctgaccacaagtgatccacccaactcggtctcacaaagtactgggaatacagatgtgagccaccacacccagcctaaatacaatatata

SEQ ID NO: 668804 - DNA, 611 bp, Homo sapiens
aacagcacttgtcacttacaattaccactgtaccaacctgcttatgtgtccctcctgtcactatactgtaagttccttgggggctggtatcttgtttcatttcctgtgggaaccccagcagctagcacagtgattcaataacagatactcaacagttttttaaataaataaaccaaatcaattatattgcttatcaattaaaaccagtatttggtcctaagcatttatggagattacatccaacctttcagtcccaggctggcagaaatcactgagttcagtaggtgaggtggcctgtcttgatatggtcacgaagactgttcccacattcaaaggacaactggtgaaactccctaaagtaacaggcctcttatctccaaatggagatggtcccacttgttagctaggaacaaacatgggtgcttttcactggatatccaggtcaaataaatagccaagtttttttcacctttgaatgkatgtcttacaagcactcttaatgagcccctctgcttttcttcccctcctctgagatcagaagcatattgacatttgtattaatcataatctgtacagtgagtgttgacacttccactctttttcctcaatgg

SEQ ID NO: 668805 - DNA, 641 bp, Homo sapiens
gaatagttaggtacttaagaaattatagaggctgccactctgcttaggtggcaaaattggactgctatggtggctcagtggtggaaggcagtatttgaggggaaggcggggattaatcagaaattgtctgagttttattaattgtagcctctgtgtgcttttagaaagacccaatatttgccattttcaaattgtgtattcaggggagaaagctttctcctgccccattgcctgtgggctggtctttttctaaatgaaaaagaaatggtggatggtgaggagtggtgggtgtcctgggcttctgggaagaggtggggctgagctgggctggcactcttggctttctaggctgagccagtttcccatccccggctctgaccccaagggacttggggattgttgtgcagcctgggccctgctggtcaccctcagctttgtctgagttggatcatcaggtcagcatctggcttcccgcagccagctgtgcaattctgattttatttkattgcagtaaggggcttaggctggccagggagtgcttgacattttattactgtcactgtcacttcatgatctgctaagcacccctgggaacagaatgtcacagttggcatgccctgagcccaattcacctcagggtc

SEQ ID NO: 668806 - DNA, 605 bp, Homo sapiens
aggacttcaataccaacctggccaagacggtgaaaccccatctctactaaaaatacaaaaattagccaggtgtgatgccacacgcctgtaattccagccactcgggaggctgaggcacaagaatcgcttgaacctgggaggtggaggttgcagtgagccgagatcatgccattgtactccagcctgggcgacagagtgagattccgtctcaaaaaaaaaaaaaaaattagtggggcgtggtggcacacacttgtaatcccagctactcaggaggctgcggtgggagaatcgcttgaaygcaggaggcgaaggttgcagtgagccaagatcatgccattgcactccagcctgggggacaagagcaaaactccgtctcaaaaaataaaaaataataaaaaaagaacactgaaagccagaatgcagataggtccaaagggttaacacaaagcagcacaccttggcagaagttagaggcttactctctggagaggttcaactagagcagtggttctcaaccttggctgcacattggagtcacctggagagattttaaaagactgatgttcagaccaccccaccagatgtattaaagtaaaaactctggg

SEQ ID NO: 668807 - DNA, 1145 bp, Homo sapiens
aactcctgacctcaggtgatctgcacaaagtgctggggttacaggtgagagccaccacacctggccccaaaagtttaaatgaaggaaaaccaactcctgtaacctcttttttgagggaggaagtgggtaaagatcatacaaagcagaataaattctagttttaacttctataattaacaatgaaaatatcaacgctttctctcaaaagcttaagtaaaaataacagtgttggctaagtttctaatttgtgcctcaccaaacagaactggttacttctgttaaactagaggtgctttaaattataaataattggtacacaacagcaacagtaggggtttmgattttaagcatcttttcagtgagccatgaataactattaccttcttttaaaatgtgatccagtaatgacatagtaaactttcataagtttagcaatgaagcactagaagatatcccgaatttccttctttttggagacagggtctcactctgtcccctaggctaaagtgcagtgatgtggttatagctcactgcagccttgacttcctaagctcaagtgatcctcctgcctcagcctcccaggtagctgggaccacaggtgcatgccaccatgtctggttattttatttttttggtagagacagagtcttgctatgttgcccaggctaatcttgaacttcaggcctcaagcaatcctcccccatcagcctcccaaagctctaaaattaccagcatgagccattatgcctggccaaaactcttgttatgaagttttggaggctcctttatcctggtggtgattatgacctagactagcagttctcaaccgttttggcaccagggagctgttttgtggaagacaatttttccatggacgggggcaggggggtaaaaactgttccaccttagatgatcaggcattagattctcctaagaagcgtgcaacccagatcctttgcacacgcagttcacaacagggttcatgctcctatgagaatcttaatgccactgctgatctgacaagaggtggagctcaggtggtaatgctcgctcagctgctgttcacctcctgctgtgttgcccagttcctaacaggccaaggatggatactggtctgtggcccagggttggggacccctgaccta

SEQ ID NO: 668808 - DNA, 2127 bp, Homo sapiens
agcccctgacccagtgctggctttattcattcactgcagtgagctttcatgctgagagaataacaaagaggcatgagatcctgtggcttttaacctgagatagggagctgtgtttagttacttttcttgagctcacccgtaacatgactaattcttttccaagacctctagatccttgtcttagtgtaaaactgctaagcggccataacaaaagtatccaacaatacatggcttaaagaacaaagtggttttttccctctcatgtaacagtgctgaggttagcagttgagatcattgaggtggctctaatccacatagtctttcagggacccaggttctttcatcgtgttgctttgctctataccagtgcattaacatcatctgcatggtgagggttccaaccagtgggaaagagaaagaacatggaggagtcacgcccactgcataggcctagacacacaccacttccacttgaatccctttggcaagaactaaatcactaaacacctaactgcaagggatgctgggaattgtagttcacctccatacctagaaagaagagaatggatttaaggggagggccagtggtatccaaaagaccctccaagtagggaataaatctagctgggtttctgtttatgcatagctaggttattattatctttattgcccctcttgctataccatatcagtgggtgaatttaagactaagatatatagaggccaggcatggtggctcaaatttgtaatcccaggctacctgggaggccgaggcaggagaatcacttgaacttgggaagcggaggttgcagtgagctgagatccctccactgcactgcagcctggaggcaagacgctgtcaaaaaaaaaaaaaaaaaaaagaataagatacagaggcatttgacatttattgagtgttagtacaccagcctcatgggctctggaaccttgctcttaaaaacatgtgccagggcggatcacgaggtcaagagatcgagaccatcctggccaacatggtgaaaccccatctgtactaaaaatacaaaaattagctgggcgtggtggcacatgcctgtagttccagctactcggcaggctgaggcaagagaattgcttgaacccgggaggtggaggttacagtgagccgagatggcgccgtgagccgagatggcaccactacactccagcctggtgacagagcgagactttgtctcaaaaaaacaaaataaagacaagcaagaaaacgcatgtgtcaaccttgttattggctctacctgaccccaaaatgagctcatagtttgatgttaaagcagaatatgcagactttgtagacaaaaaattctgaatgagaatcacagctccatcatttatctcccttctgtgtgactttggacatgttacctaaactctctgagttttagtttattgtgaggattatataagcatgtagaatgattaagagccagggctttggcatccaagatgattggttgcaaatcctggcttttgtgacactagacaatcctcttaatttatatgagtrccaggtttcctgtagaatggggtaataccctacctcttactgggttgtgcaaatgatgtatgtcctaagcacttaggtcagtattggctcacagtactgagaagttaatctacattcagcctcaagtagtgtgaccatcctttctcactgccttctcccataggttggcttcatccttaggctgcctctacagtggaaacaagatggtggctacatattcagaagaagagtgacatcttctcttccacgcacccccttgaagctcattggctctaactggttatgtgtgaatctttaaactgtggcttgggggattagactgattagctgattggcttcagggagttgatacccattcctggagttagggatggggtcattcccaatcaattatatggcagacatttgggggagggatgttcctccaaagggaaactggcttgtaattacccgaaaggcagccaaaacaacagatgtccactacagagaatgtgtttgaaggatgagttaattggacctaattatggcccaatttttatttgttttttttgaaatgatgagttgattccttctgatgatagatg

SEQ ID NO: 668809 - DNA, 929 bp, Homo sapiens
gccatgatttaatttaattttactttactttattttatttcattttattttattgagatggagtcttgrtctgttgtccaggctggagttaagtggcatgatctcggctcactgcaacttctgcctcctgggctcaagcgattctcgtgcctcagcctctcgagtagctgggattacagatgtgcaccacgatgcttggctactgtttgtatttttagtagagatggggttttctctatgttggccaggctggtctcgaactcctgacctcaggtgatctgcctgcctcagcctcccaaagtgctgggattacaggtgtgagccactgtgtccagccactgccataatttcacaattcacatttggcttccccatggttcaactaatatatgtaatatatctgcaagacttgttatttctatcccttaaacatcattctaatctgtcctctccctgtccatctccactgcaattacattgaactaaatcgctcacatgctgcctcattctgcaaaggtgtggcctcaaactcggagccagctctacgagatgcctctcgatgcccgagcgcatccagcactagattttttgctcctgctttgagccctggtttctcccacagagagtcagacgtttggggtccgagtgccttgtctcctgactgctgtaactgtgcctcctatcacttgatcattcccttgctgagctggggtgtggagccaagaaaccacctcccaggaaacagttctgatggccccaagcaatgtatccatctcctttaacacatatgtgcacgcacgtacacacagcgggaactgggcattctacactgtcttagtgaaaaaagaattttttttagaaggtacatttccaatcaccaagtccttagaagctgttctttcaggctctggccagaaaggacaaaaatc

SEQ ID NO: 668810 - DNA, 929 bp, Homo sapiens
gccatgatttaatttaattttactttactttattttatttcattttattttattgagatggagtcttgatctgttgtccaggctggagttaagtggcatgatctcggctcactgcaacttctgcctcctgggctcaagcgattctcgtgcctcagcctctcgagtagctgggattacagatgtgcaccacgatgcttggctactgtttgtatttttagtagagatggggttttctctatgttggccaggctggtctcgaactcctgacctcaggtgatctgcctgcctcagcctcccaaagtgctgggattacaggtgtgagccactgtgtccagccactgccataatttcacaattcacatttggcttccccatggttcaactaayatatgtaatatatctgcaagacttgttatttctatcccttaaacatcattctaatctgtcctctccctgtccatctccactgcaattacattgaactaaatcgctcacatgctgcctcattctgcaaaggtgtggcctcaaactcggagccagctctacgagatgcctctcgatgcccgagcgcatccagcactagattttttgctcctgctttgagccctggtttctcccacagagagtcagacgtttggggtccgagtgccttgtctcctgactgctgtaactgtgcctcctatcacttgatcattcccttgctgagctggggtgtggagccaagaaaccacctcccaggaaacagttctgatggccccaagcaatgtatccatctcctttaacacatatgtgcacgcacgtacacacagcgggaactgggcattctacactgtcttagtgaaaaaagaattttttttagaaggtacatttccaatcaccaagtccttagaagctgttctttcaggctctggccagaaaggacaaaaatc

SEQ ID NO: 668811 - DNA, 929 bp, Homo sapiens
gccatgatttaatttaattttactttactttattttatttcattttattttattgagatggagtcttgatctgttgtccaggctggagttaagtggcatgatctcggctcactgcaacttctgcctcctgggctcaagcgattctcgtgcctcagcctctcgagtagctgggattacagatgtgcaccacgatgcttggctactgtttgtatttttagtagagatggggttttctctatgttggccaggctggtctcgaactcctgacctcaggtgatctgcctgcctcagcctcccaaagtgctgggattacaggtgtgagccactgtgtccagccactgccataatttcacaattcacatttggcttccccatggttcaactaatatatgtaatatatctgcaagacttgttatttctatcccttaaacatcattctaatctgtcctctccctgwccatctccactgcaattacattgaactaaatcgctcacatgctgcctcattctgcaaaggtgtggcctcaaactcggagccagctctacgagatgcctctcgatgcccgagcgcatccagcactagattttttgctcctgctttgagccctggtttctcccacagagagtcagacgtttggggtccgagtgccttgtctcctgactgctgtaactgtgcctcctatcacttgatcattcccttgctgagctggggtgtggagccaagaaaccacctcccaggaaacagttctgatggccccaagcaatgtatccatctcctttaacacatatgtgcacgcacgtacacacagcgggaactgggcattctacactgtcttagtgaaaaaagaattttttttagaaggtacatttccaatcaccaagtccttagaagctgttctttcaggctctggccagaaaggacaaaaatc

SEQ ID NO: 668812 - DNA, 929 bp, Homo sapiens
gccatgatttaatttaattttactttactttattttatttcattttattttattgagatggagtcttgatctgttgtccaggctggagttaagtggcatgatctcggctcactgcaacttctgcctcctgggctcaagcgattctcgtgcctcagcctctcgagtagctgggattacagatgtgcaccacgatgcttggctactgtttgtatttttagtagagatggggttttctctatgttggccaggctggtctcgaactcctgacctcaggtgatctgcctgcctcagcctcccaaagtgctgggattacaggtgtgagccactgtgtccagccactgccataatttcacaattcacatttggcttccccatggttcaactaatatatgtaatatatctgcaagacttgttatttctatcccttaaacatcattctaatctgtcctctccctgtccatctccactgcaattacattgaactaaatcgctcacatgctgcctcattctgcaaaggtgtggcctcaaactcggagccagctctacgagatgcctctcgatgcccgagcgcatccagcactagattttttgctcctgctttgagccctggtttctcccacagagagtcagacgtttggggtccgagtgccttgtctcctgactgctgtaactgtgcctcctatcacttgatcattcccttgctgagctggggtgtggagccaagaaaccacctcccaggaaacagttctgayggccccaagcaatgtatccatctcctttaacacatatgtgcacgcacgtacacacagcgggaactgggcattctacactgtcttagtgaaaaaagaattttttttagaaggtacatttccaatcaccaagtccttagaagctgttctttcaggctctggccagaaaggacaaaaatc

SEQ ID NO: 668813 - DNA, 604 bp, Homo sapiens
taagatacactgttggcttaaaaaaattacaggacagtttgtatagtttgtgaaaataaaagtactaaccacttagattacaatagcacagtrccagacacataataaatgtaagttattttaatcctgcactttaaaatgtattcatgtttaagtgaggagattttaatcatgtggacttacacacattgagaggagcacctatgcacttataattgttacaatcacaaattctggagtcagatcccaaaccctaactctagttccatcagtaacttactgtgaaattttagaaaaattacttaatcactgtgtgtatgcacttgttttagggttgttggaaggattaaaagagatacatagtcgctgctacaacaatgcctagcacacagctgttgttatgtgagaatggaaaatacctagagaagaacacactaaccattacagtgattattctggaggggtttagagaagattttcattttcttttactttctttcatgatcatacagcaataaaaacattaagaaataaagatccttatatatttcacagtacatttaattctgaattattcccattatgggaagaaattctttaaaaa

SEQ ID NO: 668814 - DNA, 604 bp, Homo sapiens
taagatacactgttggcttaaaaaaattacaggacagtttgtatagtttgtgaaaataaaagtactaaccacttagattacaatagcacagtaccagacacataataaatgtaagttattttaatcctgcactttaaaatgtattcatgtttaagtgaggagattttaatcatgtggacttacacacattgagaggagcacctatgcacttataattgttacaatcacaaattctggagtcagatcccaaaccctaactctagttccatcagtaacttactgtgaaattttagaaaaattacttaatcactgtgtgtatgcacttgttttagggttgttggaaggattaaaagagatacataktcgctgctacaacaatgcctagcacacagctgttgttatgtgagaatggaaaatacctagagaagaacacactaaccattacagtgattattctggaggggtttagagaagattttcattttcttttactttctttcatgatcatacagcaataaaaacattaagaaataaagatccttatatatttcacagtacatttaattctgaattattcccattatgggaagaaattctttaaaaa

SEQ ID NO: 668815 - DNA, 643 bp, Homo sapiens
gatagcacctctccttcaataccccgagttactcttatttctagctcttaacttctcatgctacctttcaatattctaatactcaggattatttatatttatttaaactatgtcttatcctaaaaagaaatttcaaaatatctgaggtacctttacaaaataaataccaagaaaatttcacattgagaaaaatcaaagttaggagattgcctcaaagaggaaataatatatcaataactatcactcagtgagaatttacttcatataggtattacactaataactactcatgctatcttttattatcyttccattcagcttataatatgggcgatttatccaagtgtttcaaaatagggatacttaggtttataaaaattaagtaatactgaaagctatacagctaatgaagtatggatatccctgaagtctgtgtgctgaacctattatgctgtatttgtcactatgttatgctgtttttcaacaaggggagaacatccaatgaagccatatatggcaaatgctacatatccacttattcaacatccattcctgcatcttttttagcttgtctttctgtaaagtagaggctgaaaagctaaaaacagcaatccctagactgctttgtaatatcaaacagaag

SEQ ID NO: 668816 - DNA, 645 bp, Homo sapiens
tcggagattcccaatcctcggcgacccctgctccatgtgctggtggcggctagcgcccatgggctgacctggcttcccggagctgcggccggccacgcccaagggccccacaggctgcgctgcccttgccagctgctcctgacccgcgcccagagtgcaggacctggcgcttggcactctgcagccacagggatgaggctgagcgcmggttctcgttcctcatggcgccgctggggccacaacctgacttcacctccccgtcgcccaagtcgtgtgatgggcacgtgtgaggaggggcaatcggggttcccaaggctgctgcctgcatgccactctgtggccactaggatagggctgaggagctgccaggggatgagcacgtcgtggccatcgggatggggctgagagtctatctttatccttatgcacccgcccagccgacttcctgacagccactaccacagcgtcctgtcagggagtccttgctgttggggcggggatggggagggcatggagaatcagggatggtctggccattgctgctggtgcctgacgtgcaggtggcagctgcacctagggcacgggctggtaggtctcttttggatggtttccaggtggcccattgcgccgtgaccaagccagagg

SEQ ID NO: 668817 - DNA, 645 bp, Homo sapiens
tcggagattcccaatcctcggcgacccctgctccatgtgctggtggcggctagcgcccatgggctgacctggcttcccggagctgcggccggccacgcccaagggccccacaggctgcgctgcccttgccagctgctcctgacccgcgcccagagtgcaggacctggcgcttggcactctgcagccacagggatgaggctgagcgcaggttctcgttcctcatggcgccgctggggccacarcctgacttcacctccccgtcgcccaagtcgtgtgatgggcacgtgtgaggaggggcaatcggggttcccaaggctgctgcctgcatgccactctgtggccactaggatagggctgaggagctgccaggggatgagcacgtcgtggccatcgggatggggctgagagtctatctttatccttatgcacccgcccagccgacttcctgacagccactaccacagcgtcctgtcagggagtccttgctgttggggcggggatggggagggcatggagaatcagggatggtctggccattgctgctggtgcctgacgtgcaggtggcagctgcacctagggcacgggctggtaggtctcttttggatggtttccaggtggcccattgcgccgtgaccaagccagagg

SEQ ID NO: 668818 - DNA, 645 bp, Homo sapiens
tcggagattcccaatcctcggcgacccctgctccatgtgctggtggcggctagcgcccatgggctgacctggcttcccggagctgcggccggccacgcccaagggccccacaggctgcgctgcccttgccagctgctcctgacccgcgcccagagtgcaggacctggcgcttggcactctgcagccacagggatgaggctgagcgcaggttctcgttcctcatggcgccgctggggccacaacctgacttcacctccccgtcgcycaagtcgtgtgatgggcacgtgtgaggaggggcaatcggggttcccaaggctgctgcctgcatgccactctgtggccactaggatagggctgaggagctgccaggggatgagcacgtcgtggccatcgggatggggctgagagtctatctttatccttatgcacccgcccagccgacttcctgacagccactaccacagcgtcctgtcagggagtccttgctgttggggcggggatggggagggcatggagaatcagggatggtctggccattgctgctggtgcctgacgtgcaggtggcagctgcacctagggcacgggctggtaggtctcttttggatggtttccaggtggcccattgcgccgtgaccaagccagagg

SEQ ID NO: 668819 - DNA, 427 bp, Homo sapiens
tttccaaagtccctctggctgtacaacccctgtttttcacagcctgtccttagatgaggacttcatcctctcttgccaggtctaccatcatcatctcctaactgatgttctcgccagcccatttcatacattacaccatgccttatcatctgcctgaaagcacaggtccggtttttgtcattcctctgcttagaagccttcagtagctcctacagcccttcatactccttgatctgccattgactcctgtccaccaaatggtacccaacmtccgcctttgcaaactcatcctccagtgtctccttcacatgtctccctgtgacttcctatctttcccccttgagtccagagatgtcaaatcaccctcctgtttccatctctgcctgtgagtattctaccctcatcttttcaaatgctaccttcttca

SEQ ID NO: 668820 - DNA, 611 bp, Homo sapiens
gtcaagtttggactcccctgaaaatatgaactacatgggccacacttagggaggaccatatattcttttcaagctgtaaaatccactaacatttttgtttttccatttgttgcttggttcaatgcaatctttaccttacacayaatgaaacagaatttaaggagcaaacttattacttggaaaattttgcaagtgactattactttctttgcaggaacatgttccctccaaatctggtagaagcctgctttaaacaggtaaacactctacagacattaacttgccttttaaattcctcttttctataccaaaccaagtgggaccctcttttccctgctcatttctctgctataagaaacacttctcttgtcaaccagattaaaaacactagcgttttctaggaattttggggggaaaggatggttcttaccttgtattgaaagcttagtagttgtcagacacagtgtgtcttgcatacaaatatctcattgagtctgctattgttaagaaggctaatcacaagacccccccttcctatcacccaactccccactggcaaaagcccaccaaccaaacaaacaccaatataaaatatatttataacttgcctt

SEQ ID NO: 668821 - DNA, 605 bp, Homo sapiens
atcttcattatcagtgtcagcacatcaaagtgttaagtatgggactgtgttatgaaagagaccatgaaactctactatcatttcttttatacttataggcattgatcactttaatcaaagataaaacaccttgtttaaaacaattagctttgacaatayatgtataagcagaaccttaaattgtaaatgtgttcattttcttcttccctactacacatattaaataatagagacaagaaaagtaggtggaagatgattccaagtaactttggggcattattacaaagtgaagctggtaagatttttgtctttttgacaaattcaaggaagcctgcagaaaaaatcttgtttcaggagtacattttcacttagctgttctctaagtagaaatgcattactcctagaaagaaaaatgaaagttcttcaactgccgaagacaaaatgacagatttggcttccagcaatacattcttgacagctactagagtttcaggaaaagaaaacaagaaaattaaatttgacagaaatgaagagggggaaaaaagaagcaattttttctagttagcatctcaatgtctttggagggattttagggcaattccata

SEQ ID NO: 668822 - DNA, 666 bp, Homo sapiens
cacctcctggctccctctaatgtcaagtgaaaccctcatagctgtataaagttaagttccacctctaaaaaaccctggccagttaagaaagatttaaaaaattgactacctgagggtttttctttatataacgaatctgccttcccagcctttctctctgtgtgctactaactgaaagattatagagatctattattctacataattaatgaaaagatcaaatttcaaaaggacatataatagtgccatggccagccttaaaaattctcttggctaaattaagagagagaraaaaaaatctgacctaaacagttaaaactcccaccatggcttaggtttgctatctggtcagggaacaagggccacttaaccttatggcacaatagctaaaattcaattctgcactttcactgctatggcaaggatttgattgctggtcagtgaaccagcatctcttagtttatttctgtgacttttggggtaccaatttactgttgatctttcccccttccttgaacagcctttgatttcctgccttcttctatctgcaggaagttcacagagttttgggcctttggagtggaaggtcatccaagaaacgaagaccccagagagtatggccggacagaagtgtgggttatacctcatttatagctagtgacactg

SEQ ID NO: 668823 - DNA, 583 bp, Homo sapiens
cagagagttggactcacccacagttgggagactagaagacagctgagtcctgggccagctctgctgacttgctgtgtgtttaggccaggtcactgcacctctctgagctaagcacttgttcaataaggccaattaaacacttagtgcccgctgtatgcccagtgctggattaagggttgtgggaatgaagtactggacatcatttctgcctttggggttggtgggaaggtatcaccatgcaatgcatattatgaattgagtggggttggggcatattgtgagggcctgtgtgcttcaaggtagaaaagttcctgtaggcttgggctgtttaggtggctcccctgaccctggcctgggggttgcctcctttctagctgcattgctctctaggctcccctgcccccgtgtcagaggacattgcacggggactattgcctggtctgcacccttctctgccctccctccctacaagccctcggtttttacctgattggatcygaaacctagcaccaagcatgagggtaattattaatgaatgtcctgaaccatgaagccgtgtttctctctctcctttgtcctgtct

SEQ ID NO: 668824 - DNA, 649 bp, Homo sapiens
ggtattccgcctcttgattctggatagccaaacaagtgaaaagcctccacacatttcagaaatagtcatctttacttctcatctggtgagctgctgaataagtggtttgtaatctaagatcttaaatgtggtaaacattaagtaatactcattctttttattaaacaataaaagggttttcatcccattttataattaattttttgaaagtaattactcaagttcaggcttgccacattcaataaataaaaatataggacaccaagttgaattttaatttcagagaattaataaatacttttttagtataaatgaatactttgtagtatatgtatatcccatgcaatatttgtcccagatagtacttgaaacaaatttatactaraaaattagttgttgtttatctggattttaaatttaacttgaatttcaaatttaatacttgcctgacaaccctactcaagttacacatcttataaaacaattggagacatatggtagatagatgtttagggaattggtgctctttgttttatttagattaagagtttgattgcattttgtgttaagaatacttttgatgaaaggatgagctaaattatgtggaggcctaataaatgagtcagaattgcagtaggaagaattttga

SEQ ID NO: 668825 - DNA, 649 bp, Homo sapiens
ggtattccgcctcttgattctggatagccaaacaagtgaaaagcctccacacatttcagaaatagtcatctttacttctcatctggtgagctgctgaataagtggtttgtaatctaagatcttaaatgtggtaaacattaagtaatactcattctttttattaaacaataaaagggttttcatcccattttataattaattttttgaaagtaattactcaagttcaggcttgccacattcaataaataaaaatataggacaccaagttgaattttaatttcagagaattaataaatacttttttagtataaatgaatactttgtagtatatgtatatcccatgcaatatttgtcccagatagtacttgaaacaaatttatactagaaaattagttgttgtttatctggattttaaatttaacttgaatttcaaatttaatacttgcctgacaaccctactcaagttacacatcttataaaacaattggagacatatggtagatagatgtttagggaattggtgctctttgttttatttagattaagagtttgattgcattttgtgttaagaatacttttgatgaaaggatgagctaaattatktggaggcctaataaatgagtcagaattgcagtaggaagaattttga

SEQ ID NO: 668826 - DNA, 591 bp, Homo sapiens
agtgtttattaactttacatcattttatccttgccttactatctggacagtgtagactgcctatattcctagttagttggggttgggatctcttctcttagagtggcccagcagttttagcccctctctaattctcttttcctgtgttgggagatatcaaaacaacagaattcttgccagtgggaacatttttcttttttagacaaggtctcattctgtcaccccagctggagtgcrgtggcacagtcttaattcactacagccttgaactcctgggctcaagaaatctttctgcttcagcctcctaaatagctggtactataggtgcgtgccaccacacccagctcatgggaataatttttacactccttcagaaggagtcatttgtgattggagtccacgtagaaacaggtttccctctgtacataatcgtaggtaccaaaatattactgtgtaaagtgttgtttatataggtcaatttttgtggaagatctaatttctattttcagagaacagagcacattaaaaaatctatttagtattgtgtactatataatttatgtgaattatatagctccttaactaaatata

SEQ ID NO: 668827 - DNA, 591 bp, Homo sapiens
agtgtttattaactttacatcattttatccttgccttactatctggacagtgtagactgcctatattcctagttagttggggttgggatctcttctcttagagtggcccagcagttttagcccctctctaattctcttttcctgtgttgggagatatcaaaacaacagaattcttgccagtgggaacatttttcttttttagacaaggtctcattctgtcaccccagctggagtgcggtggcacagycttaattcactacagccttgaactcctgggctcaagaaatctttctgcttcagcctcctaaatagctggtactataggtgcgtgccaccacacccagctcatgggaataatttttacactccttcagaaggagtcatttgtgattggagtccacgtagaaacaggtttccctctgtacataatcgtaggtaccaaaatattactgtgtaaagtgttgtttatataggtcaatttttgtggaagatctaatttctattttcagagaacagagcacattaaaaaatctatttagtattgtgtactatataatttatgtgaattatatagctccttaactaaatata

SEQ ID NO: 668828 - DNA, 591 bp, Homo sapiens
agtgtttattaactttacatcattttatccttgccttactatctggacagtgtagactgcctatattcctagttagttggggttgggatctcttctcttagagtggcccagcagttttagcccctctctaattctcttttcctgtgttgggagatatcaaaacaacagaattcttgccagtgggaacatttttcttttttagacaaggtctcattctgtcaccccagctggagtgcggtggcacagtcttaattcactacagccttgaactcctgggctcaagaaatctttctgcttcagcctcctaaatagctggtactatrggtgcgtgccaccacacccagctcatgggaataatttttacactccttcagaaggagtcatttgtgattggagtccacgtagaaacaggtttccctctgtacataatcgtaggtaccaaaatattactgtgtaaagtgttgtttatataggtcaatttttgtggaagatctaatttctattttcagagaacagagcacattaaaaaatctatttagtattgtgtactatataatttatgtgaattatatagctccttaactaaatata

SEQ ID NO: 668829 - DNA, 609 bp, Homo sapiens
ggtctcgaactcaggtaataccacccaccccagcctcccaaagtgctgggattacaggcatgagcccctgtgcctggcccattttcctgcatattaaagtaatacttgctaattattgcaaatttgagaartgcagaaatgaagaaaaagtcacccataatcctatcactagaaattaacattttaaaatgttttgttttagcttttaatgaagttgccaagaatattatgaatttttgatgtttttctatggatgagctacttgggcttagctcttttagaggccaaagtttattttcccgacaatcctcctcgcatgcttgggccccactctggactcttaatgtagaaggtaacgttccccatcttctctttctattggcttgtatggaagttcttgtctgaattctgccatatggaaaatgttcacatacatttttaaaaggagaaattctctcctcggtcattactaaccttttggctggttttgctggaaaagttttcaggattcatctgccaatgttgtttccctagaaggccatcctggctacctcgctaagcatcttatttgttctgtaacaaaaaattcttcatgctaaatcactcgca

SEQ ID NO: 668830 - DNA, 609 bp, Homo sapiens
ggtctcgaactcaggtaataccacccaccccagcctcccaaagtgctgggattacaggcatgagcccctgtgcctggcccattttcctgcatattaaagtaatacttgctaattattgcaaatttgagaaatgcagaaatgaagaaaaagtcacccataatcctatcactagaaattaacattttaaaatgttttgttttagcttttaatgaagttgccaagaatattatgaatttttgatgtttttctatggatgagctacttgggcttagctcttttagaggccaaagtttattttcccgacaatcctcctcscatgcttgggccccactctggactcttaatgtagaaggtaacgttccccatcttctctttctattggcttgtatggaagttcttgtctgaattctgccatatggaaaatgttcacatacatttttaaaaggagaaattctctcctcggtcattactaaccttttggctggttttgctggaaaagttttcaggattcatctgccaatgttgtttccctagaaggccatcctggctacctcgctaagcatcttatttgttctgtaacaaaaaattcttcatgctaaatcactcgca

SEQ ID NO: 668831 - DNA, 609 bp, Homo sapiens
ggtctcgaactcaggtaataccacccaccccagcctcccaaagtgctgggattacaggcatgagcccctgtgcctggcccattttcctgcatattaaagtaatacttgctaattattgcaaatttgagaaatgcagaaatgaagaaaaagtcacccataatcctatcactagaaattaacattttaaaatgttttgttttagcttttaatgaagttgccaagaatattatgaatttttgatgtttttctatggatgagctacttgggcttagctcttttagaggccaaagtttattttcccgacaatcctcctcgcatgcttgggccccactctggactcttaatgtagaaggtaacgttccccatcttctctttctattggcttgtatggaagttcttgtctgaattctgccatatggaaaatkttcacatacatttttaaaaggagaaattctctcctcggtcattactaaccttttggctggttttgctggaaaagttttcaggattcatctgccaatgttgtttccctagaaggccatcctggctacctcgctaagcatcttatttgttctgtaacaaaaaattcttcatgctaaatcactcgca

SEQ ID NO: 668832 - DNA, 1050 bp, Homo sapiens
atttatatttgatgggcttcaattatgccaaaacttttatggaaaacctgtattacttacttataaagtgctctgaaaaaaaaattgaactcttacaaacaagacctatatgaataaacataactataaactttatgattttatcagtataaaatactatattttaattatgcatttttatattttcccatttcatgtagcagcatgatagcctcataaaagaccataaaatatatattgatcattttgaaataaactgttatttctcctaattccttctcctactccagagccattttcaaaggagcaattttttwaaacatttcataacaattacatttaactttgtctttattccatgttcagaatactatgagagagacttgacattgtgatcgtggatccagctttttgcaatattgatctgcaaaatatgtaaattaaactaaagatagagcattcagattgtacttagctctcagaattaagtactctaagcctcctatacttaactgttagcattaaatactctgagcctcctgattgaagatgtgaagcagctgaagaaagagtgcacaggacctagataacaagcacagtgaaaagatgtgtggtaaatcagtgatatagcttatataagttgaaattgtttctgtcttctttagttcatcttttgcagtcaaatgttcatcatgttgacgaggggtcaagaagctatacttaaaatgttataacacctcccttatctactgtgtatactttcaggctagatgtcttttgggtcaagaagccgtacttgaaatgttataacaacttccttatctgctgtttatactttcaggttagatgtcttttggatacttctgtgaattctgaacatgggatcaactgatatcatcagggattgtgtagcgaaattgatgacagtgagaatattgaggcaaagactcccccatcctacaggtacttttttaaaaggtattttggattaaaagtatgataagggccaggcacattgtgcacacctaaaatcctagtactttaggaggc

SEQ ID NO: 668833 - DNA, 1971 bp, Homo sapiens
agatacggcattgtaaaggttttaaagtcaagtggtctagggattacatctgggcttttaatcacattagaacataactttgaacatatttctggactcgtttaaatcaatttgctcatctttaaaatgtatgattttacagtaattttaaagatggtattgcatgacaagataatatatgtaacaagctaagatcagtatagattttatggcaaataataaatggcatctataattgttgtattgctaacactacttttatcatttctactaccaagattatctcatagttctgacttaaggatatagttactgtattcattataaagtctacagtgatatgttttatgtggtttaggcatgttttgaagagcctcacagatttctagatctatgagcaatcctgagcattcctcaccgttggcatgcatgttaaggacaataaattgaatagcccacactactttctggttgctagcacctggtaactttaaactccctgcccatgccatctcattcattgcctttaacatattctttttggaagacaaatatttactgagtgtgtactaaatactakgtgtgaattaaatggtgttgaacaaaaaaaaggtatttatagtcggaaaagagacaacaaacaagttaataaatacctcgttgataatggtaaacatgaagaataaaaacgaagtgttatcataaaagaggcagtttatggggaggggttatttgagtcataacaatcaataaagtcatcttagataagaagacagttgaacaaagagctaaataaagtgagacaacaattactcccataaagagaaggggagaacattccaggacaagaaatagcaagacctaaaatgcacaatgggtgtgtttgaaaagtccaagaagtacaaagaaggccgagttggaaaaggtgtgtgaatgaatgagattgtaaagtgatgaggtcagagatccaaacacaagagtgttcggtaactatatactgtagagccatatacagcataatgaagacttataatgttttgttgagtgaaatgtaaaccattgggagaatatgagtagaaaagtccaacagtcttacttcagttttcaaagtatcactctggctgatgagtaaagactataatttaaacaggcaaaagtagaagcagtgagaccaacttggaagttggtactattttctgagtgatgagtaatgctgacttgaaatagaatgacagaataaacatttcagaacttagttgtatttatttcaaatactaagccaagagaaattgctagcagattgatcatggagagatgtaaaaaaaaaaaaaaagaccaatgaatacaattaaattttaatctgtgcaactggcataattgagttactattcagagaaagggataagtttggggaaagataccacttttcttcatatagaaataaaaaatttaggttttgcacaatatttaatttgaaatgccctatcagatttataattggtaagcaccactttaagttaatccattaaaaagagaaaatttatttttgtggagactgtatcttcttaccctgaaaaataaacctcgatacattttatttcatttatgttcagtaaaattatatttcatgtttcctgaaaaaacatatgcaagtattgattttaaaagaagtaatgacataaaagcattgacctcatatttgtctttttcattatatttgaagtgtattatttatttaaaagttagcacttcgtgaatttctgttggtatttaatccattctctagtgaagagataaatgcacatgcatttccattgtctacttcttttatagtttcctagtcaaacactaccagatcctcacatgtcaatacctttgtgtgagatttgggaaacttatcatgatttctaagaaaactttcatctcttgcaaatcttacaatctcatttcagaagtaattgcatgatttca

SEQ ID NO: 668834 - DNA, 1971 bp, Homo sapiens
agatacggcattgtaaaggttttaaagtcaagtggtctagggattacatctgggcttttaatcacattagaacataactttgaacatatttctggactcgtttaaatcaatttgctcatctttaaaatgtatgattttacagtaattttaaagatggtattgcatgacaagataatatatgtaacaagctaagatcagtatagattttatggcaaataataaatggcatctataattgttgtattgctaacactacttttatcatttctactaccaagattatctcatagttctgacttaaggatatagttactgtattcattataaagtctacagtgatatgttttatgtggtttaggcatgttttgaagagcctcacagatttctagatctatgagcaatcctgagcattcctcaccgttggcatgcatgttaaggacaataaattgaatagcccacactactttctggttgctagcacctggtaactttaaactccctgcccatgccatctcattcattgcctttaacatattctttttggaagacaaatatttactgagtgtgtactaaatactaggtgtgaattaaatggtgttgaacaaaaaaaaggtatttatagtcggaaaagagacaacaaacaagttaataaatacctcgttgataatggtaaacatgaagaataaaaacgaagtgttatcataaaagaggcagtttatggggaggggttatttgagtcataacaatcaataaagtcatcttagataagaagacagttgaacaaagagctaaataaagtgagacaacaattactcccataaagagarggggagaacattccaggacaagaaatagcaagacctaaaatgcacaatgggtgtgtttgaaaagtccaagaagtacaaagaaggccgagttggaaaaggtgtgtgaatgaatgagattgtaaagtgatgaggtcagagatccaaacacaagagtgttcggtaactatatactgtagagccatatacagcataatgaagacttataatgttttgttgagtgaaatgtaaaccattgggagaatatgagtagaaaagtccaacagtcttacttcagttttcaaagtatcactctggctgatgagtaaagactataatttaaacaggcaaaagtagaagcagtgagaccaacttggaagttggtactattttctgagtgatgagtaatgctgacttgaaatagaatgacagaataaacatttcagaacttagttgtatttatttcaaatactaagccaagagaaattgctagcagattgatcatggagagatgtaaaaaaaaaaaaaaagaccaatgaatacaattaaattttaatctgtgcaactggcataattgagttactattcagagaaagggataagtttggggaaagataccacttttcttcatatagaaataaaaaatttaggttttgcacaatatttaatttgaaatgccctatcagatttataattggtaagcaccactttaagttaatccattaaaaagagaaaatttatttttgtggagactgtatcttcttaccctgaaaaataaacctcgatacattttatttcatttatgttcagtaaaattatatttcatgtttcctgaaaaaacatatgcaagtattgattttaaaagaagtaatgacataaaagcattgacctcatatttgtctttttcattatatttgaagtgtattatttatttaaaagttagcacttcgtgaatttctgttggtatttaatccattctctagtgaagagataaatgcacatgcatttccattgtctacttcttttatagtttcctagtcaaacactaccagatcctcacatgtcaatacctttgtgtgagatttgggaaacttatcatgatttctaagaaaactttcatctcttgcaaatcttacaatctcatttcagaagtaattgcatgatttca

SEQ ID NO: 668835 - DNA, 593 bp, Homo sapiens
tgggaagagcaattaagatactttcatgtttagggcttgattaaattatattattaatttaataagactttttatcctgagagagtcttggtggttttttattagaaagaggctaaaaatagaaacacattgactctgggctttaagtgttctctttaaataaaaccctcctagaggtcccatcttcattctgagtttcaaggctgattaaagcactgcttattaaaagcaggtcttctctataagggagggcaaacccttaattytaaaaaaaaaaaaaaaaaaaaaaaaaacgtggagaagagccagggtatagtaagtgttttaatagttacacagttacttaccaagcacacccagaattatcaacaaaacagacaattttatgcgagtaaacaatatgaatcagttgctttaagagcccaatttccataagagaaagagaatgtgtgctttcacagtcataaaataatgaccaatggtgtcgtcaacacttttcattcctacatatcaatattcttgacgagtatcatctgatggaatgtatattattctatctagagaggcgaatgatttgacacaaataccttaac

SEQ ID NO: 668836 - DNA, 654 bp, Homo sapiens
atttgtcaaaagactttctaaacttatccctttcttacagtactttgaaaatacagccatagtgacaagcacaccctaggaatattctgttttcccacatttkgcccgaaaatcctacattgagtgcaggatctgccttccaagttatcacaagtgacagttttaccaaatgttacaccttcgagaaaaattcatcttcatctttttagactctaatgaggctttcttcactgctggatggccaggccttaagccaatgctgcaaatttcatacatacttttaagacagcatttcatttctggtagatatatgtgcaccagttgcagtggcatgagttattttgtggaaacagacaaatctcaaaaccacaatgtctttaaaagcaaatgtttattcttgtttatgctatatgaccactgtggttttccagggaggctgataacactttatcaacaggaatctaaggaatggaaagttccatcaccatgttcccataattgtcaagaaaagagagggaacctggaaaatcttatggcccttaagctttccacaggtgagacacattcacttgcattcacatttcaatgggcataaagaattccacgattatttctaaagttagaggtgggggagaagtgcaatcaagactatta

SEQ ID NO: 668837 - DNA, 624 bp, Homo sapiens
ttatttatcacagtatggattaaataatacacagggaattactatgtattttatctttctgtatcacataaccctgagtgcayactcaaattgagtgaacatggaactactggagagaacaaaaggtccgggtaattcccaggccaagacttaagaggcctgcctagaatactgagatgcaattcatttactccatactgtgagatgcatagtgctagaaaaatgtaagtttgaagaattaacttttaaaacatttaattcaatacttcttagcacttacactagaggcctcagtatatatacatagaaagagagaatgcaccttctacttccagccaaaattttctacccttccagagtttaggtatagcttatcaacctgaaagagcaattatttttcttgtacaagtatggtgagttatataagcaggaagtgcttaatagttgtcatattttcctacctgcttgctgtactccaaacatacagctcaaaagcagaaaaagtgttcaaaaataacttaggtttaaagactgctgcctataactaaatttaattcttttcttggtcttagtgtatttttcagagtctacattgatataaagacttcatctcctaggcactga

SEQ ID NO: 668838 - DNA, 500 bp, Homo sapiens
aattaagataaaacacatataatatgcttaaattactacctacgatataagagctcaatgtaaattagtaatcattgtatttttattctgtcttgataggagcaatataatactgtgaagttcattcctcaatttattwgagctttggcactattaggtaacacagtattttttaaatttggatttattttgctcatccctaaacaagaaaagggttattgaatttgaatgcttatgttaattctaactaatttgttaccaaatgttctctttaagtctaaaactttttactagaggctcttgagttatgtaggtaaacaatcataccaagacaaaagaggaagttctatctctattaaagaacctatgagatattttactttttaaatatttcatattctaaaatctccaagacaatattgacagtaataacaatggagattatgaattatttccttctctttaaatggaaattattttagtcattttgtatgtaggat

SEQ ID NO: 668839 - DNA, 605 bp, Homo sapiens
ctatcaattactcagagagtattgtgaaaatctccaaagttgtgaatttatttatttgattctatcaggttttacttaaatatgttaaagatttataattatttgcaaaaactttaaggattgcatgcttccttgatatattcatcagttactctcaatagcccatcctaatcctaatccaatatgacctcatgtgcctctgcaaaaacaccctatttcaaaaaaaaaaaaaaatcacattcacagataggaggggataggacttgaayacatcttttccagagacataattcaacccattataaaagactacttcataggtgctttttttcacattaaatggccttctgcatttttggtcatataacttgatttaaagacaaacgctggttgatatcaatatagccacacaagatttctgactaatgtttgcatggtatttctcaccatgatattttaacatctgtttatttaaacacaggtttttaaatatacctctttgtcttaccacagtacgtctctaaatcaaacttaaatattatgtaaaaaatcatactccgtattttcattttctcctcattctattatatacattttatttttac

SEQ ID NO: 668840 - DNA, 605 bp, Homo sapiens
ctatcaattactcagagagtattgtgaaaatctccaaagttgtgaatttatttatttgattctatcaggttttacttaaatatgttaaagatttataattatttgcaaaaactttaaggattgcatgcttccttgatatattcatcagttactctcaatagcccatcctaatcctaatccaatatgacctcatgtgcctctgcaaaaacaccctatttcaaaaaaaaaaaaaaatcacattcacagataggaggggataggacttgaatacatcttttccagagacataattcaacccattataaaagactacttcataggtgctttttttcacattaaatggccttctgcatttttggtcatataacttgatttaaagacaaacgctggttgatatcaatatagccacacaagatttctgactaatgtttgcatggtatttctcaccatgatattttaacatctgtttatttaaacacaggtttttaaatatacctctttgtcttaccacagtacgtctctaaatcaaacttaaatattatgtaaaaaatcatactcygtattttcattttctcctcattctattatatacattttatttttac

SEQ ID NO: 668841 - DNA, 1343 bp, Homo sapiens
  misc_feature 559, 560, 561, 562, 563, 564, 565, 566, 567, 568, 569, 570,571, 572, 573, 574, 575, 576, 577, 578, 579, 580, 581, 582,583, 584, 585, 586, 587, 588, 589, 590, 591, 592, 593, 594,595, 596, 597, 598, 599, 600, 601, 602, 603, 604, 605: n = A,T,C or G
  misc_feature 606, 607, 608, 609, 610, 611, 612, 613, 614, 615, 616, 617,618, 619, 620, 621, 622, 623, 624, 625, 626, 627, 628, 629,630, 631, 632, 633, 634, 635, 636, 637, 638, 639, 640, 641,642, 643, 644, 645, 646, 647, 648, 649, 650, 651, 652: n = A,T,C or G
  misc_feature 653, 654, 655, 656, 657, 658: n = A,T,C or G
tgtctctcttcaagcaacctcctccccaaagagatggactgctgtaggtgttaagtgcatggtccacatttggcaaaggaagtataaggcaggtcttgtatgcctgacccaaaatttgatttgactcagcaatcttgactatcctatagacacacaaactcttacaactactctgttgttctagaatacaggcaggattcctgtccttccccagaagttaatctttgctttggtagagggctttggacatgtgcaggtctcttctcctgtccctagtgacagagagcttttgcctagtatatatactgtacctagtatatatgctgtagcatattttacatttatgagtgcagaaaccttgtggccagcaggtctccttacctgtccctggtgacagatagctttgcctagtatcaagcagcatgttggacaggtgggcctggactcctcagcttcaccctctccctggaatcagccaatctccgcttatgcaggtcaaggccacagacagatttcctacccctacccaaggggcagtaaacatcttcctgggttcagnnnnnnnnnnnnnnnnnnnnnnnnnnnnnnnnnnnnnnnnnnnnnnnnnnnnnnnnnnnnnnnnnnnnnnnnnnnnnnnnnnnnnnnnnnnnnnnnnnnntggccccgtcctcccacaggccagtaagccctaagtaacaagcaagaccactgatgaaagaagtgagcatgaagggagaatctgaggtgaaggtggacagcaaaaccctaacacatcagggatggagcagacacaccaagaaaacatttctggcaagacaactcccactaaaatcacaagaaactctacaggaactgtctcaaggatagacttctttttcctttcccctgtcactagtaggttttcacccgtgccctgagaaagacaagggctaccttaaggcttttgcctgtaaggaaagggtctaagcatggtttcagcatttccttcactggcagctgacatcctcctgtaggtctgcccaccgaggaaaattttctccagtgcccagccctgccctcaatctcaggaagcaccttcctcaacacccaggaaagtccatagccttgtaattgagtgcaaattcccctttatctgctctactttgtcttgagtaagcccacatttggcctttagtatttagttaaaaattttatctgaattgctttttacccacttgtattmcagccacaatttcccctttgctctgccaagggtaagcccgtgtgtgcatcctggttctttttgaagacatctgtcatttctccagtttcagattagttgtgtgctctggagcctaatctct

SEQ ID NO: 668842 - DNA, 2178 bp, Homo sapiens
ctatgagacctcatatatatactatgggtgaaatatcagcaatggagagttagcaaggaatggttctgtttctatccacatttaagaagagggtaagaaacaattcagtttcctttgcatgtcattctttatttgcaggttatctctcatttgatataatttacaaagtattatgaatagtggcatccctaagttctaattatgttctacaaattagaattaggtcaagtgttatgccagatacaaacagtataacaaatgagcttagaaatcttaaaaatgaaaataaattttattaattataacatctgtttcaaaagagaaagtctactcttttacagtcagatatactcaagagaaatataattacaaaagacagaaaattttgaatttaattgaaaactaatgcaatatagaagtaaataaataaataaaatttcagagtacactttaattggaagtatgggatctctgtagctacttcttagcaaatatctttaattatgctcattttcctcctttcttgacacagtaaaatgatctctcatcatctctaagcccactgctcaagccatttatttcgtgactccagacagctgagtaggaaactaaactaatataatcaaatcgatcactttaaacagtgtaaatctggtcacttttggttagttattagattctttttcaattactgcctaggggaaaagggaatatattttacttcttgaaatagataatcgtgcatagaataaaaagacatcaaaatcgtgaaatgacataacatatttctgcttatgcgaacagatggaaatctatacattctaacatatacagtctctaaaaaacttactttaaagcataggccacctaattagtgtgggtaggggaaggtgtcaagtttgaaagttttaaattttagactcacatgtgtttatatacatttatttaccatggtattactttacaattatactttcttttaactcaaaacactataatttatttacatctaattattgaagtcagcaattagggctggttttcagcttgactcactcaggtatctttagtcagaagcaaggtgacaagagacaacagcatattagatttcttgaggcctaggctcagactggcacacgatcatttctcctgcattctacagatcaaagaaaaccctagagcagcatagattcaaggagtagagaaatcaactatagctcttcataagaatatctataaattaagaggaaaaggaacatgaatacaaggagaggaataatcggggccattttctgcaaacagcataccacaaatagctaataaatattaaaataatacatgccatagtaaaaatttcaaacaatacagaacaacatttctcaaactagcactcttaatattttacatccatagatttgttttcaactagcatgtcacaaaaactttgagaaccaaatcaataaatagaaaattactcaagttccagaatgatcacttgggtggtacatctcagggacagatccaaagagcagggcataaatttgaaaaataaggtaacaatggaaccaaagcccacwtaaggtgtgttcaaaactttggctgataacttaaccagatggattgcctgcttaacattatgcaatgttatgcacaggacttagacaaggcccagagtattaaaatgtaatgctgaaaataaccagtttacaacatacaatcacttggcatacaaagaaacacacaaaaatgaactaacgccaaaatatcacacggataagttatccaataaagactttaaaatgagtattaaaatgctcaaaccaattattgtgaacattcttttttaaatgcaaaacaattaaacggttcagtgtattagcccattttcaaaattctatgaagaaaaacctgagactgggtaatttttaaagaaaaagaggtttaatggactcacagttccacatggctggggaggccttacaatcatggtggaaggcaaaggagtagcaaaggaacatcttacatggcggtaggcaagcaaacatgtacaggggaactgccctttataaaaccatcagctcttgtgagacttattcattatcatgagaacagcgtgaaaaaaaccccacattaattaccacaagaacagcatgagaaaaacccccatgattctattac

SEQ ID NO: 668843 - DNA, 2178 bp, Homo sapiens
ctatgagacctcatatatatactatgggtgaaatatcagcaatggagagttagcaaggaatggttctgtttctatccacatttaagaagagggtaagaaacaattcagtttcctttgcatgtcattctttatttgcaggttatctctcatttgatataatttacaaagtattatgaatagtggcatccctaagttctaattatgttctacaaattagaattaggtcaagtgttatgccagatacaaacagtataacaaatgagcttagaaatcttaaaaatgaaaataaattttattaattataacatctgtttcaaaagagaaagtctactcttttacagtcagatatactcaagagaaatataattacaaaagacagaaaattttgaatttaattgaaaactaatgcaatatagaagtaaataaataaataaaatttcagagtacactttaattggaagtatgggatctctgtagctacttcttagcaaatatctttaattatgctcattttcctcctttcttgacacagtaaaatgatctctcatcatctctaagcccactgctcaagccatttatttcgtgactccagacagctgagtaggaaactaaactaatataatcaaatcgatcactttaaacagtgtaaatctggtcacttttggttagttattagattctttttcaattactgcctaggggaaaagggaatatattttacttcttgaaatagataatcgtgcatagaataaaaagacatcaaaatcgtgaaatgacataacatatttctgcttatgcgaacagatggaaatctatacattctaacatatacagtctctaaaaaacttactttaaagcataggccacctaattagtgtgggtaggggaaggtgtcaagtttgaaagttttaaattttagactcacatgtgtttatatacatttatttaccatggtattactttacaattatactttcttttaactcaaaacactataatttatttacatctaattattgaagtcagcaattagggctggttttcagcttgactcactcaggtatctttagtcagaagcaaggtgacaagagacaacagcatattagatttcttgaggcctaggctcagactggcacacgatcatttctcctgcattctacagatcaaagaaaaccctagagcagcatagattcaaggagtagagaaatcaactatagctcttcataagaatatctataaattaagaggaaaaggaacatgaatacaaggagaggaataatcggggccattttctgcaaacagcataccacaaatagctaataaatattaaaataatacatgccatagtaaaaatttcaaacaatacagaacaacatttctcaaactagcactcttaatattttacatccatagatttgttttcaactagcatgtcacaaaaactttgagaaccaaatcaataaatagaaaattactcaagttccagaatgatcacttgggtggtacatctcagggacagatccaaagagcagggcataaatttgaaaaataaggtaacaatggaaccaaagcccacataaggtgtgttcaaaactttggctgataacttaaccagatggattgcctgcttaacattatgcaatgttatgcacaggacttagacaaggcccagagtattaaaatgtaatgctgaaaataaccagtttacaacatacaatcacttggcatacaaagaaacacacaaaaatgaactaacgccaaaatatcacacggataagttatccaataaagactttaaaatgagtattaaaatgctcaaaccrattattgtgaacattcttttttaaatgcaaaacaattaaacggttcagtgtattagcccattttcaaaattctatgaagaaaaacctgagactgggtaatttttaaagaaaaagaggtttaatggactcacagttccacatggctggggaggccttacaatcatggtggaaggcaaaggagtagcaaaggaacatcttacatggcggtaggcaagcaaacatgtacaggggaactgccctttataaaaccatcagctcttgtgagacttattcattatcatgagaacagcgtgaaaaaaaccccacattaattaccacaagaacagcatgagaaaaacccccatgattctattac

SEQ ID NO: 668844 - DNA, 2534 bp, Homo sapiens
tccattttaaaaagaaataaatttgaaaataaagtatttcaaaattttcttgattctcaaaaatctcaaaaggctgaaaactaaagttgtatagctttttcctctaagaaacagcactaaaactacaatatataatataaaataagttgacaaaaacagttcttacttgtaatttcaaaataataatttctacatatttgtttttattggcatgtattcataaaataatgagagtctggataaacaataaataaagtaataagctggagcaattttcccttgtgtgcaatatgaatcattgaagatcaaggcctctcagcatctccatgactcactactgcaggatgctacacttattcagaaagcccagtcaagcgtgcaccaaagactgtgcactcagcaggaagggagtccttttagcattatgaactcagcgggatcaacagttacaagctccataatagacagacttgctgcagatgtccctttcttgtctctatattgcagttttcactcttcattttacatggaaatatgtagcatgtctgtgtatgcttaatccatcctggcaatgaatataacagtgaagaaggcactttgctccattaagcaaattagatgccaaatattctgttaacctacatcatctatatgtaactattctgtaggaatttacatttataagtcccttagttaattatattattaaataaaatatatgttgagcattgcaaattagcttcttgttaaagaccccgtatttgaaaagtaattgaaatatacatgatttcaattatataggtgttcaaaatttagttggggatatgcacaagaaattgataaataaaatgtggcaatatagtgtcgtatctagtactttaaagatttagaattagagcatgtatttgaatttatatcatgtatccacatttactattaaaataggtccctttttatgttttacctcttctaaaaattcacagaattatgtatttcctcttgtttctccgggaagaaagttaatttctactattaaataagaccttayctaggcagcattttaacattctaagcctcagattctttatctctaaataggatggattatatttatattggaatatttctttttaaagccagagcaaaacaactgtgacatttaacacatgaaaattggcattggtcattgcttatgtcgcatattccttataatggttgtgtgtaaaaacactaatccagtcattattttacagatgagaaaagtgaaataaatacataacttaacaccatctaattataatgttcaggtacttgatttaaatgcatttatattttgtttacgtattttggacttaatattttaacattcttcccattttataattccttaatgaaacaatgtctcatagattaatacaaaatatgaagaaccaagatacttcccttcactgccccaggaaatgcaagggagaggatatgaaataagcttggccatcaaatcagttcttctatagaaaacctctaatcttcaagacaatgtgataaaacaatgaggccattgaaaagaatttatggaggactattattaaaaagtcaaaaaataacagatgctggcaaggttttggagaaaagggaacacttattaactgctggtgggaatttgaattagtttagccattgtggggagcagtgtggcaatttctcaaagaactaaaaacagaactaccatttgacccagaaatcccattattgggtatatacccaaaataatataaattgttctactataaagacacatgcacatgtatgttcattgcagcactattcaccatagcaatcatggaatcaacctaaatgcccatcaatggtagactagataaagaaaacatggtacatatccaccatggaatactgctcagccataaaaaagaatgagatcatggattcaggaaccctctatttgagaggagggggagtggagggggaggatcaaaacactacctgtcaggtactatgcttattagctgggtgatggaataatctgtataccaaatccctgtggcacgcaatttacctatataacaaacttacacatgtacggttaacctaaaataagagtttaaagaaaaataaaaaataacaatattcgtggtgtccagaggctagcagttctggtaagaataaagtagtttctccttatccatgaaggatacattccaagatcaccagtggatgcttgaagccatggggagtacaaaactatgtacatcatgatttttcctataaatacatacctataataatgtttaattgataaattaggaacattaagatatttacaataactaataataaaatagaacaatataacaatagcctataatagtatttgtgttcatatagtctctctctcaaaatatcttgtactgtgctgatttatttttgcaccacacttgaccatgggtaactgcaaaactgtggataaaggtggagtactgcattcttaatttgaaaatgtatttcatataaatgca

SEQ ID NO: 668845 - DNA, 451 bp, Homo sapiens
accatgggttccttctataactagaggttactggggcaaatatatcacacataggcttctctactagtttatttaatttcaaatgttagcctcaagatcagagcgccattttgttttggctaataatatgagtttaaggagctcttttgtgactactatggtactagatgtaatgtaaataaatgagttacctaagcaatagagctctctaacatatcagttagtattttgtgcatactaagtacactttagatttgtcacaaccagttgtttaatttgagcctgtgaatgggtacctgaactgcagcagcaaaagattctcaaacwcatgaacaccaatttaaaacgtatacatatgtaacaaacctgcaccttgtacacatgtaccctagaacttaaagtataataaaaaaaattgacatttaagtagtttcctttctaaattttattt

SEQ ID NO: 668846 - DNA, 587 bp, Homo sapiens
ttaattaattgaggtccttaatttaattacctaaaaagggtattatcctgagtgggttgacctaatcaggggagaccttcaaaaggtctaaaggtcagagacacaaaaagtgaaagagataagaagcatgggtgaaatttatcttacaggcctggagggagaaaatcaccgtgttatagaaagggtcacctgtcaagaaacgatggacagcctctaggacccgaaaatggccctggattgacagcaagcccataaacggaggttcagctccaaggaaattctgctaattaacgtgagcttggagagaatcmcaagccttagatgagatcataggattgatccttcatatttctaggtccttcagctcttttcaaaactattgtgaagtgaagggttaattttgtcagatctacttgccctgcttgctttttgtcactttctgttttttgttttttatttttcctttttctatgaagctgaagtccatggtagctgaaggcctcgccactgaagctgaaattgtaccttccctggctacttataggtggatatcattcctaagtcaccatggtaatggtcgcttcggt

SEQ ID NO: 668847 - DNA, 1689 bp, Homo sapiens
taaaaatgtgtgctcagctgtgtagtttgaaagactgtggcagtagaacaaaagagatggggaagatgtagggacactaaagaggcagccacagtaatttgtgactatgtgaagagacgggtgaagatagcagaaaaacagaagggtctcttcaggtttctgattacgggtgataagaaaaaaaaataatatgtttgacataaagagtagatgaggaaaaggagaagcagagactatttctgattctaatttagtatctggtttatcaggtcttcttttatgaaaaatgaaaaaataaaagtttttaacagatattttttaatgctgcagatgccaaacaaaattaaagagagcaagttatctgaagttcttggataaagtattctgaaacagcatgctgaaggatttgcatataaccagtagccaagtgaaggattgtgtatctatctatcataagcttctgagcttctttttgtatagtaaatgttgataaatttaaaagataatagattatgtcatagcctgagaacatatatttcaatgaccccaggggaaatttcagcaatagattataatcaagtaaagtcaagtaaatcaaataaaattatcttcttcctcagtactaagaatttaatttttcactgtaacacaactcggagcatgcacatttgaaaaaacagctccctttaattctttagggctgcaacataataaattaaatacattattatgattgaacaaaaataaatataaatagttatcttttattttagttcattcagcacctcaagtactttgtgatgtggggaatttatattgctaggatccaaattcccagtcaatatgatttcaaatacatgtgtattggtttcaagcaaaattaaattgaataacagtgttttagaaatgatgaaatctaaatgcccaagaagatttagctaaacagtgccatcaattaaaatagctttctaaagagcagttgtttgttttgttgtacttgcaattctgatgtccaaaatgctaaaacactttttgaaaaagagatttccctcttatgtttaagtcttttgagttcagttataagttactaaaggttacttctttacaactttgttgagtgaaaaccttctgggtttttcttcatggctggatatgtccaggggcatattttaaaaatgtaacagttgccaacggagagcaactggaagcctcaaatgtttcctgccatggatttttaawtctcataagatttaatgctacagaacacactggagaattaaagctctctggaggggcaattatttcagctcttctcaatgcttggggtatcaaatatggtcaataattcaatagcattcatctttggctgctgaatccttagatacagcaaaaatactggattcaaattgatgtggaatttccaaaagtagtaccatttgtaccatcatgattagctataccatttctctttcttctctctctctctctctctgcctctctctttcgtccattttgagatcagcatctctatatctttatatgcctgtgttctagaacatacttcaatatggcaggcacttggtaaatgtttgcttaattaaattgaatataacttgaagaacacattataaaattttaaacttgcttttccattttatcattttaccaaattctctttttacacatcca

SEQ ID NO: 668848 - DNA, 1764 bp, Homo sapiens
  misc_feature 871: n = A,T,C or G
atcctctcctacttggcctcaaatccgagttgcagggttcctaatcttggtttatcctaaactaagacacttgcacatcaggcatcattgcaccttcactggtaaagtgaatctttacatgttgcattgcaagtatgttaggggattggcagaattgcctgaatttgctctcacacctaccatacaagtgaattgatttcccagcctaacaaactaagggtataagagcaattgctacccagaaaaggggcggatatagcatggtttggtgcagttcctctgggccccaaagcccctaacaggagcatagacgcagatggcactctccacatagggtttcatttttctgcagctgttacatcctcaagcttgtatcatgatcccagaagaacttaccataacaattgacatgctgctattaaagtaaatgttgcaaacaccttgtttcgtggttgttgaatgaaatgcagcatcattaaaggccatatctcctcttggagagggatagggggatagggtcagcacccaaacatcactaaacaacattctgtctctacctctctaggatcacagaaaggaacccctttcgccctagaaatgtacctgcttgagaagctctgcagtgtgttgaggaaagaagcaatgataccatgtgagggaagtacaatagactagaagttgtgtcccccactccaaatttatatgaaatcttcatccccaaggtgatggtatcaggaggtggtgcctttgggagatgattaggtcaagaggtcagagctctcttgagtgggattagtgcccttataaaagaggcctgaaggccgggcgtggtggctcatgcctgtaatctcagcactctgggaggccaagncagacggatcatctgaggtcgggagttcgagaccagcctggccaacatggtgaaaacccatctctactaaaaatacaaaattagctgggcgtggtgtcatgcgcctgtaatcccagctactcaggaggctgacgcaggagaatcgcttcaatcccgtaggcagaggtttcactgagcctagatcgatcgcgccactgcactccaacctgggtgacagagtgatactccgtctcaaaaaactaaactaaaataaataaataaaaaaaagaggactgagggagaycccctcgccccttccaccatgtaaggacacagctggaaggcaccattctatgaaccaggtaacagatcctcaccagacatcaaaactgctggtacctgaatcttgaacttcagcctccagaactgtgacaaataaatctctgttgttcataagccactctgttcatggtgttttgtgatagcagcccacacggagtgagcgagcagcctgggtgactcacactgcctggggatgggcattagcagtaacgtcctgggtgtatgtattggagactccagtctttagtacctgcatgtacaggtagtctgtgttcccccccatcactgattctcctgatccaagtgtcactccgtccccccatgcacctcatcttcctgcctgctcagttccactgtggaaatgattgagttaaatccttaagataaaaaataaactttgctcacaatgaccaactagataaacaggcacatgcaatgccaaaactcaaaatcaatatctgggagactgtctctatttggaaaaggagaggtgtattaaattaaagtgtgtcctttgatttttccctcaacaaatatggcagtctctaaaacaaattgcccagaatgattta

SEQ ID NO: 668849 - DNA, 1147 bp, Homo sapiens
tcggcctcccaaagtgctgggattacaggcatgagccactgtacccagtcaagcctagtttctaaatgcacgaaaactgagagacgaagatggacaaatgcagtcaaacccccaaggcccatcccgggctgcagggaaggtgagctcctgcttttgtgtgtcacacacaattgtgaaacacaggtcttactggcctgctcaaaaataaaaattagccctaaaatttatcagcactttccgtgtttaagacaacctgaaagctgagtgtgaaacctggaaacccgctgggaggaagaacagcacagacaaccacaaagaggggtgcgcccgccaagagtgatgacggcagagctgggcctcagcctaagtcccaggaatagagaccccaggaccactgaagtcatcaacagtcatgccagggcctggagcatcctggcgacgtctcacatcaggcctgacggctcaagcrcgtgatacaaggggtgaaggggctaacgcatatttgatgtcactgccttaagttaactttctgtcaaatgatactcacgcaacatgggaagaaaagaaaaaaatatatactttactttttggccgttgaaatattcacctccaaaaaggattaactcatctttctcaggatgaaccgagagggaggcatttaacctacaagacacacaagcggcaggtcagcaagatcacccccgatacccacctgagcgctgtccccttcctcacagaatcctctgtcaccacaaactggctgcctctacacttcctgaaaggagagcctggcatcgagaaaggaagcaaaggtgccacttgaacaccaacccctctaccagtgcccagggccacactccaaggacaaccatggagctggactgacacagtgtctggttgtattaacaaaaaaaaaaaaaaaaaaaaaattccccaggcaggaataagtccagatgcccctactgatgtatcaaatgttccagaactgtttttttgatttgttttttttcatttttgagatggagtttccctcttgtcacccaggctggagtgcaatggcacaatctcagctcaccacaacctccaactcctgggttcaagcaattctcctgcctcagccctccgagtggctgggattgcaggtgcc

SEQ ID NO: 668850 - DNA, 1147 bp, Homo sapiens
tcggcctcccaaagtgctgggattacaggcatgagccactgtacccagtcaagcctagtttctaaatgcacgaaaactgagagacgaagatggacaaatgcagtcaaacccccaaggcccatcccgggctgcagggaaggtgagctcctgcttttgtgtgtcacacacaattgtgaaacacaggtcttactggcctgctcaaaaataaaaattagccctaaaatttatcagcactttccgtgtttaagacaacctgaaagctgagtgtgaaacctggaaacccgctgggaggaagaacagcacagacaaccacaaagaggggtgcgcccgccaagagtgatgacggcagagctgggcctcagcctaagtcccaggaatagagaccccaggaccactgaagtcatcaacagtcatgccagggcctggagcatcctggcgacgtctcacatcaggcctgacggctcaagcgcgtgatacaaggggtgaaggggctaacgcatatttgatgtcactgccttaagttaactttctgtcaaatgatactcacgcaacatgggaagaaaagaaaaaaatatatactttactttttggccgttgaaatattcacctccaaaaaggattaactcatctttctcaggatgaaccgagagggaggcatttaacctacaagacacacaagcggcaggtcagcaagatcacccccgatacccacctgagcgctgtccccttcctcacagaatcctctgtcaccacaaactggctgcctctacacttcctgaaaggagagcctggcatcgagaaaggaagcaaaggtgccacttgaacaccaacccctctaccagtgcccagggccacactccaaggacaaccatggagctggactgacacagtgtctggttgtattamcaaaaaaaaaaaaaaaaaaaaaattccccaggcaggaataagtccagatgcccctactgatgtatcaaatgttccagaactgtttttttgatttgttttttttcatttttgagatggagtttccctcttgtcacccaggctggagtgcaatggcacaatctcagctcaccacaacctccaactcctgggttcaagcaattctcctgcctcagccctccgagtggctgggattgcaggtgcc

SEQ ID NO: 668851 - DNA, 684 bp, Homo sapiens
atttattgatttgygtagcgattgcaccactgcactccagcctaggcaacaaaggaagaccccatctcaaaaaatatatataataaaaataaaaatcaactctcattgatttctatgtaaatatgcacaggtgatgtccatatagacataaaaaataatatttctgacagtgggtccatatgatcttcaaaatgtaaaatgcctgtctgtgtaattgactggttagactcattaatgaatatagattcaattctactttcttgttgtagataaattatataatctagcttttcatttcacttttttactgataacaacaggaagaatgacaagatctgtattttggaaaattactctggtaggagtaaagatgaaacaatgatagaattgcacggacaactagaaaaaagtatggtcttctgatattctatcacatcacatactaaaggcctcataaaactcagatattttatctaaaaatgttattttcatcataggaatgataaaagcatgagagtacagttgtattaaaatgtgcttgtatcacaagcacaggtgctaaaaaggaggggaaaacatccttactgatattttcaatgtatgttttacttttcatcaacatgaacctcaacttgatatgatgcagattgaaggaaatcacccataattccatatgaaaaaggc

SEQ ID NO: 668852 - DNA, 737 bp, Homo sapiens
ttaggggtcacgtaatygaaaagttcaggcaagcctggatccaaaagcccgaaagatgccaacaggacgagttttcccatcgtgtcatctctgctttattcagtgatggttttatctccagacaggttctcaagagttctatctaggatgacatcctcctggcatagcaactccaacagaaagaaagcacctctttcccagggattctagcaaaagttccaggactcactgtcattggacagaattgggtcacatgccaattcttgagccattcggtgtggccagggcactatggtgctctaaagaggcctgggtcacatacccgcccctggactgagagtaggctgggagcaggatctctaaaaggcagtcttgatactgttgcagaggttagaggagagggtatgagaagcaaatgtccggccccagaagacagtgtgtcctcatatttaatactgtgtctgtgacaatttaagatatttgggtcaggcatggtagctcacacttgtaatcccagcactttgaaaggccaaggcaggaggatctcttcaggccaggatttcaagaccagcctgggcaacatagcgagaacttgtctctacaaattttttctttttttctttttaattagccaggcttagtggcacatgcctgtggtcctagctacttgggaggctgagttgggagcatcacttgagcccaggaagtcgagactgcagtgagctatgattgcacca

SEQ ID NO: 668853 - DNA, 737 bp, Homo sapiens
ttaggggtcacgtaatcgaaaagttcaggcaagcctggatccaaaagcccgaaagatgccaacaggacgagttttcccatcgtgtcatctctgctttattcagtgatggttttatctccagacaggttctcaagagttctatctaggatgacatcctcctggcatagcaactccaacagaaagaaagcacctctttcccagggattctagcaaaagttccaggactcactgtcattggacagaattgggtcacatgccaattcttgagccattcggtgtggccagggcactatggtgctctaaagaggcctgggtcacatacccgcccctggactgagagtaggctgggagcaggatctctaaaaggcagtcttgatactgttgcagaggttagaggagagggtatgagaagcaaatgtccggccccagaagacagtgtgtcctcatatttaatacygtgtctgtgacaatttaagatatttgggtcaggcatggtagctcacacttgtaatcccagcactttgaaaggccaaggcaggaggatctcttcaggccaggatttcaagaccagcctgggcaacatagcgagaacttgtctctacaaattttttctttttttctttttaattagccaggcttagtggcacatgcctgtggtcctagctacttgggaggctgagttgggagcatcacttgagcccaggaagtcgagactgcagtgagctatgattgcacca

SEQ ID NO: 668854 - DNA, 2291 bp, Homo sapiens
taattttattattccagaaaaataaactagttcaaattcaagggggaataatcaaagtttattaccagaaatatgaatagttgatccagctattcaaatatcagcctattcacattttttaatctaaactttcagattgaaagaccataattttactttcatcttgtagacatttagagacttacaagggctcaaggagaaaggtcaaagtgctattattagacaattcaggccaatgagtgccgggcatttgcacaactctaaactaggggactgaaaaatgttctctttaatgattctttctttccattccctactgttttgcatgctttcaatttctcagtttctagcgccatcactccatttccaagctcctgggcatgctatagtttgcttaaaattgttgaggtattctctttcacctgccatctgagagtagggggatgttcggaaaccaagatcttcagtgattttatttttgcttccgttttcaaccacatttactgtcatcctctcacttacacttctgagtatcttctcaaattgtcttcatagaatctgctaaataagtaggaggctatagttttccatctgagcctctgcactctcttgaactagaataagcccttgacccaaattaaacaaatctgattctctttcagaaatgtgaaattgaaactgaggaatgctatttttttctggggatatgtttatctcgagggacctcctaagacttatgggctatttttctgcaaagagaaccagagaaagcactcagaaaaaagagaaaaatgaaacagatcaacacagaccagaaaatagaaaaaaaaatgtagtgagataaaaagatgaagtgggcaagagaagaacacaaggacaaaatcagagataaagagagggatagtcttaatccctggccaatctgacagtctgtttccagactataggaggtttgcctttgtgcactggcaaaatttccacagaatgattcctttctatttccaataattatcacttgttgtcatagcttatttgaatgaatttgagttgctttagtgccaaaaaaaatctctgaataagacaattctttccaaaccattctgtgtgctagaatgccccttgccctataattcattggccttagtctttcagccttcaaatctccttctctatgtggcccttcgcaaccttttttggccatatttatctctcctccatgcttccgtagcatgttcttttgctatgttttcctgctctttagaatttatttattgttagtggartatacttgatagatatttcaggtaatatttcatatgtattgaaaagcacattgtattttttggtttagaaactaatgatatatgattccatatggttcataatttgtttataagtacaaatatatagatatatttatacatatttatgtataaatatttatatgtgtatatgagtaaattctgttgagtcatttacattttctacatcttatttttgttctgcctaacctattgaatttttaaggtggtatgttagaaagaaatatactttttcttagaattgtttctgatttgttgaagttgttgaagtctataatattatgtcttcattgtgggttgaatttttatcaaattaaaataccctatcttctcatttaatatcctttaaattacttttttatatctggtgctactattgctcttaatgttttgttttggcagatactgttgaaattcctgttttaatccctcccccttttttttaacattcatagggtattcactgtattccaatatgtggtaataacgtgactgtagatttattgtaggtgggagtagttctaccagccatttttccttttatgtgaaaagattcaccgtaccttggaatcatttgccctcagggacactatcttgctgctctagttccaaggctcacattcaatatactggtcacaggaaaactcaatggctcttgcatatttgctactctatatgtaactcctcttttaataacagaatatgtgttattgcctctaacttttcaatctcttaactacaagtctagcgttcacccacacaaatcctcatactgtaccaagcttctctaaaatctatttgagactatgatttctttgctcccatctgtttccatctgtttcttatcttttcaggattcccaccaaatttccagtcaactgatgatctctcctacctgcctatactgtgaaattttcatctacttggtgctattttagtctcaccacattgtaatgatgtctttacatg

SEQ ID NO: 668855 - DNA, 598 bp, Homo sapiens
tggctgtcaggtgatggcacatccttaccctctggtcctcgaggggcacatctactctttacccatagttcagagcactttgctgggtgacatccgcatatttgctgcaattgttactctctggtccttgagggacacacctactctttgcccatagttcagagtgctttgctgggttacatccgaacatttgctgcattcgtagcacaacaaaacagctgccctctctgaggctcgaactcaggaccttcagattatgagactgacgcgctgcccactgcgctaagagggcctctgcttagacaagcttgctacytcctgtaagaaaatgcctgcagccccttgcactcgcggagtcatctacgcaaggtcgggctctgcaggcagcagcttctggtctcaccccgggcttgtgcgcacacctggggacatgtgggaaggtcgctcttgcggccactgagcggcctggcctcagggaacgagccccgcgccgggaagaaagctgcctgccgggagcgcagcctattggggacccgggacccgagccaccgcggctcaccaagaggcggtggggccctgcggtgcgtgtgggacgccg

SEQ ID NO: 668856 - DNA, 658 bp, Homo sapiens
aagatatttacatgacattttgaccttaacattggtatacttcattgttcccaagtatgttttatgttgacttaaagctttcccaggacactttaaaatgtgtcccttcatgttatcaaaactgtgatttaggtagatgctaaagagcaaaacacgattgacatttgccataagcccataacgtatacacaaacacatacatacacacacacactcacacacatatatgtatcataaagaagaaagaaaggttatactgttgggtctaaaccctaacttaaaaacctagcatggtgaacacacatagtcgtaccctacagaaaatagttaaaactgaatctacatatatatatttttatgatctatcytaggtcacaatttacaagctctctcctgggtgctagtggaagttgaaacaagggaaacactccaaaacccacagaatacccccacttagagttgctatcatcaacttcagaatccaaatgtgtttccaatatactttccatagaaaattttcccaaagagaatttgttaactgtgtgctaggatgagcagataagaagaaaagaaacatgttcagaatcagcaattggaatacatgcattagaatagacttaacctccaaaaaggcaacaacttaggataaatctgatcc

SEQ ID NO: 668857 - DNA, 658 bp, Homo sapiens
aagatatttacatgacattttgaccttaacattggtatacttcattgttcccaagtatgttttatgttgacttaaagctttcccaggacactttaaaatgtgtcccttcatgttatcaaaactgtgatttaggtagatgctaaagagcaaaacacgattgacatttgccataagcccataacgtatacacaaacacatacatacacacacacactcacacacatatatgtatcataaagaagaaagaaaggttatactgttgggtctaaaccctaacttaaaaacctagcatggtgaacacacatagtcgtaccctacagaaaatagttaaaactgaatctacatatatatatttttatgatctatcctaggtcacaatttacaagctctctcctgggtgctagtggaagttgaaacaagggaaacactccaaaacccacagaatacccccacttagagttgctatcatcaacttcagaatccaaatgtgtttcyaatatactttccatagaaaattttcccaaagagaatttgttaactgtgtgctaggatgagcagataagaagaaaagaaacatgttcagaatcagcaattggaatacatgcattagaatagacttaacctccaaaaaggcaacaacttaggataaatctgatcc

SEQ ID NO: 668858 - DNA, 1109 bp, Homo sapiens
ccagctgccccctcctgtctaccttccacttccctctccacacacaacctgcttaccagagagctgagcagagccaccaacagaacttcccccccacgtcgctgctcccagtcgcaacccactcacccacacctgcgccttcctgcggccgttctcctgttctaacagaggacggtccctcttcccttctgaactcaggccgtccagccttccccggctctgtgatgyctctctccttgcacatacacaactcacaatattgggcaggcccctgaccggctcttctcccttagccccttgtctgagtcctgttcctttgatgtcctatttctagtctttccatttctctctgtctctacctcctccccaggctaccattatctctagtggggacccatctgtagctcccggtgggtctccctgtgtcctgataccctccaataatctgttccccacagcagccagaacaatcttttcaagaaataaaactggtcattcacctgcctgcttaaagccggtgtaggatacaggctaaacgctctcccatggcctccagggccctgcattttctcatcctgtctacttcttcatctagttgtttcccacccagcgtaattgtaactgtttagttgaaagttgacgaggtcttttgtcagctctagaaatttcttttcttttctttcttttttttttttttaagacagagtcttgctctgtggcccaggctggagtgcagtagcacaatctcaactcactgcaacctccaccttccgggttcaagcaattctcctgcctcagtgctgaaattacaggtgtgagccacagcacccagcccatcagctctggaaatttcttcatcactctctcttccatgattgccccatccctattttctccatgcctacctcctggaatttccatgagacacacgttgggccatctcattccattttccgtgtctcttagttgctctgtcgtgttttccatctcttttatctctatcctaaattctggatagtttcttcaagtatctttttagttcattaattctttttacagctgtgtcttatttgtttacttacccactgagattttcattttattttatt

SEQ ID NO: 668859 - DNA, 1109 bp, Homo sapiens
ccagctgccccctcctgtctaccttccacttccctctccacacacaacctgcttaccagagagctgagcagagccaccaacagaacttcccccccacgtcgctgctcccagtcgcaacccactcacccacacctgcgccttcctgcggccgttctcctgttctaacagaggacggtccctcttcccttctgaactcaggccgtccagccttccccggctctgtgatgcctctctccytgcacatacacaactcacaatattgggcaggcccctgaccggctcttctcccttagccccttgtctgagtcctgttcctttgatgtcctatttctagtctttccatttctctctgtctctacctcctccccaggctaccattatctctagtggggacccatctgtagctcccggtgggtctccctgtgtcctgataccctccaataatctgttccccacagcagccagaacaatcttttcaagaaataaaactggtcattcacctgcctgcttaaagccggtgtaggatacaggctaaacgctctcccatggcctccagggccctgcattttctcatcctgtctacttcttcatctagttgtttcccacccagcgtaattgtaactgtttagttgaaagttgacgaggtcttttgtcagctctagaaatttcttttcttttctttcttttttttttttttaagacagagtcttgctctgtggcccaggctggagtgcagtagcacaatctcaactcactgcaacctccaccttccgggttcaagcaattctcctgcctcagtgctgaaattacaggtgtgagccacagcacccagcccatcagctctggaaatttcttcatcactctctcttccatgattgccccatccctattttctccatgcctacctcctggaatttccatgagacacacgttgggccatctcattccattttccgtgtctcttagttgctctgtcgtgttttccatctcttttatctctatcctaaattctggatagtttcttcaagtatctttttagttcattaattctttttacagctgtgtcttatttgtttacttacccactgagattttcattttattttatt

SEQ ID NO: 668860 - DNA, 1109 bp, Homo sapiens
ccagctgccccctcctgtctaccttccacttccctctccacacacaacctgcttaccagagagctgagcagagccaccaacagaacttcccccccacgtcgctgctcccagtcgcaacccactcacccacacctgcgccttcctgcggccgttctcctgttctaacagaggacggtccctcttcccttctgaactcaggccgtccagccttccccggctctgtgatgcctctctccttgcacatacacaactcacaatattgggcaggcccctgaccggcycttctcccttagccccttgtctgagtcctgttcctttgatgtcctatttctagtctttccatttctctctgtctctacctcctccccaggctaccattatctctagtggggacccatctgtagctcccggtgggtctccctgtgtcctgataccctccaataatctgttccccacagcagccagaacaatcttttcaagaaataaaactggtcattcacctgcctgcttaaagccggtgtaggatacaggctaaacgctctcccatggcctccagggccctgcattttctcatcctgtctacttcttcatctagttgtttcccacccagcgtaattgtaactgtttagttgaaagttgacgaggtcttttgtcagctctagaaatttcttttcttttctttcttttttttttttttaagacagagtcttgctctgtggcccaggctggagtgcagtagcacaatctcaactcactgcaacctccaccttccgggttcaagcaattctcctgcctcagtgctgaaattacaggtgtgagccacagcacccagcccatcagctctggaaatttcttcatcactctctcttccatgattgccccatccctattttctccatgcctacctcctggaatttccatgagacacacgttgggccatctcattccattttccgtgtctcttagttgctctgtcgtgttttccatctcttttatctctatcctaaattctggatagtttcttcaagtatctttttagttcattaattctttttacagctgtgtcttatttgtttacttacccactgagattttcattttattttatt

SEQ ID NO: 668861 - DNA, 638 bp, Homo sapiens
taaaacgcttgcaaggggccactgttctcagcatttcacctgtcaacctcacttaagccttaaacagcctatgatgaggttctgatagtgtctcccttggcccgctggaaggcccagtgctgaaggatgactgggcaccccggctcttgggatggtcaaaggctctcacctggacagggaggaccccctcctctccctgggccttctgctgccctgagcccctactgctctctgccacagactcgggagggagcatgagctgcatccaacaggcygcagcaggtcccggcctctcagcacccaagaccagacagaggcagtgcctcggctgcagtaaaggcctagcgacccgggtgggcatggggcacacgttcctactctggcattagaggtcatgccactgcttgtctttaccattctacccagtgtcctgcgaggacttggtcctcaggtgggtcacaagtctccagtccattaattaactggtcggaagtgagtcccggtctatccctgtgaggagcagggggactggcacctcatttcctcatggactcatggccctacacaacgacacgcctggccttcctggacccatgcactcagtccagaaggacatttgctttgagctcgcctggtgg

SEQ ID NO: 668862 - DNA, 638 bp, Homo sapiens
taaaacgcttgcaaggggccactgttctcagcatttcacctgtcaacctcacttaagccttaaacagcctatgatgaggttctgatagtgtctcccttggcccgctggaaggcccagtgctgaaggatgactgggcaccccggctcttgggatggtcaaaggctctcacctggacagggaggaccccctcctctccctgggccttctgctgccctgagcccctactgctctctgccacagactcgggagggagcatgagctgcatccaacaggccgcagcaggtcccggcctctcagcacccaagaccagacagaggcagtgcctcggctrcagtaaaggcctagcgacccgggtgggcatggggcacacgttcctactctggcattagaggtcatgccactgcttgtctttaccattctacccagtgtcctgcgaggacttggtcctcaggtgggtcacaagtctccagtccattaattaactggtcggaagtgagtcccggtctatccctgtgaggagcagggggactggcacctcatttcctcatggactcatggccctacacaacgacacgcctggccttcctggacccatgcactcagtccagaaggacatttgctttgagctcgcctggtgg

SEQ ID NO: 668863 - DNA, 635 bp, Homo sapiens
gctgcagcacataytcatcgctacttgtgcctggacaagtcggtcattgagctcagccgacagggcaaagagggtcagcatccgaaactgttggtttttagtttagttaaaatcatctgtaatctgaagtaagcagactcgaccaataaaaacacatcagtttttaggaagttttcttttttctttttcttctttttttttgagacggagtcttgctcttgtcaggatagggtgcagtggtgccatcttggcttactgcaacctccgccttctgggttcaagcgattctcctgcctcagcctcctgagtagctgggactacaggtgcacaccaccacacctcactaatgttttttgtatttttagtagagatggggtttcaccatgtggacagagtggtcttgaactcctgatctctggtgatctgcccgccttggcctcccaaagtgctgggattacaggtgtaagctactgcgcccagccaggaagttttcttgtctggtaataggccatacgtaggtcctgtaccatcctggggcaggctttgttaaagcagtctcccctatgtgtggtttcactttctgccatttcagttacctgcagcttcagttattcatggtcaaccttagtccaaaa

SEQ ID NO: 668864 - DNA, 1882 bp, Homo sapiens
atttgtcactcaagaagtatttgttccgagtccccatccctgttttcttcatacttgctgcatacttcaaaaccagtatttccaaacacttctctctgctccacaaaagctgtgtctgtaaaatctttcagtgtccttcttctacctttaataccctccctgagaacaggaactcttggttgtgggagacgaattctatggaaaggctccagaacacatggagcatgtcaaaaaggaggctttaagaacatgaaaataacactaagtatatatatcacacaccctctttataacatagaacttaaaagctgagtgccatctcaagatagagcacagggtccttatacatttcacaccaagaaggagaggaagtcttggaaagttgatcagagcagatttgtgctagaacaagttcaggaagatgtcaaggactttggagtctctgtgctctttcaactcctacaaatggacctccagtggcctcatccactgaggccgattggcccccagagagagatgctatgcaagggatgaagaatcttgaagggactctgccaattctaccaatcagtcacttcaycaagactgtagggagtttgaatatgggttgtcatggtacacatagtaggtattcaagtatttgcggaatacatgaatgacacaaaatataatgggcttaaatgtaacaaactcctttatgttcgaagataatcagccaaccacaattgtgatgctggtattacaagtattgctattttggtaattcactgaagatttttgaataggatattgaatgtctaatgggaagaaggggctaattgggaaggcaaaagactcctacaagggaaaggtgatatcttaagacacactttgcatgaataatgcttttctttcttggttgcaaacaacagaaacagacttattttaagcagaaaagggattggaagggtacagtagtttgcagccaaagtctgcttaggaggttgccaatagcactcttgccccagtcaatatcacaccaccagacctgaacatatataggacctctgactgatcctgcaactttgtttcatgctcttaagactcaaagtcctgagtgtaagcatcagtctgaccacctcagattttggtccctgtttctggatccagtgacaggtgacttcttacttgctattctacttccataaagaggtatatattaccctccattcttcttggcatgaagcaaaataggaagggtattctgacactgagaagccaaaacaacaaatgtcccttgtacatccctgctgaaagtgaacagctctaaagagctttactctcagccgggcgcagtggctcaagcctgtaatcctagcactttgggaggccaacgcgggtggatcatgaggtcaggagatcgagaccatcctaacatgatgaaaccccgtctctactaaaaatacaaaaacaaaattaggaaggcgtggtggcgggaacctgtagtcccagttaacttgggaggctgagccggaagaatggtgtgaacccgggaggcggagcttgcagtgagctgagatggtgccgctgcactccagcctgggcaacagagcgagactcttgtctctaaaaacaaaaaaagctttactctcttcatctcttgcaactaacctgggtgaactttagttttcctggccctatttgccccactcagcaatgccaccctaacctatgcatcattagcatggaggtcctgtcaacacagagaagtcaatgtactctttttcaaagtggaggagacattgtgagaatcagagtgatgtatccgtatcttcaatgtttgacaactctgttttgctccttaaatgaactggacagactccattcatatttggaaaagtcc

SEQ ID NO: 668865 - DNA, 1882 bp, Homo sapiens
atttgtcactcaagaagtatttgttccgagtccccatccctgttttcttcatacttgctgcatacttcaaaaccagtatttccaaacacttctctctgctccacaaaagctgtgtctgtaaaatctttcagtgtccttcttctacctttaataccctccctgagaacaggaactcttggttgtgggagacgaattctatggaaaggctccagaacacatggagcatgtcaaaaaggaggctttaagaacatgaaaataacactaagtatatatatcacacaccctctttataacatagaacttaaaagctgagtgccatctcaagatagagcacagggtccttatacatttcacaccaagaaggagaggaagtcttggaaagttgatcagagcagatttgtgctagaacaagttcaggaagatgtcaaggactttggagtctctgtgctctttcaactcctacaaatggacctccagtggcctcatccactgaggccgattggcccccagagagagatgctatgcaagggatgaagaatcttgaagggactctgccaattctaccaatcagtcacttcaccaagactgtagggagtttgaatatgggttgtcatggtacacatagtaggtattcaagtatttgcggaatacatgaatgacacaaaatataatgggcttaaatgtaacaaactcctttatgttcgaagataatcagccaaccacaattgtgatgctggtattacaagtattgctattttggtaattcactgaagatttttgaataggatattgaatgtctaatgggaagaaggggctaattgggaaggcaaaagactcctacaagggaaaggtgatatcttaagacacactttgcatgaataatgcttttctttcttggttgcaaacaacagaaacagacttattttaagcagaaaagggattggaagggtacagtagtttgcagccaaagtctgcttaggaggttgccaatagcactcttgccccagtcaatatcacaccaccagacctgaacatatataggacctctgactgatcctgcaactttgtttcatgctcttaagactcaaagtcctgagtgtaagcatcagtctgaccacctcagattttggtccctgtttctggatccagtgacaggtgacttcttacttgctattctacttccataaagaggtatatattaccctccattcttcttggcatgaagcaaaataggaagggtattctgacactgagaagccaaaacaacaaatgtcccttgtacatccctgctgaaagtgaacagctctaaagagctttactctcagccgggcgcagtggctcaagcctgtaatcctagcactttgggaggccaacgcgggtggatcatgaggtcaggagatcgagaccatcctaacatgatgaaaccccgtctctactaaaaatacaaaaacaaaattaggaaggcgtggtggcgggaacctgtagtcccagttaacttgggaggctgagccggaagaatggtgtgaacccgggaggcggagcttgcagtgagctgagatggtgccgctgcactccagcctgggcaacagagcgagactcttgtctctaaaaacaaaaaaagctttactctcttcatctcttgcaactaacctgggtgaactttagttttcctggccctatttgccccactcagcaatgccaccctaacctatgcatcattagcatggaggtcctgtcaacacagagaagtcaatgtactctttttcaaagtggaggagacattgtgagaatcagagtgatgtatcygtatcttcaatgtttgacaactctgttttgctccttaaatgaactggacagactccattcatatttggaaaagtcc

SEQ ID NO: 668866 - DNA, 1085 bp, Homo sapiens
tttgattggcaatacaagctttattagtcgttctatgatctcttctaaaattgactcattgttgacattctaaagttaaggcttcaaaactacattcctgaaattcaagttggctcaaacaatatccaacctcattttgcgcagtcaaagaaaactgctgttctttactattggctaaagacatcaagccaccaccctcctccaatcttcagagcaattcatttgattctcaaaattagacctcygcaaattttaaaattatttatcattcagcacaccatttagagctatctcccacttactaatttaaaacagtaaagtaatgtctctgggagcaaaacaaaccaattttaacatttaaaatattatgagtacagtttgtgccaaaggagaatacaaccattgtcttaaagtaggaagacacttaaaagtatattcttcagtcaggctaaaacaaaggtcctcgcttgcctgataaatctgacatctcatcatgaaattgtgttctggataatttggttgcaaggagatcctctgagacttcctaacaataaagatttaatggtatcttttgttttaacctcatagtcttgctctatgtgtatctaacaggaaattacatttattatactgcacatggtatatggttttaagaacagtctctcagaagtcattatgcacaaaaatgaatgctgtgaaactctcaatgaccttactgtcttcattctataacttcactggtaaaactagcctaactccacctttttattagtaaataagatccatagtgttggcattctccctatagatctgtttgaagtaagcacggctacttatcacattcatttccataaaagcaacagaattaagattttcttcatctataaaggaaacttcatgcaaggcatgaattttacatgttcataactacatcgccagggcctagaatagtgtctggtaaatttccgcactctataaatgttgaataaataagcttttgttagaatttttagcatttggtaaagatctctactaaaattataaatgcaacgtaatatttgcatgcattataaatttaatgattg

SEQ ID NO: 668867 - DNA, 664 bp, Homo sapiens
gctctcgggaagctttcagccagcagtcttccagaaactgcagagattccactgtttttccccatttccttgggcctgagaggctgaagcaaagggcacatatgtttattctgaggctaaaaacaaagagcaaagcaaacccaccgacagtccccgagagtgctttccctttccaccaccctggggtccgtgcagggcagcccttcctccaaagcagtggagagggaagcccccatcagccaccacccatgaagagtctgcatgtggaattaatagcataccaagagtcactcagtatttaggacaattaaatatgacgaggattagatttttttaattccaggttaaaaaaaacccacttatttagaacttcaagtgtcaatataaaataatgtttttttaaaaattgttttgctctcaaaaatctaccttagagttgagtaaattaaawattcaattagcagatattatcaaacatctgcagaggagactgtggagaattaacaacaaagcaaaaccaaacagacagtccttgtcctccagcagtttgtagtctgaggcaatggggtcacacaggagaggaaagaggctgtgggggccaaggctacctctctcatgggagaacaggagaccataagcgtcaactcaggctttgggaagtgaa

SEQ ID NO: 668868 - DNA, 1975 bp, Homo sapiens
gaaaagaaaaagaattattcttacatacagttttcagagggcaatttaggatcatctattaaaatgtgttttctcataagaaactatgaagagcagatacctgtgtgggtggtcctgggggctgggagtagggagtgtgaagagagctttctttctttcctttttttttttttcttaagagatagagtcttgctctgttgtccagattggccttgaactcctggtctcaagcaatccacccgccttggcctcccaaggagcttttctttttaccttgtatccttctgtactctttgaatattttgccatgaatgtgtatttcttttataatattaaaaacagttaactaaaatgaataaatacatttccctgatctgatttattctatggaaacatttgttcaaaatatataaagatgtaataaaaaggattttcacagaagcattatttattacactaaaataaactggaaaaacttaaatatccatcaatagacaaatggttaaattagttatggttaaacatccatctgtgtatggttaaattcgtcatcatacataatgactactctgtaaccattaacagataataaagttcatctatacagagggacaaaagtatataccaagtgttaaagagcagatttaaagcaacagatggagcatcatcccatttttggaagaagagattatgtattagtatatgcaatatccaaagaaataatacaagaagaaaaacattccaagctgctaacactggttctttgttgtaggttccactgtggcagaatttcacaaagttatatattcttatgatatttgaagtttttacagagagtgtgaagcaggaggaaaagcagagaaatgaaaataatattttaatacagttagaagtttcaaaaacatcayagtgtcaacttagatgattatgggagaggaataaggggtatgcatcaaatgctgggtgtgcgaaatgatgcacgcccttgtaaccgcataaccccattagcagtgagcagcagctagagagcacctgccacctgctcatctgtatccatgggggttcaagtacatgacagtctctctcatgttcttcttgagggatagcctttttcttcatagattctaataaagtaattcagtgtgcttttatatgggtatatttatcttataagtgaaatgataactcaggaataatgtccaagccccattcttactagatcaaggtaacatgatcctagcatgttgaaaacatgtgtgtttagattttcttacaaaagggagcagagagaaaaggacttatgtggaaattaggagcaagaactaagtgatattttccaagcataaagtagattctcaaggcatcctctgtattgtttctgtcagtatctctgagctgtgaatattccttcaaagaccttcctcccagaataagaaatatgaaatgttaaatgagtttgaaagaacgtattttttgtgtcttctttttaagcactgaaggaccagtagccaaaatacataagtgcataaaaacttcattgcatttcaggaaataactgcttgcactgaggcgatgttcaattaatatctgttaattgattgaaggaacagcaagtaaaaccaagtatgcagcagaaagtgattattgtgaaccctatgacaaaacttttaatggaaatgatttggaataagatttccagaaaaattggcaggtggataaaaatctcttgacaatgaaaatgtaggttaaaactagtctgcccaaagtgtttagctggtagttaaagagctcctacaaattaaataaaatactaataaacttataggaaaatgaacaaaaggaatatatttaagcatatggaaagatgcttaatgtcactataacaacagaaatgcaaataaattatacttaagtactattttttaaacccctatcagattagcaaagatcaaaacataagataatggtgtttgtg

SEQ ID NO: 668869 - DNA, 611 bp, Homo sapiens
tcacctgctcaacacattatagaccctgagacctccatagaactcaacacccatgtggccccccaacccatggaccttctaaaccagccctaaccccccagcgccccatgcacgcagtgttccctctgctggaccccccaggccttgtcagttgcctatagatccatctattctctgacagcttcacctrtaattctccagcctttgtgggactcccccatacccctcctcctaaacaggcgacactcctcgcctccatcatctccaacccccaagcctctgtggagcagccgtatccaacttgcactcctgcctaggccatagtgaccacatacccgtgacttttccaggcatccataagaagacatgatgtgtctcagagctttggttcagattttagtttctgaagggtagggtgggggctccccatgctctgaagcaatgctctctgttttattttgttttatttatttatttatttatttatttttgagacgaagtctcacttctgttaccaggctggagtgcagtggcgcgatctcagctcactgcaacctccgcctcccggattcaagcgattctcctgcctcagcctcccgagtagctgggac

SEQ ID NO: 668870 - DNA, 611 bp, Homo sapiens
tcacctgctcaacacattatagaccctgagacctccatagaactcaacacccatgtggccccccaacccatggaccttctaaaccagccctaaccccccagcgccccatgcacgcagtgttccctctgctggaccccccaggccttgtcagttgcctatagatccatctattctctgacagcttcacctgtaattctccagcctttgtgggactcccccawacccctcctcctaaacaggcgacactcctcgcctccatcatctccaacccccaagcctctgtggagcagccgtatccaacttgcactcctgcctaggccatagtgaccacatacccgtgacttttccaggcatccataagaagacatgatgtgtctcagagctttggttcagattttagtttctgaagggtagggtgggggctccccatgctctgaagcaatgctctctgttttattttgttttatttatttatttatttatttatttttgagacgaagtctcacttctgttaccaggctggagtgcagtggcgcgatctcagctcactgcaacctccgcctcccggattcaagcgattctcctgcctcagcctcccgagtagctgggac

SEQ ID NO: 668871 - DNA, 602 bp, Homo sapiens
gagtgcagtggcgcaatctcagctcactgcaacctccacctcctgggttcaagagattgacctatcttaggctcccaaatagctgggattacaggcgtgtgccatcacgcccagctaattttgtatttttagtagagacggggtttcactatgttgtcaggctggtctcgaactcctgacctcaggtgatccacttgcctcagcctcccagactgttgggataacaggcatgagccacagcacccagccagaatttcagattaacaaccaaaacgtttctttttttwaaacagggtctcactctgtgttgcccaggctggagtgctcactgcaacctctgcctctgaggttcaagtgattttcctgcctcatcctcccaagaaaccatgtgccaccatgcccggctaatttttttattttggtagagatggggtttcgccatgttggccaggctgttctcaaactcctgacatcaggcgatcctcccaccttggcctcccaaagtgctgggattacaggcgtgagccaccgcgcccggtcaaaacatttttttagtaggagtcggagaatgtcctacattttgcacaagagagacatactta

SEQ ID NO: 668872 - DNA, 602 bp, Homo sapiens
gagtgcagtggcgcaatctcagctcactgcaacctccacctcctgggttcaagagattgacctatcttaggctcccaaatagctgggattacaggcgtgtgccatcacgcccagctaattttgtatttttagtagagacggggtttcactatgttgtcaggctggtctcgaactcctgacctcaggtgatccacttgcctcagcctcccagactgttgggataacaggcatgagccacagcacccagccagaatttcagattaacaaccaaaacgtttcttttttttaaacagggtctcactctrtgttgcccaggctggagtgctcactgcaacctctgcctctgaggttcaagtgattttcctgcctcatcctcccaagaaaccatgtgccaccatgcccggctaatttttttattttggtagagatggggtttcgccatgttggccaggctgttctcaaactcctgacatcaggcgatcctcccaccttggcctcccaaagtgctgggattacaggcgtgagccaccgcgcccggtcaaaacatttttttagtaggagtcggagaatgtcctacattttgcacaagagagacatactta

SEQ ID NO: 668873 - DNA, 602 bp, Homo sapiens
gagtgcagtggcgcaatctcagctcactgcaacctccacctcctgggttcaagagattgacctatcttaggctcccaaatagctgggattacaggcgtgtgccatcacgcccagctaattttgtatttttagtagagacggggtttcactatgttgtcaggctggtctcgaactcctgacctcaggtgatccacttgcctcagcctcccagactgttgggataacaggcatgagccacagcacccagccagaatttcagattaacaaccaaaacgtttcttttttttaaacagggtctcactctgtgttgcccaggctggagtgctcactgcaacctctgcctctgrggttcaagtgattttcctgcctcatcctcccaagaaaccatgtgccaccatgcccggctaatttttttattttggtagagatggggtttcgccatgttggccaggctgttctcaaactcctgacatcaggcgatcctcccaccttggcctcccaaagtgctgggattacaggcgtgagccaccgcgcccggtcaaaacatttttttagtaggagtcggagaatgtcctacattttgcacaagagagacatactta

SEQ ID NO: 668874 - DNA, 566 bp, Homo sapiens
cgcagtaatcctagcaatttgggaggccaaggtaagcgggtcacttgagctcaggagttcgacaccagccttgccaacatggcaaaaccccgtctctagaaaaaaaatacaaaaattagccaggtgcggtggtgtgtgcctgtagtcccagctattcaggaggctgacgcaggagaatcgcttgagcccaggagttcgaggctgcagtgacctatgattgcaccactgcactccagcctgggctacagagtaagacctgcctctaaaaaaagaaaaagaaaagaaaatgagcgtattaatataattctctttttgggtttgtctctgaagattatccagttaatggatgtggagcccttgggtctggcatgggcttggctctcagtgattttattatcatgattactgtcattgctggtgttattgtcaacttaatttattgggcagaattagcttttggcactacggtcaaactaaactcccaaatgtcgcttttccttccacctgatttcycagtctggataatccaaatacacaattggtacttaacaaatgtttgttgaatg

SEQ ID NO: 668875 - DNA, 559 bp, Homo sapiens
tttttgtatttttagtagagatggggtttcaccatgttggccaggctggtcttgaactcctgactacaagtgatccacccgccttggctcccaaagtgctgggattgcaggcgtgagccactgcacctggcttcctactggattttaaaatttcagttgggtaaattgagacaggtgggattcctggattaaccyggatgtgcacttcaggtttcagtagaggctatcatattcctttttcttattgaatcctaactattcatcatctattggccagagtgaattatccatgtttattaaacagtcccttctgtgaaacatttttttttctttgaggcagagtctcactctgtcgcccaggctggagtgtagtggcatgatcttggctcactgcaacctccgcccccaccctgggttcaaacaattttcctgcctcagcctccctagtagctgggattacagacgcctgccacaatgcccggctagtttttgtacttttagtagaaacagggtttcaccatgttggccaggctggtctcaaacttctgacctcaggtgg

SEQ ID NO: 668876 - DNA, 559 bp, Homo sapiens
tttttgtatttttagtagagatggggtttcaccatgttggccaggctggtcttgaactcctgactacaagtgatccacccgccttggctcccaaagtgctgggattgcaggcgtgagccactgcacctggcttcctactggattttaaaatttcagttgggtaaattgagacaggtgggattcctggattaacctggatgtgcacttcaggtttcagtagaggctatcatattcctttttcttrttgaatcctaactattcatcatctattggccagagtgaattatccatgtttattaaacagtcccttctgtgaaacatttttttttctttgaggcagagtctcactctgtcgcccaggctggagtgtagtggcatgatcttggctcactgcaacctccgcccccaccctgggttcaaacaattttcctgcctcagcctccctagtagctgggattacagacgcctgccacaatgcccggctagtttttgtacttttagtagaaacagggtttcaccatgttggccaggctggtctcaaacttctgacctcaggtgg

SEQ ID NO: 668877 - DNA, 466 bp, Homo sapiens
aagttgtcaaaatgtaagacatttagaagtaatttttattatttatattgttaatacttaatcactggaaattcattttccttactcgatgttttctttcaactgagaagcctaaaacaaacaaaaaccttgtgtgttatcctgatatagttgactaaatgtatttgttcttatatggatagtaatatgaatgtracatgcaccaattgtcctattataattttcagataagtgtaactaagcacttgtgtaataaatattagtcattttatttcaatctataattgatatttttataacattagcaagtttctatttaatttcttgcaaggatatttcctgtataaagtgcagttttgagaagctcatggtcaataagatactaaatttgtgagaaagaatagagaacccagaaacagaaaaatactcatataagccttttgtaattaagaagtatgacaattca

SEQ ID NO: 668878 - DNA, 655 bp, Homo sapiens
tgatattaatgttttattcagtttaaataaatcttgactctcctatgcttaacaggatttttcaatacattatattttggagctggcattgtataaatatgaaaatagtcacataccgctgattctggctgtttggttagcttgagaaatgaactgatagtcacagaaatttatatcattgtcattaacttcaaacacttgtaagctactcaacttctggtagcatggaagtgttgtatcagttgtataggactgttaagccacttttaaaaagtctttgatctgctgggcgcggtggctcaggcctgtaatcccagcaytttgggaggccaaggcaggcggattacaaactcaggagtttgagaccagccaggccaatgtggtgaaaccccgtgtctactaaaaatacaaaaattagccaggcatgatgacacgcgcctgtagatccagctacttgggaggctgaggcagaagaatcgcttgaacccaagaggcagaggttgcagtcagccgagatcatgccactgcactccagcctggagacagagcgagactccgtctcaaacaaacaaacaaacaaacaaacaaaaagtctttgatcatatttgtaactaaaaattaaagactctaatgtgatataaaatgaaatgaaaca

SEQ ID NO: 668879 - DNA, 1234 bp, Homo sapiens
gatcatcagatgacctaactttgctccacttaagagtcaggccagatagaccttaactcttacctttggatctctcagaggaactcagagtatcttcagactcagaactgtcaccatctgagaagagggataatcggggagaggtgacggtgctggaccatttcactttcttaggaraggtttcaaaactggagttcagccctctctttgagcctaaagaaaggcagacaaaatgcagactggagttacaaaggcccctctgcaggcaccattggactgggagccctgaggttatactcagctatgctgttctctttggccctcaacaccaattcttgcttcttctattatgtaaatatatgagcaaactgttccttttagttgttctctccttcttaggtctttgcctctcttgtatcttccagcactttgccactctgtgtcctttccacataatgtctttatatgtatgtatatttgagatggagtctcactctgttgcccaggctggagtgcagtggtgcaatcttggctcactgcaacctctgcctcctgggttcaagcaattctcctgcctcagcctcccaagtagctaggattacaggcatgcaccaacatgcctgtaatgttgctaatttttatagttttagtagagatggggtttcaccatgttggccagactggttttgaactcctgacctcaagtgatcggccagcctcagccttccaaagtgctgggattacaggcatgagccaccatgcctggcctcttccatgtaatttcttaaaatctatcttccagttaactaattctcccagctatgtctagtctgctgtttaaaccacccaccgagtttctgattacaataattattttatatatatatacacacacacacacatatacacacatacaatgattgtgtgtatatatatacacacatacacatatatacatatatagacacacacatatacatatacacacatacaatcattagagtttttatttggttccttctcttatttgcctgtgcaactttaacctattccttcattatactttcaatttgttattttatttatttaaatgtattaagcatgctttgtaaacattctcatctattaattctaaagtctgtggtcttggcaggtccgattctgcagtttgttgtttctgctgactctccagctagcttatttcctggtgtctttgtaaatcaacagagactgg

SEQ ID NO: 668880 - DNA, 1234 bp, Homo sapiens
gatcatcagatgacctaactttgctccacttaagagtcaggccagatagaccttaactcttacctttggatctctcagaggaactcagagtatcttcagactcagaactgtcaccatctgagaagagggataatcggggagaggtgacggtgctggaccatttcactttcttaggagaggtttcaaaactggagttcagccctctctttgagcctaaagaaaggcagacaaaatgcagactggagttacaaaggcccctctgcaggcaccattggactgggagccctgaggttatactcagctatgctgttctctttggccctcaacaccaattcttgcttcttctattatgtaaatatatgagcaaactgttccttttagttgttctctccttcttaggtctttgcctctcttgtatcttccagcactttgccactctgtgtcctttccacataatgtctttatatgtatgtatatttgagatggagtctcactctgttgcccaggctggagtgcagtggtgcaatctkggctcactgcaacctctgcctcctgggttcaagcaattctcctgcctcagcctcccaagtagctaggattacaggcatgcaccaacatgcctgtaatgttgctaatttttatagttttagtagagatggggtttcaccatgttggccagactggttttgaactcctgacctcaagtgatcggccagcctcagccttccaaagtgctgggattacaggcatgagccaccatgcctggcctcttccatgtaatttcttaaaatctatcttccagttaactaattctcccagctatgtctagtctgctgtttaaaccacccaccgagtttctgattacaataattattttatatatatatacacacacacacacatatacacacatacaatgattgtgtgtatatatatacacacatacacatatatacatatatagacacacacatatacatatacacacatacaatcattagagtttttatttggttccttctcttatttgcctgtgcaactttaacctattccttcattatactttcaatttgttattttatttatttaaatgtattaagcatgctttgtaaacattctcatctattaattctaaagtctgtggtcttggcaggtccgattctgcagtttgttgtttctgctgactctccagctagcttatttcctggtgtctttgtaaatcaacagagactgg

SEQ ID NO: 668881 - DNA, 678 bp, Homo sapiens
atagatatctatagatattatagatatctaatatatagatatctagatataggtatctaatatatagatrtctatagatataggtatctaatatatagatgtctatagatataataggtatctaatatatagatgtctatgatataggtatctaatatatagaatctatagatataggtatctaatatatagatatctatagatataggtatctaatatatagatgtctatagatataataggtatctaatacatagatgttctatgatattataggtatctaatatatagatgtctatagatatagatatctaatatatagatgtctatgatattgtagatatcctaatatattaagaatgctcttattaagactattttaatagaatattcctaatatatacatatctaatatagatatctatagatattagatatctgtccatctgtgcacacacatgcatgcatatacatgttcacatacatttatgctagctctgctttgtcatcactttttttacatatataactgtccatggagattgctttcaattacgctttatggtgagtgtttttctcaaagtaaccatagcagaaatactctatactaggaaaaaagtcagaaagaacatcatgagataggatacaattaggatttttgccaaattatttaacctg

SEQ ID NO: 668882 - DNA, 678 bp, Homo sapiens
atagatatctatagatattatagatatctaatatatagatatctagatataggtatctaatatatagatgtctatagatataggtatctaatatatagatgtctatagatataataggtatctaatatatagatgtctatgatataggtatctaatatatagawtctatagatataggtatctaatatatagatatctatagatataggtatctaatatatagatgtctatagatataataggtatctaatacatagatgttctatgatattataggtatctaatatatagatgtctatagatatagatatctaatatatagatgtctatgatattgtagatatcctaatatattaagaatgctcttattaagactattttaatagaatattcctaatatatacatatctaatatagatatctatagatattagatatctgtccatctgtgcacacacatgcatgcatatacatgttcacatacatttatgctagctctgctttgtcatcactttttttacatatataactgtccatggagattgctttcaattacgctttatggtgagtgtttttctcaaagtaaccatagcagaaatactctatactaggaaaaaagtcagaaagaacatcatgagataggatacaattaggatttttgccaaattatttaacctg

SEQ ID NO: 668883 - DNA, 678 bp, Homo sapiens
atagatatctatagatattatagatatctaatatatagatatctagatataggtatctaatatatagatgtctatagatataggtatctaatatatagatgtctatagatataataggtatctaatatatagatgtctatgatataggtatctaatatatagaatctatagatataggtatctaatatatagatatctatagatataggtatctaatatatagatgtctatagatataataggtatctaatayatagatgttctatgatattataggtatctaatatatagatgtctatagatatagatatctaatatatagatgtctatgatattgtagatatcctaatatattaagaatgctcttattaagactattttaatagaatattcctaatatatacatatctaatatagatatctatagatattagatatctgtccatctgtgcacacacatgcatgcatatacatgttcacatacatttatgctagctctgctttgtcatcactttttttacatatataactgtccatggagattgctttcaattacgctttatggtgagtgtttttctcaaagtaaccatagcagaaatactctatactaggaaaaaagtcagaaagaacatcatgagataggatacaattaggatttttgccaaattatttaacctg

SEQ ID NO: 668884 - DNA, 678 bp, Homo sapiens
atagatatctatagatattatagatatctaatatatagatatctagatataggtatctaatatatagatgtctatagatataggtatctaatatatagatgtctatagatataataggtatctaatatatagatgtctatgatataggtatctaatatatagaatctatagatataggtatctaatatatagatatctatagatataggtatctaatatatagatgtctatagatataataggtatctaatacatagatgttctatgatattataggtatctaatatatagatktctatagatatagatatctaatatatagatgtctatgatattgtagatatcctaatatattaagaatgctcttattaagactattttaatagaatattcctaatatatacatatctaatatagatatctatagatattagatatctgtccatctgtgcacacacatgcatgcatatacatgttcacatacatttatgctagctctgctttgtcatcactttttttacatatataactgtccatggagattgctttcaattacgctttatggtgagtgtttttctcaaagtaaccatagcagaaatactctatactaggaaaaaagtcagaaagaacatcatgagataggatacaattaggatttttgccaaattatttaacctg

SEQ ID NO: 668885 - DNA, 592 bp, Homo sapiens
gtcatgtagaaaacacagaaaagagcgtcttgttaggtctcctgaatagtgactgaggagagcctgagtgaaggaacctgagaggggagagaggcccacgggatcctgcaggtgatgtctggctctcccgagagcccacggtggacggtgctagctcactttgtcacatttttcactccgggaaaggggtggcaagcaggacccgttgtcacccggtgtcttgtccttgtttgttttgtggtttgggttttggttcaccaagagaattatgaaagggagagacaggaaaatatccttgatgtgcctgagcaaaattatagaaacaagagcaggggagggtgagggagttcagtagagctgaaagaggttgcagcagctggaaatcccygggctgcagggtagaaggaggtgggagggagacgctgcagaataccaggcccctcactggccctgcaggtcccctcgctccagcctcccaaccctgcaacctgggatgagtgtccacatctgacagccactgagaaggcgggcctggcaaggtggcccttgtatgtattaatacatggagtgggcacctctagaagtggctgtg

SEQ ID NO: 668886 - DNA, 594 bp, Homo sapiens
agttttattaaatcatgaaaaaggatttggtatagccatttttgaaagtggctataccacctttgagatcttcagcaagtaagaagacctgtaaagggttccaagatgtgctggtgcttacaggacatgtgtaggagatccaaggttatttctccagggcgttcaccatgtaggagttcaagatgctaaagacccaggaaccaggctcttttgagacctatactcaggcctaggctacaagagcatgtttgtgtttgagaggcattaaaagagtaacggaaagagcactgggctttgtgtagaatccctccactcaaccacttatgagatctataagcctgagcaagttaactgacttctgagcatcagtttattaatatttaaaatagacacaaggcctggtacagtggctcacgcctgtaatcctagcacttcgggaagccgaggcaggcggatcacgtgacgtcaggagtttgagaccagcctggccaacatggcagaaccccatctctactaaaaatacaaaaattagctgggcctgttggttcatgyctgtaatcacagctactcaggaggctgaggcatgagaattgc

SEQ ID NO: 668887 - DNA, 1366 bp, Homo sapiens
ttcttcatatatatcctagaacagggcttagcaaactatggcccacaggctagatcctgccttggcataaagtttcactagaacacactcgttcttttacatattgtctatggctgtgatttcatgatacaatggcagagttgagtagttgtgacagaaactgtatggcccgcaaagcctaaaatatttcctatatgtccctttgcacaagaaagtttgatgacccttgccctagaacagcctctgcatgtccatcagtaaacatgtacaagaatgttcgtaatagaactataaattcaaactttgaagcaactcacatttctatcaactgagaatggattttaaaaactgtaatatagtcaagcaatggaatactgtaccataaaaatgaatggattatagctacactacttaatctcaggaacataatgttgacaaaaaagcgagtcacagaatgatatatgaaatagttatataaaactcaaaaacatccataaacaacatagttttggagtaagtagctgaaactataaagaaaagcaagagaattataaacataaatctcaggataattgttatgtctgaaggaaaaggggatagaaatgggaatagatgtctaggagtcttcaaagttagtagttaatattttcttttggctgggcgtggtggctcacgcctgtaatctcaacactttgggaggccgaggcaggtggatcacctgaggtcaggagttcgataccagcctggccaacaaggtgaaaccccatctctactgaaaatacaaaaattagctgggcatggtggtgcgcacctgtagtcccagctactcgggaggctgaggcaggagaatcrcttgaacccaagaggcggaggttgcagtgagctgagatcctgccactgcactccagcctgggcaacagagtgagactccatctcaaaaaaataaatattttctttcttaaaaaaggtagttggtacacaggtttttgctgtattgagaattaaaaaaatacatatacttcataaatattattttgtatctactctatatttaatagaaactatctttgaaacatacgaatttaattaaaagacagggtgaaggttaaattcttttggtaggtcataataaagtagactcaatttcctccaatggactggagcctctaaggcaaatactcgaataacattgtaaaatatgatttctgttgactgaaaaactgggcttgaaaaaccaacggtttcattctacctgattcttcctccctcaccaagactctttcatttcttttttaaccatatctttctttcccattatctgataaggaaattataatgggcttaaaaacttagaaaccatcttgca

SEQ ID NO: 668888 - DNA, 598 bp, Homo sapiens
ttcaccattgagatgctgaaaacactaacaaaaataagatgyttatgttttatctttttaaggtttttaaacaaactaaaaagagagaaagagcttattttgatttcatggcatgatagaaagaacttcagacttaaagaagaaaaacaggattttagtccgggagctcatgtttttaagctttgtgtccttgagtaaatcatttattaaacttatctggaccttggatttttcatctttgataaaaagggagagtgtttttcagggtttccttatgctatgtcatccctaagtctaaatgatattcttattccatgtgttaaagtcctgtgcagaaccaggaagatggcttcacaaataatcaactggtttgtttatgccaaattatataaaaagcactggaacagtaaattcaaagactttcagtcctagggttttatggttctatctctaggaacagaaattctgattccttggtcatttgttctataagtgatataggataggcccaaaagggattctatgtacagaaatcagtagcatttttatataccaacaacattctagcagagaaccaaatcaagaacacaatcccatt

SEQ ID NO: 668889 - DNA, 1940 bp, Homo sapiens
tgagtttgtcttatcttcagctttcaccatgcctgcaccatacatttttccatacccaaaaggtgagtattttctaaatttgtcttgytctctgtcaaaatcttaatttctgtgttatcccagaaagctctccaagaccactcctgacctgttcaattcctccttggttttttgagactaaatctaataggttggtgtaaattaaaaggaatggcaaaaactgcaatacttttgcaccaatctaatgagcttgtaagaagtcttccctcaacctcaccaatttccatttctcaactttgttctcaatatttactcctaagtctgagccctagagccctaagtagagggtcttttcatcataacacttgtactctcttatcaatgtaacgtcacttgactgtgatcctgcaagactgtgtacagctttgggggcaggaattatgatattcatttcagagtttccagtgcctacaccagacccaagaagaatatgttttcacaaatctattgaatggtagaacaaatgactgattgatgaaaacacaaattacttgatggaagaagagataagaattttaaaatataaccagctcatgcaacagcttgactaagtaactgtaaaatattaatcattcagaataaattatatactttcaaagataaactagaagcttccacagccagacgtgccacttaggcctctacgaggcatttatccattttatagaagcatctacactacacatctcctcaggacagagaccacagcgcttgatgatgcccccgcaaactcaaaaagtggccttcagaagcgtttaaacaaatgcctcttgatgttaaaagtttgttctccaaataaaatagagacaaacagcagcaccaagaattccagggcagtgtgtttgacagaaatgtggcttctgagtacaactgatatgataaaactaacaaggaagatagcaattttatcaggcttttactcaatattgcttctttcctgtaactttgtactagcagcctgtcatcagtttatataattaagaatgggaaaggatttttgggctcaatgacacctactaaagaataatccacccttgaagaaaatatttggcaaacattttagtgttaagttcaagcaaaaacattctaatctaaaagtttaaataatttagggtagattttctttgatactttttcttttaattggtgtgaaaatgttctttcctcaaactttgttttgtttttttttttcagtcattggagcatgcccaaggaccatcattaaatactaaaaggtgagaggaagccatctggtcacctctgagggacttccagatcttgatggcactccatctgcatcagtaacaatttactcattacatcaagggcatggagaaattcaaaagtggacctgtataggagaaactcaggtctgagtagcgtgatgccaggcataccgtgctcagaccgcctgctctcagctgagcacacctggactgagttaaacatgttaaacatattgctacagcaagtaatacattcacctagtaatgcattcttttttttccctttgaaaagagattctctacaagatgacatcactcgctttgcaaaacagacatgaagaatgtgtttgcttctttcatgcatggagcatcctatatcaacatcacacagggttgtacaaggatttttcttggatgttgaaatggaaaagcattcatagcttccctgaattttacgagcactgtaaactcaatttccaaatcgctattctctatgttaaggcaattacacatcaagtgtggctaccagacttctgctgtgcatgtccacttcttccatatgtcacgcctctgctgtctgctcccgcacttcagctcagagtctccttgcattgctctgttgaaaggcacctgaagttcatgtctttacccaag

SEQ ID NO: 668890 - DNA, 1705 bp, Homo sapiens
taaagaatatggaaaacccattaatgcctactcacatcttactcaacataagaaggttcatagtttatgaaagcattaaaagtgcaattactgtcaaaaaatctttcagaaaatataagcctttaaagtgaagaagagtatttattctgaagacaaccattacaaatatacaggaggtttattacacacattttgtactagaggaaaatcctgaagcagttgctcaagctttgctcaacatcagagaacttatattggagaagrgtcctgcaaatgtaatgaatttggaaacactttaaaaaaaaaaaactacagcttagaaaacagcagagtttatactaaaatatatttttgcagatgcagtaaacatgaaaaaatatttaattcaaaattaattgtatgtaaatatcagaatttacagaataactaaggcactgacacttcagacattacattaaataagagtgttgagtatataaatgaattcacaactaaagttgttaaatttgtatataagtttgtataaattagtatataactttaaaaggagattttttgaagctttgtatttacattgaaagtatatttgtttccttgaaaacaatttttttgaaaagtgaatgatgtaatacagctttcaaattatgctgttactttattatattcacgtgaaagtatgtgatcaattgttgctgcatcagagatattagagattctttatgagttgggcattctttatgaccttttctataaaacagtaaggacattaaaatgtaagatgcatgacgaaaatataagtggagaggctcattgtagttaacctatattaagtaatgtttaaggtaggtgttcagagtaatacttttctacattatactgagagaaagaaattataaattaaagtatatcaattattttactaattttactgttacgtaataaaatgcaatatatttaaaaattgttagatgatgtgtgaacttaacttatattttatttacttacttaacttttcttttgagatggagtcttgctctgtcacccaggctggagggcagcagtgcagtctcagcacaatgactgcaacctccacctcccaagttcaagaaattctcctgcctcagcctcccgagtagtggggactacaggtgcgtgacaccacgcctggctaatttttatatttttaatagacatggggtttccccatattggtcaggctagtctcaaactcctgagctcaagcgatccacccacctcaggctctcaaagtgttgggattataggtgtgagccaatatgtccagcctaattttattttattttttaccatcttaaaactattgtgcatttaatgaagcattattatgccactaactttaacctatccggccttactcaaatggtgtaagcaaaagatggaagaagtatactatttggtatgtagtggaatgtcatcactagtaatcactttgccagtaaactgcaaatgaagaatattgttcccgttagttaaatttttaatcttttttcttaatttattattactatctgtgagtatatagtatgtgtatatatgtcttatagagaatattttgattcaggcatacaatatgtagtaattacattagggtaaataaggtatctgtcacctctagcatttatcctttctaatccaaacagtgtaattatacacttttagttacttt

SEQ ID NO: 668891 - DNA, 1705 bp, Homo sapiens
taaagaatatggaaaacccattaatgcctactcacatcttactcaacataagaaggttcatagtttatgaaagcattaaaagtgcaattactgtcaaaaaatctttcagaaaatataagcctttaaagtgaagaagagtatttattctgaagacaaccattacaaatatacaggaggtttattacacacattttgtactagaggaaaatcctgaagcagttgctcaagctttgctcaacatcagagaacttatattggagaagggtcctgcaaatgtaatgaatttggaaacactttaaaaaaaaaaaactrcagcttagaaaacagcagagtttatactaaaatatatttttgcagatgcagtaaacatgaaaaaatatttaattcaaaattaattgtatgtaaatatcagaatttacagaataactaaggcactgacacttcagacattacattaaataagagtgttgagtatataaatgaattcacaactaaagttgttaaatttgtatataagtttgtataaattagtatataactttaaaaggagattttttgaagctttgtatttacattgaaagtatatttgtttccttgaaaacaatttttttgaaaagtgaatgatgtaatacagctttcaaattatgctgttactttattatattcacgtgaaagtatgtgatcaattgttgctgcatcagagatattagagattctttatgagttgggcattctttatgaccttttctataaaacagtaaggacattaaaatgtaagatgcatgacgaaaatataagtggagaggctcattgtagttaacctatattaagtaatgtttaaggtaggtgttcagagtaatacttttctacattatactgagagaaagaaattataaattaaagtatatcaattattttactaattttactgttacgtaataaaatgcaatatatttaaaaattgttagatgatgtgtgaacttaacttatattttatttacttacttaacttttcttttgagatggagtcttgctctgtcacccaggctggagggcagcagtgcagtctcagcacaatgactgcaacctccacctcccaagttcaagaaattctcctgcctcagcctcccgagtagtggggactacaggtgcgtgacaccacgcctggctaatttttatatttttaatagacatggggtttccccatattggtcaggctagtctcaaactcctgagctcaagcgatccacccacctcaggctctcaaagtgttgggattataggtgtgagccaatatgtccagcctaattttattttattttttaccatcttaaaactattgtgcatttaatgaagcattattatgccactaactttaacctatccggccttactcaaatggtgtaagcaaaagatggaagaagtatactatttggtatgtagtggaatgtcatcactagtaatcactttgccagtaaactgcaaatgaagaatattgttcccgttagttaaatttttaatcttttttcttaatttattattactatctgtgagtatatagtatgtgtatatatgtcttatagagaatattttgattcaggcatacaatatgtagtaattacattagggtaaataaggtatctgtcacctctagcatttatcctttctaatccaaacagtgtaattatacacttttagttacttt

SEQ ID NO: 668892 - DNA, 1705 bp, Homo sapiens
taaagaatatggaaaacccattaatgcctactcacatcttactcaacataagaaggttcatagtttatgaaagcattaaaagtgcaattactgtcaaaaaatctttcagaaaatataagcctttaaagtgaagaagagtatttattctgaagacaaccattacaaatatacaggaggtttattacacacattttgtactagaggaaaatcctgaagcagttgctcaagctttgctcaacatcagagaacttatattggagaagggtcctgcaaatgtaatgaatttggaaacactttaaaaaaaaaaaactacagcttagaaaacagcagagtttatactaaaatatatttttgcagatgcagtaaacatgaaaaaatattkaattcaaaattaattgtatgtaaatatcagaatttacagaataactaaggcactgacacttcagacattacattaaataagagtgttgagtatataaatgaattcacaactaaagttgttaaatttgtatataagtttgtataaattagtatataactttaaaaggagattttttgaagctttgtatttacattgaaagtatatttgtttccttgaaaacaatttttttgaaaagtgaatgatgtaatacagctttcaaattatgctgttactttattatattcacgtgaaagtatgtgatcaattgttgctgcatcagagatattagagattctttatgagttgggcattctttatgaccttttctataaaacagtaaggacattaaaatgtaagatgcatgacgaaaatataagtggagaggctcattgtagttaacctatattaagtaatgtttaaggtaggtgttcagagtaatacttttctacattatactgagagaaagaaattataaattaaagtatatcaattattttactaattttactgttacgtaataaaatgcaatatatttaaaaattgttagatgatgtgtgaacttaacttatattttatttacttacttaacttttcttttgagatggagtcttgctctgtcacccaggctggagggcagcagtgcagtctcagcacaatgactgcaacctccacctcccaagttcaagaaattctcctgcctcagcctcccgagtagtggggactacaggtgcgtgacaccacgcctggctaatttttatatttttaatagacatggggtttccccatattggtcaggctagtctcaaactcctgagctcaagcgatccacccacctcaggctctcaaagtgttgggattataggtgtgagccaatatgtccagcctaattttattttattttttaccatcttaaaactattgtgcatttaatgaagcattattatgccactaactttaacctatccggccttactcaaatggtgtaagcaaaagatggaagaagtatactatttggtatgtagtggaatgtcatcactagtaatcactttgccagtaaactgcaaatgaagaatattgttcccgttagttaaatttttaatcttttttcttaatttattattactatctgtgagtatatagtatgtgtatatatgtcttatagagaatattttgattcaggcatacaatatgtagtaattacattagggtaaataaggtatctgtcacctctagcatttatcctttctaatccaaacagtgtaattatacacttttagttacttt

SEQ ID NO: 668893 - DNA, 1705 bp, Homo sapiens
taaagaatatggaaaacccattaatgcctactcacatcttactcaacataagaaggttcatagtttatgaaagcattaaaagtgcaattactgtcaaaaaatctttcagaaaatataagcctttaaagtgaagaagagtatttattctgaagacaaccattacaaatatacaggaggtttattacacacattttgtactagaggaaaatcctgaagcagttgctcaagctttgctcaacatcagagaacttatattggagaagggtcctgcaaatgtaatgaatttggaaacactttaaaaaaaaaaaactacagcttagaaaacagcagagtttatactaaaatatatttttgcagatgcagtaaacatgaaaaaatatttaattcaaaattaattgtatgtaaatatcagaatttacagaataactaaggcactgacacttcagacattacattaaataagagtgttgagtatataaatgaattcacaactaaagttgttaaatttgtatataagtttgtataaattagtatataactttaaaaggagattttttgaagctttgtawttacattgaaagtatatttgtttccttgaaaacaatttttttgaaaagtgaatgatgtaatacagctttcaaattatgctgttactttattatattcacgtgaaagtatgtgatcaattgttgctgcatcagagatattagagattctttatgagttgggcattctttatgaccttttctataaaacagtaaggacattaaaatgtaagatgcatgacgaaaatataagtggagaggctcattgtagttaacctatattaagtaatgtttaaggtaggtgttcagagtaatacttttctacattatactgagagaaagaaattataaattaaagtatatcaattattttactaattttactgttacgtaataaaatgcaatatatttaaaaattgttagatgatgtgtgaacttaacttatattttatttacttacttaacttttcttttgagatggagtcttgctctgtcacccaggctggagggcagcagtgcagtctcagcacaatgactgcaacctccacctcccaagttcaagaaattctcctgcctcagcctcccgagtagtggggactacaggtgcgtgacaccacgcctggctaatttttatatttttaatagacatggggtttccccatattggtcaggctagtctcaaactcctgagctcaagcgatccacccacctcaggctctcaaagtgttgggattataggtgtgagccaatatgtccagcctaattttattttattttttaccatcttaaaactattgtgcatttaatgaagcattattatgccactaactttaacctatccggccttactcaaatggtgtaagcaaaagatggaagaagtatactatttggtatgtagtggaatgtcatcactagtaatcactttgccagtaaactgcaaatgaagaatattgttcccgttagttaaatttttaatcttttttcttaatttattattactatctgtgagtatatagtatgtgtatatatgtcttatagagaatattttgattcaggcatacaatatgtagtaattacattagggtaaataaggtatctgtcacctctagcatttatcctttctaatccaaacagtgtaattatacacttttagttacttt

SEQ ID NO: 668894 - DNA, 1353 bp, Homo sapiens
aaaaaaaaaaagaaaaaatacggccatgtgcagtgcctcatgcctattatcccagcaatttcggaggctgaggcaggtgtgttgcttgagctcaggagttcaagaccagcctcgccaatgtggtgaaaccctgtctctactaaaaatagaaaaattagccagtcatggtggygcacacctggaggctgaggtaggagaatcacttgaacttgggaggtggagattgcagtgagccaagattgtgctgctgcactccagcctgggtgacagagtgatgagactcctcaaaggaaaaaaaattacatttctgagtcctgaaaaattattaataaatatttgttatatagtttctttgaacatgtggtcactctgcctgcaaacgtaaagacttttaattttcatagagtgaaatatacacatattcctctgaagataaaccttaggtgtaagaaaattatgaaatgagtgtttggtaaatatgcatttgtacatattttcagaagaaaacgcaattattggaacaaaataagtttttaggtgattaatggaaaactaaacaccttgaatatgctgaaagcaaatgtatactttctgctttgtatggaatttattaatataaaattttatggcttatggctcggattctccccagaatccgtgtattaaagcacaggcaactttgtctccagaaataacactcttgagtacaacaataaaagccctcttcaaacacactcaaaaaattatttttaacgcttattttaataaaaatttaaccaaaattgaataattggatacatttttattgttctatgtgtgtgtgaatgtataaaatgacacataaaggaataataatttaagccagaaaaaaagatgttagttaatatttgtaatgaataaaactggaaagtagttattatttgcagatgacatttttgtttatgtagataacaaaagcagtagaaagactattttaaaagtttattcaggtgggtaggcaacattttaagataataccctggattcccagtctgttgcgcacctgctgtgtaatactctcgagtgtaaaaaagtgtgtgactgtggtgggacatcactcatgaaattacgttactcatctgttgacttcgtgtttaccaaaatggagattatcctgattgtgctaaacttaatcagaagtgcttttaagagaaagagacacatcatagaaaacacccctgctggcctgaaagtaagtgacttctaggtgagccatgttgtaagctgcttatggtggccacatggcaggaaacgtatttgtttattgtcatcattcctgccttctgcatgttgcttccagtagggagaataaga

SEQ ID NO: 668895 - DNA, 1353 bp, Homo sapiens
aaaaaaaaaaagaaaaaatacggccatgtgcagtgcctcatgcctattatcccagcaatttcggaggctgaggcaggtgtgttgcttgagctcaggagttcaagaccagcctcgccaatgtggtgaaaccctgtctctactaaaaatagaaaaattagccagtcatggtggcgcacacctggaggctgaggtaggagaatcacttgaacttgggaggtggagattgcagtgagccaagattgygctgctgcactccagcctgggtgacagagtgatgagactcctcaaaggaaaaaaaattacatttctgagtcctgaaaaattattaataaatatttgttatatagtttctttgaacatgtggtcactctgcctgcaaacgtaaagacttttaattttcatagagtgaaatatacacatattcctctgaagataaaccttaggtgtaagaaaattatgaaatgagtgtttggtaaatatgcatttgtacatattttcagaagaaaacgcaattattggaacaaaataagtttttaggtgattaatggaaaactaaacaccttgaatatgctgaaagcaaatgtatactttctgctttgtatggaatttattaatataaaattttatggcttatggctcggattctccccagaatccgtgtattaaagcacaggcaactttgtctccagaaataacactcttgagtacaacaataaaagccctcttcaaacacactcaaaaaattatttttaacgcttattttaataaaaatttaaccaaaattgaataattggatacatttttattgttctatgtgtgtgtgaatgtataaaatgacacataaaggaataataatttaagccagaaaaaaagatgttagttaatatttgtaatgaataaaactggaaagtagttattatttgcagatgacatttttgtttatgtagataacaaaagcagtagaaagactattttaaaagtttattcaggtgggtaggcaacattttaagataataccctggattcccagtctgttgcgcacctgctgtgtaatactctcgagtgtaaaaaagtgtgtgactgtggtgggacatcactcatgaaattacgttactcatctgttgacttcgtgtttaccaaaatggagattatcctgattgtgctaaacttaatcagaagtgcttttaagagaaagagacacatcatagaaaacacccctgctggcctgaaagtaagtgacttctaggtgagccatgttgtaagctgcttatggtggccacatggcaggaaacgtatttgtttattgtcatcattcctgccttctgcatgttgcttccagtagggagaataaga

SEQ ID NO: 668896 - DNA, 1353 bp, Homo sapiens
aaaaaaaaaaagaaaaaatacggccatgtgcagtgcctcatgcctattatcccagcaatttcggaggctgaggcaggtgtgttgcttgagctcaggagttcaagaccagcctcgccaatgtggtgaaaccctgtctctactaaaaatagaaaaattagccagtcatggtggcgcacacctggaggctgaggtaggagaatcacttgaacttgggaggtggagattgcagtgagccaagattgtgctgctgcactccagcctgggtgacagagtgatgagactcctcaaargaaaaaaaattacatttctgagtcctgaaaaattattaataaatatttgttatatagtttctttgaacatgtggtcactctgcctgcaaacgtaaagacttttaattttcatagagtgaaatatacacatattcctctgaagataaaccttaggtgtaagaaaattatgaaatgagtgtttggtaaatatgcatttgtacatattttcagaagaaaacgcaattattggaacaaaataagtttttaggtgattaatggaaaactaaacaccttgaatatgctgaaagcaaatgtatactttctgctttgtatggaatttattaatataaaattttatggcttatggctcggattctccccagaatccgtgtattaaagcacaggcaactttgtctccagaaataacactcttgagtacaacaataaaagccctcttcaaacacactcaaaaaattatttttaacgcttattttaataaaaatttaaccaaaattgaataattggatacatttttattgttctatgtgtgtgtgaatgtataaaatgacacataaaggaataataatttaagccagaaaaaaagatgttagttaatatttgtaatgaataaaactggaaagtagttattatttgcagatgacatttttgtttatgtagataacaaaagcagtagaaagactattttaaaagtttattcaggtgggtaggcaacattttaagataataccctggattcccagtctgttgcgcacctgctgtgtaatactctcgagtgtaaaaaagtgtgtgactgtggtgggacatcactcatgaaattacgttactcatctgttgacttcgtgtttaccaaaatggagattatcctgattgtgctaaacttaatcagaagtgcttttaagagaaagagacacatcatagaaaacacccctgctggcctgaaagtaagtgacttctaggtgagccatgttgtaagctgcttatggtggccacatggcaggaaacgtatttgtttattgtcatcattcctgccttctgcatgttgcttccagtagggagaataaga

SEQ ID NO: 668897 - DNA, 1353 bp, Homo sapiens
aaaaaaaaaaagaaaaaatacggccatgtgcagtgcctcatgcctattatcccagcaatttcggaggctgaggcaggtgtgttgcttgagctcaggagttcaagaccagcctcgccaatgtggtgaaaccctgtctctactaaaaatagaaaaattagccagtcatggtggcgcacacctggaggctgaggtaggagaatcacttgaacttgggaggtggagattgcagtgagccaagattgtgctgctgcactccagcctgggtgacagagtgatgagactcctcaaaggaaaaaaaattacrtttctgagtcctgaaaaattattaataaatatttgttatatagtttctttgaacatgtggtcactctgcctgcaaacgtaaagacttttaattttcatagagtgaaatatacacatattcctctgaagataaaccttaggtgtaagaaaattatgaaatgagtgtttggtaaatatgcatttgtacatattttcagaagaaaacgcaattattggaacaaaataagtttttaggtgattaatggaaaactaaacaccttgaatatgctgaaagcaaatgtatactttctgctttgtatggaatttattaatataaaattttatggcttatggctcggattctccccagaatccgtgtattaaagcacaggcaactttgtctccagaaataacactcttgagtacaacaataaaagccctcttcaaacacactcaaaaaattatttttaacgcttattttaataaaaatttaaccaaaattgaataattggatacatttttattgttctatgtgtgtgtgaatgtataaaatgacacataaaggaataataatttaagccagaaaaaaagatgttagttaatatttgtaatgaataaaactggaaagtagttattatttgcagatgacatttttgtttatgtagataacaaaagcagtagaaagactattttaaaagtttattcaggtgggtaggcaacattttaagataataccctggattcccagtctgttgcgcacctgctgtgtaatactctcgagtgtaaaaaagtgtgtgactgtggtgggacatcactcatgaaattacgttactcatctgttgacttcgtgtttaccaaaatggagattatcctgattgtgctaaacttaatcagaagtgcttttaagagaaagagacacatcatagaaaacacccctgctggcctgaaagtaagtgacttctaggtgagccatgttgtaagctgcttatggtggccacatggcaggaaacgtatttgtttattgtcatcattcctgccttctgcatgttgcttccagtagggagaataaga

SEQ ID NO: 668898 - DNA, 1353 bp, Homo sapiens
aaaaaaaaaaagaaaaaatacggccatgtgcagtgcctcatgcctattatcccagcaatttcggaggctgaggcaggtgtgttgcttgagctcaggagttcaagaccagcctcgccaatgtggtgaaaccctgtctctactaaaaatagaaaaattagccagtcatggtggcgcacacctggaggctgaggtaggagaatcacttgaacttgggaggtggagattgcagtgagccaagattgtgctgctgcactccagcctgggtgacagagtgatgagactcctcaaaggaaaaaaaattacatttctgagtcctgaaaaattattaataaatatttgttatatagtttctttgaacatgtggtcactctgcctgcaaacgtaaagacttttaattttcatagagtgaaatatacacatattcctctgaagataaaccttaggtgtaagaaaattatgaartgagtgtttggtaaatatgcatttgtacatattttcagaagaaaacgcaattattggaacaaaataagtttttaggtgattaatggaaaactaaacaccttgaatatgctgaaagcaaatgtatactttctgctttgtatggaatttattaatataaaattttatggcttatggctcggattctccccagaatccgtgtattaaagcacaggcaactttgtctccagaaataacactcttgagtacaacaataaaagccctcttcaaacacactcaaaaaattatttttaacgcttattttaataaaaatttaaccaaaattgaataattggatacatttttattgttctatgtgtgtgtgaatgtataaaatgacacataaaggaataataatttaagccagaaaaaaagatgttagttaatatttgtaatgaataaaactggaaagtagttattatttgcagatgacatttttgtttatgtagataacaaaagcagtagaaagactattttaaaagtttattcaggtgggtaggcaacattttaagataataccctggattcccagtctgttgcgcacctgctgtgtaatactctcgagtgtaaaaaagtgtgtgactgtggtgggacatcactcatgaaattacgttactcatctgttgacttcgtgtttaccaaaatggagattatcctgattgtgctaaacttaatcagaagtgcttttaagagaaagagacacatcatagaaaacacccctgctggcctgaaagtaagtgacttctaggtgagccatgttgtaagctgcttatggtggccacatggcaggaaacgtatttgtttattgtcatcattcctgccttctgcatgttgcttccagtagggagaataaga

SEQ ID NO: 668899 - DNA, 1353 bp, Homo sapiens
aaaaaaaaaaagaaaaaatacggccatgtgcagtgcctcatgcctattatcccagcaatttcggaggctgaggcaggtgtgttgcttgagctcaggagttcaagaccagcctcgccaatgtggtgaaaccctgtctctactaaaaatagaaaaattagccagtcatggtggcgcacacctggaggctgaggtaggagaatcacttgaacttgggaggtggagattgcagtgagccaagattgtgctgctgcactccagcctgggtgacagagtgatgagactcctcaaaggaaaaaaaattacatttctgagtcctgaaaaattattaataaatatttgttatatagtttctttgaacatgtggtcactctgcctgcaaacgtaaagacttttaattttcatagagtgaaatatacacatattcctctgaagataaaccttaggtgtaagaaaattatgaaatgagtgtttggtaaatatgcatttgtacatattttcagaagaaaacrcaattattggaacaaaataagtttttaggtgattaatggaaaactaaacaccttgaatatgctgaaagcaaatgtatactttctgctttgtatggaatttattaatataaaattttatggcttatggctcggattctccccagaatccgtgtattaaagcacaggcaactttgtctccagaaataacactcttgagtacaacaataaaagccctcttcaaacacactcaaaaaattatttttaacgcttattttaataaaaatttaaccaaaattgaataattggatacatttttattgttctatgtgtgtgtgaatgtataaaatgacacataaaggaataataatttaagccagaaaaaaagatgttagttaatatttgtaatgaataaaactggaaagtagttattatttgcagatgacatttttgtttatgtagataacaaaagcagtagaaagactattttaaaagtttattcaggtgggtaggcaacattttaagataataccctggattcccagtctgttgcgcacctgctgtgtaatactctcgagtgtaaaaaagtgtgtgactgtggtgggacatcactcatgaaattacgttactcatctgttgacttcgtgtttaccaaaatggagattatcctgattgtgctaaacttaatcagaagtgcttttaagagaaagagacacatcatagaaaacacccctgctggcctgaaagtaagtgacttctaggtgagccatgttgtaagctgcttatggtggccacatggcaggaaacgtatttgtttattgtcatcattcctgccttctgcatgttgcttccagtagggagaataaga

SEQ ID NO: 668900 - DNA, 769 bp, Homo sapiens
catttycaagaatcttttaagcaacaccccactctactagtaccaatttgctgtattaatctgttctcacactgctgataaagacatacctgagactgggcaatttccaaaagaaagaaagttaattggacttacagttccacatggctgggaagcctcactatcatggcagaaggcaaggaggagcaagtcacatcttacatgaatggcggcaggcgaagagaggaaacttgtgcaggggaattcatctttataaaaccatcagatctcatgagacttattcagtgtcatgagaacagcatgggaaagacttgcccccatgattcaagtaccccccactgggtccctcccacaacatgtgagaattcaagatgagatttggatagggacacattaaaaccatatcagcatgacatctaggattttcttcaaacatctagtccaagatgaaaaaagtggagaagaatatgaaacaaatttggagaatatgttgattattcttgaagctgggagctaaatacattaaactgtttactgttttatttttgtgtacatttttaaatgttcataataataatattttaatatatgcatgcagttgaaccattgtaatgactgaataaactaaaatcgttccttatcttataaaatctaaatatcttcctcagttacaacttcatggtcttaaccattctctattttttcctttttttaatgaatgatttacttttttactacattcttaagaaaatcagtgtcaatagtatat

SEQ ID NO: 668901 - DNA, 769 bp, Homo sapiens
cattttcaagaatcttttaagcaacaccccactctactagtaccaatttgctgtattaatctgttctcacactgctgataaagacatacctgagactgggcaatttccaaaagaaagaaagttaattggacttacagttccacatggctgggaagcctcactatcatggcagaaggcaaggaggagcaagtcacatcttacatkaatggcggcaggcgaagagaggaaacttgtgcaggggaattcatctttataaaaccatcagatctcatgagacttattcagtgtcatgagaacagcatgggaaagacttgcccccatgattcaagtaccccccactgggtccctcccacaacatgtgagaattcaagatgagatttggatagggacacattaaaaccatatcagcatgacatctaggattttcttcaaacatctagtccaagatgaaaaaagtggagaagaatatgaaacaaatttggagaatatgttgattattcttgaagctgggagctaaatacattaaactgtttactgttttatttttgtgtacatttttaaatgttcataataataatattttaatatatgcatgcagttgaaccattgtaatgactgaataaactaaaatcgttccttatcttataaaatctaaatatcttcctcagttacaacttcatggtcttaaccattctctattttttcctttttttaatgaatgatttacttttttactacattcttaagaaaatcagtgtcaatagtatat

SEQ ID NO: 668902 - DNA, 769 bp, Homo sapiens
cattttcaagaatcttttaagcaacaccccactctactagtaccaatttgctgtattaatctgttctcacactgctgataaagacatacctgagactgggcaatttccaaaagaaagaaagttaattggacttacagttccacatggctgggaagcctcactatcatggcagaaggcaaggaggagcaagtcacatcttacatgaatggcggcaggcgaagagaggaaacttgtgcaggggaaytcatctttataaaaccatcagatctcatgagacttattcagtgtcatgagaacagcatgggaaagacttgcccccatgattcaagtaccccccactgggtccctcccacaacatgtgagaattcaagatgagatttggatagggacacattaaaaccatatcagcatgacatctaggattttcttcaaacatctagtccaagatgaaaaaagtggagaagaatatgaaacaaatttggagaatatgttgattattcttgaagctgggagctaaatacattaaactgtttactgttttatttttgtgtacatttttaaatgttcataataataatattttaatatatgcatgcagttgaaccattgtaatgactgaataaactaaaatcgttccttatcttataaaatctaaatatcttcctcagttacaacttcatggtcttaaccattctctattttttcctttttttaatgaatgatttacttttttactacattcttaagaaaatcagtgtcaatagtatat

SEQ ID NO: 668903 - DNA, 769 bp, Homo sapiens
cattttcaagaatcttttaagcaacaccccactctactagtaccaatttgctgtattaatctgttctcacactgctgataaagacatacctgagactgggcaatttccaaaagaaagaaagttaattggacttacagttccacatggctgggaagcctcactatcatggcagaaggcaaggaggagcaagtcacatcttacatgaatggcggcaggcgaagagaggaaacttgtgcaggggaattcatctttataaaaccatcagatctcatgagacttattcagtgtcatgagaacagcatgggaaagacttgcccccatgattcaagtaccccccactgggtccctcccacaacatgtgrgaattcaagatgagatttggatagggacacattaaaaccatatcagcatgacatctaggattttcttcaaacatctagtccaagatgaaaaaagtggagaagaatatgaaacaaatttggagaatatgttgattattcttgaagctgggagctaaatacattaaactgtttactgttttatttttgtgtacatttttaaatgttcataataataatattttaatatatgcatgcagttgaaccattgtaatgactgaataaactaaaatcgttccttatcttataaaatctaaatatcttcctcagttacaacttcatggtcttaaccattctctattttttcctttttttaatgaatgatttacttttttactacattcttaagaaaatcagtgtcaatagtatat

SEQ ID NO: 668904 - DNA, 769 bp, Homo sapiens
cattttcaagaatcttttaagcaacaccccactctactagtaccaatttgctgtattaatctgttctcacactgctgataaagacatacctgagactgggcaatttccaaaagaaagaaagttaattggacttacagttccacatggctgggaagcctcactatcatggcagaaggcaaggaggagcaagtcacatcttacatgaatggcggcaggcgaagagaggaaacttgtgcaggggaattcatctttataaaaccatcagatctcatgagacttattcagtgtcatgagaacagcatgggaaagacttgcccccatgattcaagtaccccccactgggtccctcccacaacatgtgagaattcaagatgagatttggatagggacacattaaaaccatatcagcatgacatctaggattttcttyaaacatctagtccaagatgaaaaaagtggagaagaatatgaaacaaatttggagaatatgttgattattcttgaagctgggagctaaatacattaaactgtttactgttttatttttgtgtacatttttaaatgttcataataataatattttaatatatgcatgcagttgaaccattgtaatgactgaataaactaaaatcgttccttatcttataaaatctaaatatcttcctcagttacaacttcatggtcttaaccattctctattttttcctttttttaatgaatgatttacttttttactacattcttaagaaaatcagtgtcaatagtatat

SEQ ID NO: 668905 - DNA, 1182 bp, Homo sapiens
ttggattactagaaacaatwtttttttttttacttgacaaactgcatcaactaaaacttaacatcgcttcagaaataaaatgatagaactaatctcattaagttaaagagtacaataaactgacctagaatcactatttctctctgcatcatctaggagatcctaggcacccaaaattaaaagaaattagcaagatctgattatccagtgatgtattggagtctgttgaaatgggttaacattaataaatgaaaagaatatgtttatctgaagtaccgtcttatttctggtcagaaaatgagcaaatcacgtaggtgcttacacttgctaaactggacaccacagaccaaagctgggacataaatctagtagaacaaaatgtcaatattcattattggttatagcttaatatagaagtacagacacccgctgattttactctctgcaccagcacatcctcaacaaagaattcagggcacactgtcacaatggaggctatagccattgaagttgtgagcaatacctatgactcagcggagagttgaagatttgaggagctttcttttgggagaaccagagctatatgaaatgaaaggagaaataaaaatgtcactgcagaaggaagaattagaatctttattctaggattggcagactgtaccagtaattcgtgaatattgtttgggagatgcgtgtgcttccagtctgagccagctgggaaatcttctgggtttttctaaagaatactgtcccattatcctcagagtgaatcatgaggactctgagttcttagagaggaaaggagattaaacagcatcaggatgacataaattttgtttgagaatatagaaatattattaattccaaagttattaacactgtccaatacattaagaataaaacttgttaaagatgataaattattgataaatattcgtatgagaaataagtcagacaactagagatgatatatgtaggtggttatgtttgttggtcaaaattgtgaacacttgttaggatggataactttatttggtgttctcaggacatccctatggggattagaaagtctgcattttgaagaggtggtaaaattaaaaaaattcttctttcatgatagatttctcacccgcagggtatcagcgaatgtgctttagattggaaagatgatacacacatgca

SEQ ID NO: 668906 - DNA, 1182 bp, Homo sapiens
ttggattactagaaacaatatttttttttttacttgacaaactgcatcaactaaaacttaacatygcttcagaaataaaatgatagaactaatctcattaagttaaagagtacaataaactgacctagaatcactatttctctctgcatcatctaggagatcctaggcacccaaaattaaaagaaattagcaagatctgattatccagtgatgtattggagtctgttgaaatgggttaacattaataaatgaaaagaatatgtttatctgaagtaccgtcttatttctggtcagaaaatgagcaaatcacgtaggtgcttacacttgctaaactggacaccacagaccaaagctgggacataaatctagtagaacaaaatgtcaatattcattattggttatagcttaatatagaagtacagacacccgctgattttactctctgcaccagcacatcctcaacaaagaattcagggcacactgtcacaatggaggctatagccattgaagttgtgagcaatacctatgactcagcggagagttgaagatttgaggagctttcttttgggagaaccagagctatatgaaatgaaaggagaaataaaaatgtcactgcagaaggaagaattagaatctttattctaggattggcagactgtaccagtaattcgtgaatattgtttgggagatgcgtgtgcttccagtctgagccagctgggaaatcttctgggtttttctaaagaatactgtcccattatcctcagagtgaatcatgaggactctgagttcttagagaggaaaggagattaaacagcatcaggatgacataaattttgtttgagaatatagaaatattattaattccaaagttattaacactgtccaatacattaagaataaaacttgttaaagatgataaattattgataaatattcgtatgagaaataagtcagacaactagagatgatatatgtaggtggttatgtttgttggtcaaaattgtgaacacttgttaggatggataactttatttggtgttctcaggacatccctatggggattagaaagtctgcattttgaagaggtggtaaaattaaaaaaattcttctttcatgatagatttctcacccgcagggtatcagcgaatgtgctttagattggaaagatgatacacacatgca

SEQ ID NO: 668907 - DNA, 1182 bp, Homo sapiens
ttggattactagaaacaatatttttttttttacttgacaaactgcatcaactaaaacttaacatcgcttcagaaataaaatgatagaactaatctcattaagttaaagagtacaataaactgacctagaatcactatttctctctgcatcatctaggagatcctaggcacccaaaattaaaagaaattagcaagatctgattatccagtgatgtattrgagtctgttgaaatgggttaacattaataaatgaaaagaatatgtttatctgaagtaccgtcttatttctggtcagaaaatgagcaaatcacgtaggtgcttacacttgctaaactggacaccacagaccaaagctgggacataaatctagtagaacaaaatgtcaatattcattattggttatagcttaatatagaagtacagacacccgctgattttactctctgcaccagcacatcctcaacaaagaattcagggcacactgtcacaatggaggctatagccattgaagttgtgagcaatacctatgactcagcggagagttgaagatttgaggagctttcttttgggagaaccagagctatatgaaatgaaaggagaaataaaaatgtcactgcagaaggaagaattagaatctttattctaggattggcagactgtaccagtaattcgtgaatattgtttgggagatgcgtgtgcttccagtctgagccagctgggaaatcttctgggtttttctaaagaatactgtcccattatcctcagagtgaatcatgaggactctgagttcttagagaggaaaggagattaaacagcatcaggatgacataaattttgtttgagaatatagaaatattattaattccaaagttattaacactgtccaatacattaagaataaaacttgttaaagatgataaattattgataaatattcgtatgagaaataagtcagacaactagagatgatatatgtaggtggttatgtttgttggtcaaaattgtgaacacttgttaggatggataactttatttggtgttctcaggacatccctatggggattagaaagtctgcattttgaagaggtggtaaaattaaaaaaattcttctttcatgatagatttctcacccgcagggtatcagcgaatgtgctttagattggaaagatgatacacacatgca

SEQ ID NO: 668908 - DNA, 1137 bp, Homo sapiens
tgaagggaaaacaaacacaggagtttggatggggaaattgggtcaaaagcttggagcagctagtgggaggcgggagtggagtgggagggcctggcagtatggcaccagaggaaggtgcccacagagagttggccctggaagttgggcagagggcacccaaggcaagcagtggcttcttcacctcscacctgagccagcaacctaaattctgagtctggttgtggtactaactaaccactcacctggggccagccacttcttcaggcctcagtttcctcatctgtgaagctcaggtctgagggagacaagctgtctctctcagagcctttctacctaagaggtgtgtggtcctagaacctgcactgagaagctgtggtgtgggtgggggactcccactgacacagcaggcctctgctctcaagctctgtctgcgaaatactggatgaacagtgtagaataggagaaaaacagtattcaaaactatatgggctctctaagttatccatgataaatgcatagagagagagagagagagagagagagagactgacagtgtatctactcttaaatagtaacatttttcactgggcagggtcctcttattcattagtcacaataagcacagttcctggggcctatagacttttcagggactctcaaacatatttgagatatagaaaacaaaatatattggcttcaaaaaattttaaatgacagaactaaaattcataaacatttaatcaaaggtctgcaaaatatatgttaactagacagtttccttcttttcttttcttttttttttttgagatggagtttcgctctgtcacccaggctggagggcagtggcatgatctcggctcactgcaacctctgcctcccaggtttaagcaattctcctgcctcagcctcttgagtagctgggattacagctgcctgtcaccacgtctggctaatttttttgtatttttagtagagatggggtttctccatgttggccaggctggttttgaactcctggcctcaagtgatccacccacctcagcctcccaaagtgcaaggattacaggcatgagccactgtgcctggccaactagacagtttcaactcagcacagtaacttcagatgtgagatgtggg

SEQ ID NO: 668909 - DNA, 629 bp, Homo sapiens
ttggcaagaatttttttttttatttttttgagacggtgtcttgctctgtcacccaggctggagtgcagtggtgcaatcttggctcactgcaacctctgtctcctgggttcaagcaattctcttgcctcagcctcttgagtagctgggactacaggtgtgtgccaccacgcccggctaattttttgtattyttagtagaaatgggatttcaccgtgttagccaggatggtctcaatctcctgacttcgtgatccacctgccttggcctcccaaagtgctgggattacgggtgtgggccactgtgcctggccagcaagatcttgatatgatgaagagagagaaggaaaactcagttatcattttaaaatgtaatgcttgaaggattgagagaatggtgttgccagccacagggaaaaagtcaagtggtggagtttttttctttttttcaggtttaggagaaaatgaatggttttggggaatgttgacttaaaggtacaaaggagatcattggcagggcctggaaatgcatgattggactttggagagaggtcaaggattgatataaaaaacagaggcacatacataagaagccagcaaaacaaaacaaaaaccaaccaacaaacaaaacag

SEQ ID NO: 668910 - DNA, 3429 bp, Homo sapiens
tttacttctaattcgtgaatgtcagaggtggtagaaagagatttctatggagaagagaatgagaaaaatggtgagagcatttcaatatgaaacatcctgtttgatagtgtgtatgtctgtcgcgtgtatcactgaatagaaaagtaaagatgaaatgaaactattttagtgaattgcacttgacctgcagtatcatttaatgataatcatgaaatctaagtttctcttttaccagttttgagagttatgataggaattttatctttattaattctttgatcaattatgtaacttttataattatagtctgagataataccagcctatttgcaggcaagatgagatgaaataccttgacatcagttggagaagcattgcataattccattagaagcatttagattaccatagcaccatctgaatatctctttgttaagaagtcctttttcacaaattaatgtactttatcatacatttattcgcgggtgaagagttagctgatgaaaactatgccacagtaacttgctgttatttctttatctgtaagcaaacatcaacacctctttcttcaatgcatgcaggagagatacttaaacctaaacctaaaattaggattttaaatttccacctctgaggaaatgtttatgtacagcacagttttgttttttgtttgtttgtttgtttttttaatgaacacttctcgtcaaccagagtagagggaagattcggattttagcaagaaaagtactgaaacaaaagttctatctgccaatgagaagacagtctgaagtgaatagtattaatcagaaggtgcatatacaaggaagttttcaattaagagaaactaagtagctttagtgaatatagagcgatattcttttcaaatctgggctcccaatctagtgcccttaaatgtttattgcatttttaattgcttgaaaaacagtaggatattagtgaaattcctcggaaggcaaatagtcaaaagacttcatttaagtcctgtagttagtgattctcattgcggtaccacacaacagtttaatagaatgcttttaaaaggcagtctctatttgtaattatgtggcatgttgcaatgctattagcagttgtgtttaccacggctttaggatgcttgagacaaaggctatggtctgtttcctttataatggcaagaaataattataattacatactcatgcctggaaatagtgttcataaccccatgaattaataactctttaactccatgtcaccctaccttgacaatttatatcatacagaaaatgagcaatatgtgaattatttgaaaaaaaaattcgcttgtagtatctaaagtattgtcaaagactcttttttgagcaatatgttttttaaattgaccaaaacctcctttgattccccctcaaagctagaatactatttcaatgttctgcttatatatatatcaaatcgcttttgagtcaatgtgcttaaatgtcttaaatgtcaacaattagagcagctaacatctgggaacactacttccactataaaaatcaatatgatgcttaggcaaaaatactgtacaaaatgcactcctttgtagattaatattataaatgccaaactggccaagagagataaatttgtgaaaaaaatattacttgggaaaatagagtgtgaataggttatatgtgacaaattttattgttttaataatttttcttatagagtgtcccattgcccttcttatttgctgagcaatcgtcagcttgatgtaatgaataatttattgacatttcccccctttctttcaataagagaagaagggtatcaaatgtagcaagggacttggacagcagtaataccaggcagacatacatactctctgttgcctacaggctcataggtcacatatgtgggtatgtatatgtgcttgtgtgtggacatgcatttgtgtgtttctatgtgtgtgtaaatgtgcatattcctatccattgaaagccaaagtcaattaaaaataaaattcaacaacatgggaaaacagcaaagtaaatagttttttcctaatactactccctactaaactcaaaatatcattacctttatactgaaatgttacaaacagctcatgagaaatggctaatatcrtcgagcacttgccctgtggcagaagctgacctaagtacttttcaggcattaactaattttctctttgtgaccatgctgtaagatagtaactataattgtactcccattttataaatgggaaaacagaggcacaggaaggtcacatactttttttttcaaaatttcaggacaagtaattcgtggagacaggatttgaattcagacagcacacaccaagccatttttcttgatcactaatttatgttgcaccctggttggaagcatgcctaaaagccgaaatattttggagtgagtggctaagttaagaaaatctaatatactttatgcttgcaccctgaaatttaacatgtcattttctacaactttgcactgttcttttcttaactgtctcacgttttagtgttaacccccacaagaagtcttcaggctttttgagaacaggtgtcatctctagttgtacttgtttggaatgcctcaagacagataatataaaaccacaaagcaggttctcaagaaattacctgctatttgataaaaaattaatatatttgaactttcttctcatcattttatcttatatgttctgtttcatgatttttagtgttcaaagatatattaggtttagatttttcaccctcatagctgcaagtataaaatgcctctataatatgcctgaaaatggatcatctattctcagtaagatattctccattgacagggaaacatggattcctgcccacatcttacataaagtatgttaagaaagaggggttctgttaggtcgttcattggatttcagatccattctccacattttccctgctctgttctgcactgcagggattgactcttcaactacatttctgaggcttctttttgcccactggctctgaggtaggcttgctactaggacacactgacaggagattgaagagagaggggaagagagagcctgaggatatggggtgaaatatccctcagtggttctcactatgatgatacttttctccagattaccctggcatctgaggtctgttaacacctcctttctccctatgtcccaacagccacaagaatggtcatatcttgttttgcttatctctgggttggctcaccatctcctagttgactttttctcttttcttccatatgtgcaattaattacatgcataatttcctcttgtttaaaatacttatagtgattttattttctgtgttggactcagactgatgcaagatgtagtgtagactcacaacactttgtaactcagcaaagtttgtgtcgtgctgatgtgg

SEQ ID NO: 668911 - DNA, 2642 bp, Homo sapiens
tgagatacagaaccacttaagcagctttccaaaatgaggttttagattgtagagccaaagctctgagtggtttttgtaagagaggaattttttttttgttttttttttttcttgagacagagtctcgctgttgcccaggctgaagtgcaatgacgcgatctcggctcactgcagactccgccccatgggggttcactctattctcctgcctcagcctcccgagtagctgggactacaggcacattctttatgactttatctccatggacatattcttcataaatatttagaacagcttatactgtcttctattatactggcttgaagataattgataccattgatgcaggatcaagtgttgtctctttgttcatctacattacaaaacatggtgtcaccaataatctaattgtttttgttatactttcctatgttactggtttgaagataatcgataccattgatttgggatcaaatttgtattttgctgtttttctccattcatcaacagtacaaaatgtgctgtcacccataatagtttatttttgcatcgtatgttttggatttctacattcatttgcctgaatttttcactcagggttttggatattatatatttcatatgcagcatgtatcatttgttggtgacttaaatgcctgtatcctattataacagaactaatcacttttctaaagataagtataagtttggtccacaaaaaaatttctatgtgcattgactcattgaacctgctacgatgaagacttctactttacaattcaactatgcatatcaggattactgatttctttatatgacattacttatgaaaagaagtaattttatgaattactaaacactttccaagtatgtttattttgaaacttgcctttaattaatagagatagcttgaatatttagcatagtccctaataaaaataattgaattaaatttaagtatctagtcaatagaattaatagcaattgctataaacctaaataattatggtgataataaaaatcaagttaaatacaagatgtggtataggggttcagttagcttaataatctaatgttttactagtccacattcaattttagagtaatgatgttgaaaatgcaaattacttattattaggttccttaactttactatttatttgctttttagtttttttaaagttttattttaggtttaggagtacatgtgcaggtttgttatataggtaaactcctgtcttgggggtttattgtacagattaattcatcacccaggtactaagacaggtaagtacccaatagttatttttttctgctcctctctctcctctcaccctccaccctaaagtaggcccaatatctgttgttcccttctttgtgtccatgagttatctttatattaattatttttatttcactacttggcagtttgccaaatcagaaacttgattttgataagagaaaaatgtctatttcagaagttaaaaatccgtatttaccaaatgtttaccagtctactatcattgatagggttcactatatttcaatacatatatcccagtgttgtcaaatttttgagatattgtgattttattagtgtttgataatgaaaacataacttcaaagtctattacctgagcattgctttaatatccaggattctttgtacatgccattatgttcctgaaagtacatttagcataatatgtatagctaatttatttgaaaacatagccaattcttcattattcagaagttaataatcaaatttcatgaatcatatccctccccactacatcctactacatttcattttccttcaaaatactttaaaaatacttcctagaaattatctactttagcaaatgcatttcaagattctcagaaaatattttttaatagtccagaattattcataggattagataagctcaaatctccattagatgttcttttctgttattagtaaactcccctctttagtttagatcagtgttgtagcacccttattcttggtttctattacatttacagtatcttacaaggagcagcatctgttactgttctaagagattaagtcaaaccaaataggtgtgtctatttagaataatagggatttttaagagaattataattggatcttgtaggtgtcacaaacctcagtgtaataggcatcattgataagagattcctcttttaactgtttattttggcattgctacattcgttttgaagattttcttggtagccttgcatacatgtctttaaaccatttttcttacaattagatgctgtgataacatayagaggctgtggatacctacaattttaacttctgctttgactcccagaaggaaagtataaatattatactggctctgatatattacaactttacattaatttttagacaagataaaaagtatttttaacatattttctaccatattgctcaattatcatccttttatcatagtaacttatcaatgttacaaaacgtttttgtgggcattatagtttggaactcaattttgagaacattgttttaaaaatcttatcaagatatgactttccaaatacaacatttgtattacaattagatgtataccttgttctttttttcacttttaaattaaaacat

SEQ ID NO: 668912 - DNA, 649 bp, Homo sapiens
ttttttaatctagcagtgtttggtaaacttcaacatctctatatccctgtgtctttgcacctactggtctctgcttggaataatagctcaaggttttattcacctggaaaaaatttctacttacccttaaagaatcagcttaaataagccgggcatggtggctcatgcctataatcccagcactctgggaggccaaggtgggcggatcacctcagatcagtagtttgagactagcctggccaacatggtgaaacctcgtctttactaaaaatacaaaaaatagctgggtgtggtggtggatgcctgtaatcccagctactcrggagactgaggcagaagaatcacttgaacctggtaagcagaggttgcagtgagctgagatcacgccattgcactccatcttgggcgagagagcaagacttcatctcaaaaacaaaaacaaaatcagcttaaataataccgtctctgagaagcctttatatcttcctattctttcagaaagagttgaaaattcctcaactcttaaaacatttgtgcctctattattatgtatcaggcactgaactgagtgcctaggagacaaagatgaaactgtagaccctgccctcatggagttcatggtctagtatggaaaacagccatatgaaca

SEQ ID NO: 668913 - DNA, 609 bp, Homo sapiens
gagtctcactctgtcactcaggcaggagtakagtggcgcgatctctgctcactgcaacctctgcctcccaggttcaagtgattctcatgcctcagtctcctgagtagctgggattacagacgtacaccaccacgcccagctaatttctttgtatttttagtagagacagggtttcaacatgttggccaggctggtctcaaacttatgacgtcaagtgatctgcccacctcagcctcccaaagtgctgggattaccagcgtgagacaccacgcctggccaagccatcttttaaatctcctaagaggaacctttgaaacagtttagcagcaggtgtcaagaaccttaactgttcatagtttgttccagaaactcgacttctagaattgtattacaagaaactagtctaagaggtaaacacaaatttaggcataagaatacctatttcaaccttgcaaccacaaaaacaaacacaaaatctgcatgtgcaaaaatagcaaaacagttaactcaattccatgaactattaagcagccactgaaatatcaacacggcataatttctcctgtatcgaaaaactttgaaatgaaaaatggattacacaaaggaata

SEQ ID NO: 668914 - DNA, 609 bp, Homo sapiens
gagtctcactctgtcactcaggcaggagtagagtggcgcgatctctgctcactgcaacctctgcctcccaggttcaagtgattctcatgcctcagtctcctgagtagctgggattacagacgtacaccaccacgcccagctaatttctttgtatttttagtagagacagggtttcaacatgttggccaggctggtctcaaacttatgacgtcaagtgatctgcccacctcagcctcccaaagtgctgggattaccrgcgtgagacaccacgcctggccaagccatcttttaaatctcctaagaggaacctttgaaacagtttagcagcaggtgtcaagaaccttaactgttcatagtttgttccagaaactcgacttctagaattgtattacaagaaactagtctaagaggtaaacacaaatttaggcataagaatacctatttcaaccttgcaaccacaaaaacaaacacaaaatctgcatgtgcaaaaatagcaaaacagttaactcaattccatgaactattaagcagccactgaaatatcaacacggcataatttctcctgtatcgaaaaactttgaaatgaaaaatggattacacaaaggaata

SEQ ID NO: 668915 - DNA, 1881 bp, Homo sapiens
acacccaggacacccaggaaatggttgttgtttgattttcctcatccccagtctcaaggggaagccaggccaatgagaagagccacttgccatcaggctgtccctttaggagtcactgaaagggccccagggtgggatggtggggagataagaaccatgagagaagttggcacaaaggagttatgggaaaaagggtccaagataggcagaaaagaagcttttgccagttgatggggaagaaaggaaatcagagggcttagacagtgaggggggacaggacatctccatgtgcactctcatcgtttgcagtcagcaacaggtatctacggggagggccgtgcatcatctgctaccctggaggatctggaggtaagaggccctgggccgaggtgcagtgaccctgcaggctagccctccaacctcctcccacagcaggggcttgttgcccctctgccagctgaggcagcccacacacccccaccagccctaatgattattctctctacccctccccacaatcttcctccaactcctcctctctgcatgcacctcagagccagtaccaagaactagcagtggccctggattcaagctccacaataatcagtcaactcactgaaaacatcaattcactggtaagagtccagtggggtyccctgattccagcctgtgaatcctggactccagtttcctcttggggccctgaagaaaggggctaggagcccctgatgccaagggcaaatggggagctgggcacccaggtctcacctggagggaccccagagcacagaacatgcagcatggctcttctgcactgccctctttgctgactctctcttctccagacacccctgctctagtccttgccacacatgccctggggttgtcacctctcaggaaagcactagcctgactggttttcaggggcccgtatttctgccctgcctcagtccctaatttgctttttgagtctggacaagccatctctcctccttaggctcgtgtttctggaggaggtagagagtatcaaaggtcactgttagctcagagatttaaaggctcctagaatggaaacctcaggaccaagggctcctgtctgtcctttgctgtcttatatctctgctatgaagaactgtacctggcctgtacgtgctcagtaaatgtttgttgagtgaatgcacctttctcaatcgtaagctggcagaaggggggtgggcctttctcaaactctgtctctagaggttcagcagcccctctctgcagggccctttcccctctgctttaggcaggttcacacattgaaagaggagaagcatgagatacatcaggtacagaagcttgggaggaacttgttcaaactcaaaaaccagacgggtaagatggggctgccatgacctaggagcaggactggcatcagagggctgtgagggtgacttagaatgccccggggaggtgggtagatggaagggctttgaggcagagggaaagaggtctgtgccaggagatggcaagtcttgtcatctccatgagcctcagtgtccctctcagtaaagagggaggagtgcccgttgtcagccacccacagtgctatctgaaagtgacttggaagattggctaccatccgggtgtgaggagtcattagcagtgaggccaagtttgggaagcctgagaggaggagctgtgcaccgaagggaggattttttttttttttttttttttatccagaggcccttattgtctgcttcctttctcagctgaacccctggccccagagcccccagcacggccctctaaggtggagcagctccaagatgagaccaaccacctaaggaaggagctggagagtgtgggaagacagctccaggctgaggtggaaaacaa

SEQ ID NO: 668916 - DNA, 1881 bp, Homo sapiens
acacccaggacacccaggaaatggttgttgtttgattttcctcatccccagtctcaaggggaagccaggccaatgagaagagccacttgccatcaggctgtccctttaggagtcactgaaagggccccagggtgggatggtggggagataagaaccatgagagaagttggcacaaaggagttatgggaaaaagggtccaagataggcagaaaagaagcttttgccagttgatggggaagaaaggaaatcagagggcttagacagtgaggggggacaggacatctccatgtgcactctcatcgtttgcagtcagcaacaggtatctacggggagggccgtgcatcatctgctaccctggaggatctggaggtaagaggccctgggccgaggtgcagtgaccctgcaggctagccctccaacctcctcccacagcaggggcttgttgcccctctgccagctgaggcagcccacacacccccaccagccctaatgattattctctctacccctccccacaatcttcctccaactcctcctctctgcatgcacctcagagccagtaccaagaactagcagtggccctggattcaagctccacaataatcagtcaactcactgaaaacatcaattcactggtaagagtccagtggggtcccctgattccagcctgtgaatcctggactccagtttcctcttggggccctgaagaaaggggctaggagcccctgatgccaagggcaaatggggagctgggcacccaggtctcacctggagggaccccagagcacagaacatgcagcatggctcttctgcactgccctctttgctgactctctcttctccagacacccctgctctagtccttgccacacatgccctggggttgtcacctctcaggaaagcactagcctgactggttttcaggggcccgtatttctgccctgcctcagtccctaatttgctttttgagtctggacaagccatctctcctccttaggctcgtgtttctggaggaggtagagagtatcaaaggtcactgttagctcagagatttaaaggctcctagaatggaaacctcaggaccaagggctcctgtctgtcctttgctgtcttatatctctgctatgaagaactgtacctggcctgtacgtgctcagtaaatgtttgttgagtgaatgcacctttctcaatcgtaagctggcagaaggggggtgggcctttctcaaactctgtctctagaggttcagcagcccctctctgcagggccctttcccctctgctttaggcaggttcacacattgaaagaggagaagcatgagatacatcaggtacagaagcttgggaggaacttgttcaaactcaaaaaccagacgggtaagatggggctgccatgacctaggagcaggactggcatyagagggctgtgagggtgacttagaatgccccggggaggtgggtagatggaagggctttgaggcagagggaaagaggtctgtgccaggagatggcaagtcttgtcatctccatgagcctcagtgtccctctcagtaaagagggaggagtgcccgttgtcagccacccacagtgctatctgaaagtgacttggaagattggctaccatccgggtgtgaggagtcattagcagtgaggccaagtttgggaagcctgagaggaggagctgtgcaccgaagggaggattttttttttttttttttttttatccagaggcccttattgtctgcttcctttctcagctgaacccctggccccagagcccccagcacggccctctaaggtggagcagctccaagatgagaccaaccacctaaggaaggagctggagagtgtgggaagacagctccaggctgaggtggaaaacaa

SEQ ID NO: 668917 - DNA, 910 bp, Homo sapiens
gcttgccctcagctgccctgtgtggttatgggtgatccctagggacgctgggtggtgtcagtgagtttcttcgggggcttaaaacaaacaaacaagaagtacttttttaaaaaaaaagtctggctcaatctctgtcagtggtcaccccagtttccagcaactcatgtgctggaacccttgtagtcggtacagctgtttcaggagctgggcgctcaactagactaggcatcttccaacccctgccatcgtgtgtcatctcaggataagttaaggccttgccaggaaggaagccgggtgtaatgtgagcgacctctgggcctgtgggtagggcctctctgctgccgggattcctaatttgtatctctgaacagctgaatcccaacgaagttcaagtgaccccagatgtcaccaaaccccagagaggggttacgaagcaagctgtttgggactctttggtgcgtgtgtgctaacctcagtgaaatcactctaacctcagactgagctctgcatcctcttttgccttcagtggggtttctggcccgcctgagtgattcaaagccccagagctggcacgtcatcctctggctgcatttgtatatcaagtcactgggttggtttttctttgtttgctttttggctgtatggacatggggcaaatggaagtggagtgttgtgcagttagctagtagatttggtacaggaattgaaagataawaaattgggaatacaagtcagtgagttctttttctccctcttgagcaggaatttttggcttacattcaaataattgctttgtctgtagggaaacaagcagaaaatctttggcatgagtgatgtgagttcctgtaaagctacttatgttcttccagtcttctcttttcagcagaattgaaactatgtggtcccatgg

SEQ ID NO: 668918 - DNA, 910 bp, Homo sapiens
gcttgccctcagctgccctgtgtggttatgggtgatccctagggacgctgggtggtgtcagtgagtttcttcgggggcttaaaacaaacaaacaagaagtacttttttaaaaaaaaagtctggctcaatctctgtcagtggtcaccccagtttccagcaactcatgtgctggaacccttgtagtcggtacagctgtttcaggagctgggcgctcaactagactaggcatcttccaacccctgccatcgtgtgtcatctcaggataagttaaggccttgccaggaaggaagccgggtgtaatgtgagcgacctctgggcctgtgggtagggcctctctgctgccgggattcctaatttgtatctctgaacagctgaatcccaacgaagttcaagtgaccccagatgtcaccaaaccccagagaggggttacgaagcaagctgtttgggactctttggtgcgtgtgtgctaacctcagtgaaatcactctaacctcagactgagctctgcatcctcttttgccttcagtggggtttctggcccgcctgagtgattcaaagccccagagctggcacgtcatcctctggctgcatttgtatatcaagtcactgggttggtttttctttgtttgctttttggctgtatggacatggggcaaatggaagtggagtgttgtgcagttagctagtagatttggtacaggaattgaaagataataaattgggaatacaagtcagtgagttctttttctccctcttgagcaggaatttttggcttacattcaaataattgctttgtctgtagggaaacaagcagaaaatctttggcatgagtgatgtgagttcctgtaaagctacttatgttcttccagtcttctcttttcagcagaattgaaastatgtggtcccatgg

SEQ ID NO: 668919 - DNA, 589 bp, Homo sapiens
acacacacacacayatatatatatatcataaataaaagtctggaaattttcctggtgataacagcaaattccatatttgtaaatgagtctgctgggacgtatgaagcattaacaggtgatatccaaccctcacaagtcacttccagggagggtttttcaacaagtcccaaccatgccagatactgaaaaaagctacttggagttgcaaaaaaagaaaatgtgtgagtctcctaaccctctgtactttatcttcattgcatcactgttcacagcatctgttcccatacaattctgaggccctgcaagccttggaaacacacaggctcttgctctttcattctataaacattcactgagcacatgctaaatgacctattctgagctcagcatcaaacaaacaaacaaacaaaaaatgacaagaaacaatacacacaataagtaaaaacagtaacgtgtcttaagaggtggcaagaactttaggtaaaaggaaaatagaggagacaaagggagtccaaaatactagggtagggagtggcaggaggcaagctgctctcttaaagatgggtgggaaggtaggtgcactgaggta

SEQ ID NO: 668920 - DNA, 2074 bp, Homo sapiens
accatctctctccgctgcctgagacacaaacatgacttctgttcataaattcctattaaatgtttctttctaagaaatggattcgtcagcttctttcttcacagaaagtcagcttcctcagactttgggggtaggtttacataggcctacatactacagaacacttggatttctcagcctccgtaactgtattaagtaaattcctttttgttacaaattatggcttcagatattctgttacaagcaacagaagacaaactaaagtaccaagttacccagaaaaatgagcacatttcataaagtcagttttgtatgacatggccacgcagagcatacaatttaccaagaagagcaagctttgcagtgagcactgccctcttttgcttctttattttttatttcaataatattttctattggtttgaaaagttctttactctctttttattctcaattgtctcccagaaatagcaccattaacagatctatttttatgcaattataagaatataaatatttaggccaggcccagtggctcacccctgtaatcccagcactttgggaggccgagacaggcagatcacgaggtcaggagatcgagaccatcctggctaacacggtgaaaccccgtctctactaaaattacaaaaaaaattagctgggcgtggtagctggcgcctatagtcccagctactagggaggctaaggcaggagaatggggtgaacctgggaggcagagcttgcagtgagccgagatcgtgccactgtacttcagcctgggcaacagagcgagagtctgtcaaaaaaaaaaagaaaagatgaatatttatagctgtgttgtgcttaaatcaatgtttatacaaacaataggaatcaaaaatatttatatttgatcatagggactttttattcacctaatatatcatgaaataatttccatgtttaaagctatacaktattaaaataaagagtgtatggtatgttttgctgtaatttatgtaagcagtgcctattaatgaagagttaggtgctttctaacttactgccctgatgaatcagtgttctgagtgctctcatccccagaatatgtattgatagatgaactgctggatcgtaagataggaaatctcatattttatagaaatatttacaagttgcagtgagccgagatcgtgtcactgcactccagcttgtgctacagagtgagactcagtctcaggaaaaaaaaaaaaaaaaaaaaaagaaatatttccaagttaggattataaatgatttagctgctatccaaagtatgtcacaattcacagtgcttttaattatatataaatgtgctaatttcttcatacctttatcaatgacagatagtatctctctttcaaaaatatatcacctatctggtaggcaaaaaaaaaaaagttacattgatgcctttacttatacttccccttttttggtttgtgtttagtggggtgtggtggttcacgcctataattccagctacctgggaggctgagacaagagagttgcttgaacccaggaggcagaggttgcagtgagccaagatcgtgccactgcactccatcctgggtgacagaggaaggctcagtttcaaaaataataatattaataataataataatattttctaagctgttacgtctgttcacctaacagaaaatttaacatttttgttggctgatcctctatccaaataacttactaaatgactatgttagctattgttatattttacaaagtactcggtaatgaaagtgtttcttatattttaccatttaaatgcatgctgccataagtttctatgtgatatattttatcaagttaagcaagttgtttttcttatgctaaaatacttaaaagcacttgtttggtgttaagagtggaatcgtatgaacttcttttcaagtgaaagctgattatattaaaattctagtcccagcaacatagagaagcttatgttggactaattctcccacacaaaaagagcacaggctctgtatgagtatataactttttgaggacactgaacaatataaaaacagaaactagaggagtt

SEQ ID NO: 668921 - DNA, 613 bp, Homo sapiens
tatatatatatatatrgaagttaattcagttcattttaatatttgttctacatttttggactgattgaatggctatcctaaataatttgtctttgctagcgtttgtatatacatccctgccagtactgaaatgtgttgaagtggtttggcacttgaaggaatagttcatgaattctaaggagtaaggccattaccctacctgacatatttggtacagaagttttaatctctaaagtatcaagcttattattaaaattaaggttttgctttagtatatatttatattagaaacttcactttctcaattctttgagtttcatataacaaaaagctttaaaataccccaatatataaaaaaacttttatgttgatgttctgattttaattaaccatttaaattatagagtaagccatttcccttccaactttatcaatatcagaattacagaattgctattttaattttttaaggttaattttaaatttatctttttgagacagagtcttggtctgtcacccaggtgggagtgcagtggtgcgatcactgctcccaggttcaggtgatcctcccacctcagccccccaggtaactggaactacaggcaggcactaa

SEQ ID NO: 668922 - DNA, 1424 bp, Homo sapiens
ccagcaaaggcccaagctgcagttttcaagttaaagccaagctccttgacacacgaacaagctgcttcagaccctggctcacccgtgggcaaacattccatggagcttatgtccacgctttcctgttcctcccctcctttccccgcgttctcagctcaggtaccacctccttagggaagccctcccccataccctagccasatccagggcccttgtgagctctcatggaacctgggcttttttctctgaaggagacttatcctcatctggaaacacacaccctctggtgggacaagctgattaatatccatcatccctgctagactcagcctccttgagggtgggggctgtctgagtttgttcatcatcaaatccccatacctaggccagtgcctggcacatagtaggtgctcaataaacctgtctgcacttgcccttcaagattccagtcatggctgggtgcagtggctcacgcctgtaagccctacactctgagaggttgaggtgggaggatcgctcaagtccaggagtttgagaccagcctgggcagcatagggagacctcctatctaaaaaaatacaaaacttagctgggcatggtggtgcacacctgtagtcccagctactcaggaggctgaggcagaaggatcgattgagcccaggagatggagactgcagtgagctgtgattgtgccgctgcactccagcctgggtggcagagtgagaccctgtttcaaaactaacaaaatgaaaacaaacaagattccactcacgagaggaacccacagagggagaggcaggcctcccttccagcccctcctgcccgggatcagggccacttctgcagctgtctggaaaggaaaagctggcgttcgttgagtctggcactccaatttcactagtctgggatagaggcctcatctgtattttcaaagctcccagtgatcctaattcacagccagggatgagaccacaggcctaggggcagatttgagagctgctcattctttctagtctgctttggggcagggagtggggcgggcagtgggcctggaggagggcttggccaaccaggagattccaggagaggatggaaggcttgcgggacgcagtgcatgagtgacatgaagtcatgcacctactgagcccatgttctgaatggagctaaaacctgtgcactgggaacggacctagtttagctccctcagctctgggtataggaaaagacggaagcccacagagctaacaagaccagtggcaggcgtgagataagaacactgcaccctgacaggcgccctttgcctgcacaatcctcactgctccttaagcctttctacacgtaggcaatgttgtctattttgcagatgaggaaaccgaggctgagaggttaactaaattgcctaaatccacacagctgtgaacaga

SEQ ID NO: 668923 - DNA, 1424 bp, Homo sapiens
ccagcaaaggcccaagctgcagttttcaagttaaagccaagctccttgacacacgaacaagctgcttcagaccctggctcacccgtgggcaaacattccatggagcttatgtccacgctttcctgttcctcccctcctttccccgcgttctcagctcaggtaccacctccttagggaagccctcccccataccctagccagatccagggcccttgtgagctctcatggaacctgggcttttttctctgaaggagacttatcctcatctggaaacacacaccctctggtgggacaagctgattaatatccatcatccctgctagactcagcctccttgagggtgggggctgtctgagtttgttcatcatcaaatccccatacctaggccagtgcctggcacatagtaggtgctcaataaacctgtctgcacttgcccttcaagattccagtcatggctgggtgcagtggctcacgcctgtaagccctacactctgagaggttgaggtgggaggatcgctcaagtccaggagtttgagaccagcctgggcagcatagggagacctcctatctaaaaaaatacaaaacttagctgggcatggtggtgcacacctgtagtcccagctactcaggaggctgaggcagaaggatcgattgagcccaggagatggagactgcagtgagctgtgattgtgccgctgcactccagcctgggtggcagagtgagaccctgtttcaaaactaacaaaatgaaaacaaacaagattccactcacgagaggaacccacagagggagaggcaggcctcccttccagcccctcctgcccgggatcagggccacttctgcagctgtctggaaaggaaaagctggcgttcgttgagtctggcactccaatttcactagtctgggatagaggcctcatctgtattttcaaagctcccagtgatcctaattcacagccagggatgagaccacaggcctaggggcagatttgagagctgctcattctttctagtctgctttggggcagggagtggggygggcagtgggcctggaggagggcttggccaaccaggagattccaggagaggatggaaggcttgcgggacgcagtgcatgagtgacatgaagtcatgcacctactgagcccatgttctgaatggagctaaaacctgtgcactgggaacggacctagtttagctccctcagctctgggtataggaaaagacggaagcccacagagctaacaagaccagtggcaggcgtgagataagaacactgcaccctgacaggcgccctttgcctgcacaatcctcactgctccttaagcctttctacacgtaggcaatgttgtctattttgcagatgaggaaaccgaggctgagaggttaactaaattgcctaaatccacacagctgtgaacaga

SEQ ID NO: 668924 - DNA, 1424 bp, Homo sapiens
ccagcaaaggcccaagctgcagttttcaagttaaagccaagctccttgacacacgaacaagctgcttcagaccctggctcacccgtgggcaaacattccatggagcttatgtccacgctttcctgttcctcccctcctttccccgcgttctcagctcaggtaccacctccttagggaagccctcccccataccctagccagatccagggcccttgtgagctctcatggaacctgggcttttttctctgaaggagacttatcctcatctggaaacacacaccctctggtgggacaagctgattaatatccatcatccctgctagactcagcctccttgagggtgggggctgtctgagtttgttcatcatcaaatccccatacctaggccagtgcctggcacatagtaggtgctcaataaacctgtctgcacttgcccttcaagattccagtcatggctgggtgcagtggctcacgcctgtaagccctacactctgagaggttgaggtgggaggatcgctcaagtccaggagtttgagaccagcctgggcagcatagggagacctcctatctaaaaaaatacaaaacttagctgggcatggtggtgcacacctgtagtcccagctactcaggaggctgaggcagaaggatcgattgagcccaggagatggagactgcagtgagctgtgattgtgccgctgcactccagcctgggtggcagagtgagaccctgtttcaaaactaacaaaatgaaaacaaacaagattccactcacgagaggaacccacagagggagaggcaggcctcccttccagcccctcctgcccgggatcagggccacttctgcagctgtctggaaaggaaaagctggcgttcgttgagtctggcactccaatttcactagtctgggatagaggcctcatctgtattttcaaagctcccagtgatcctaattcacagccagggatgagaccacaggcctaggggcagatttgagagctgctcattctttctagtctgctttggggcagggagtggggcgggcagtgggcctggaggagggcttggccraccaggagattccaggagaggatggaaggcttgcgggacgcagtgcatgagtgacatgaagtcatgcacctactgagcccatgttctgaatggagctaaaacctgtgcactgggaacggacctagtttagctccctcagctctgggtataggaaaagacggaagcccacagagctaacaagaccagtggcaggcgtgagataagaacactgcaccctgacaggcgccctttgcctgcacaatcctcactgctccttaagcctttctacacgtaggcaatgttgtctattttgcagatgaggaaaccgaggctgagaggttaactaaattgcctaaatccacacagctgtgaacaga

SEQ ID NO: 668925 - DNA, 1424 bp, Homo sapiens
ccagcaaaggcccaagctgcagttttcaagttaaagccaagctccttgacacacgaacaagctgcttcagaccctggctcacccgtgggcaaacattccatggagcttatgtccacgctttcctgttcctcccctcctttccccgcgttctcagctcaggtaccacctccttagggaagccctcccccataccctagccagatccagggcccttgtgagctctcatggaacctgggcttttttctctgaaggagacttatcctcatctggaaacacacaccctctggtgggacaagctgattaatatccatcatccctgctagactcagcctccttgagggtgggggctgtctgagtttgttcatcatcaaatccccatacctaggccagtgcctggcacatagtaggtgctcaataaacctgtctgcacttgcccttcaagattccagtcatggctgggtgcagtggctcacgcctgtaagccctacactctgagaggttgaggtgggaggatcgctcaagtccaggagtttgagaccagcctgggcagcatagggagacctcctatctaaaaaaatacaaaacttagctgggcatggtggtgcacacctgtagtcccagctactcaggaggctgaggcagaaggatcgattgagcccaggagatggagactgcagtgagctgtgattgtgccgctgcactccagcctgggtggcagagtgagaccctgtttcaaaactaacaaaatgaaaacaaacaagattccactcacgagaggaacccacagagggagaggcaggcctcccttccagcccctcctgcccgggatcagggccacttctgcagctgtctggaaaggaaaagctggcgttcgttgagtctggcactccaatttcactagtctgggatagaggcctcatctgtattttcaaagctcccagtgatcctaattcacagccagggatgagaccacaggcctaggggcagatttgagagctgctcattctttctagtctgctttggggcagggagtggggcgggcagtgggcctggaggagggcttggccaaccaggagattccaggagaggatggaaggcttgcgggacgcagtgcatgagtgacatgaagtcatgcacctactgagcccatgttctgaayggagctaaaacctgtgcactgggaacggacctagtttagctccctcagctctgggtataggaaaagacggaagcccacagagctaacaagaccagtggcaggcgtgagataagaacactgcaccctgacaggcgccctttgcctgcacaatcctcactgctccttaagcctttctacacgtaggcaatgttgtctattttgcagatgaggaaaccgaggctgagaggttaactaaattgcctaaatccacacagctgtgaacaga

SEQ ID NO: 668926 - DNA, 1424 bp, Homo sapiens
ccagcaaaggcccaagctgcagttttcaagttaaagccaagctccttgacacacgaacaagctgcttcagaccctggctcacccgtgggcaaacattccatggagcttatgtccacgctttcctgttcctcccctcctttccccgcgttctcagctcaggtaccacctccttagggaagccctcccccataccctagccagatccagggcccttgtgagctctcatggaacctgggcttttttctctgaaggagacttatcctcatctggaaacacacaccctctggtgggacaagctgattaatatccatcatccctgctagactcagcctccttgagggtgggggctgtctgagtttgttcatcatcaaatccccatacctaggccagtgcctggcacatagtaggtgctcaataaacctgtctgcacttgcccttcaagattccagtcatggctgggtgcagtggctcacgcctgtaagccctacactctgagaggttgaggtgggaggatcgctcaagtccaggagtttgagaccagcctgggcagcatagggagacctcctatctaaaaaaatacaaaacttagctgggcatggtggtgcacacctgtagtcccagctactcaggaggctgaggcagaaggatcgattgagcccaggagatggagactgcagtgagctgtgattgtgccgctgcactccagcctgggtggcagagtgagaccctgtttcaaaactaacaaaatgaaaacaaacaagattccactcacgagaggaacccacagagggagaggcaggcctcccttccagcccctcctgcccgggatcagggccacttctgcagctgtctggaaaggaaaagctggcgttcgttgagtctggcactccaatttcactagtctgggatagaggcctcatctgtattttcaaagctcccagtgatcctaattcacagccagggatgagaccacaggcctaggggcagatttgagagctgctcattctttctagtctgctttggggcagggagtggggcgggcagtgggcctggaggagggcttggccaaccaggagattccaggagaggatggaaggcttgcgggacgcagtgcatgagtgacatgaagtcatgcacctactgagcccatgttctgaatggagctaaaaccygtgcactgggaacggacctagtttagctccctcagctctgggtataggaaaagacggaagcccacagagctaacaagaccagtggcaggcgtgagataagaacactgcaccctgacaggcgccctttgcctgcacaatcctcactgctccttaagcctttctacacgtaggcaatgttgtctattttgcagatgaggaaaccgaggctgagaggttaactaaattgcctaaatccacacagctgtgaacaga

SEQ ID NO: 668927 - DNA, 1424 bp, Homo sapiens
ccagcaaaggcccaagctgcagttttcaagttaaagccaagctccttgacacacgaacaagctgcttcagaccctggctcacccgtgggcaaacattccatggagcttatgtccacgctttcctgttcctcccctcctttccccgcgttctcagctcaggtaccacctccttagggaagccctcccccataccctagccagatccagggcccttgtgagctctcatggaacctgggcttttttctctgaaggagacttatcctcatctggaaacacacaccctctggtgggacaagctgattaatatccatcatccctgctagactcagcctccttgagggtgggggctgtctgagtttgttcatcatcaaatccccatacctaggccagtgcctggcacatagtaggtgctcaataaacctgtctgcacttgcccttcaagattccagtcatggctgggtgcagtggctcacgcctgtaagccctacactctgagaggttgaggtgggaggatcgctcaagtccaggagtttgagaccagcctgggcagcatagggagacctcctatctaaaaaaatacaaaacttagctgggcatggtggtgcacacctgtagtcccagctactcaggaggctgaggcagaaggatcgattgagcccaggagatggagactgcagtgagctgtgattgtgccgctgcactccagcctgggtggcagagtgagaccctgtttcaaaactaacaaaatgaaaacaaacaagattccactcacgagaggaacccacagagggagaggcaggcctcccttccagcccctcctgcccgggatcagggccacttctgcagctgtctggaaaggaaaagctggcgttcgttgagtctggcactccaatttcactagtctgggatagaggcctcatctgtattttcaaagctcccagtgatcctaattcacagccagggatgagaccacaggcctaggggcagatttgagagctgctcattctttctagtctgctttggggcagggagtggggcgggcagtgggcctggaggagggcttggccaaccaggagattccaggagaggatggaaggcttgcgggacgcagtgcatgagtgacatgaagtcatgcacctactgagcccatgttctgaatggagctaaaacctgtgcactgggaacggacctagtttagctccctcagctctgggtataggaaaagacggaagcccacagagctaacaagaccagtggcaggcgtgagataagaacactgcaccctgacaggcgccctttgcctgcacaatcctcrctgctccttaagcctttctacacgtaggcaatgttgtctattttgcagatgaggaaaccgaggctgagaggttaactaaattgcctaaatccacacagctgtgaacaga

SEQ ID NO: 668928 - DNA, 648 bp, Homo sapiens
  misc_feature 278, 279, 282, 283, 284, 285, 289, 293, 294: n = A,T,C or G
tggctcacacctgtaatcccagtactttgggaggctgaggcgggtggatcacttgaggtcaggagtctgagaccagtttggccaacatggtgaaaccctgtctctactaaaaatacaaaaattagccaggtgtggtggcgcacgcctgtagtcccaactactcaggaggatgaggctggagaatggcttgaacctgggaggcgaaggttgcartgagccaagattgtgtcactgcactccagcctgggtgacagagtgagactccgtctcaaaatgcnnccnnnnctcncctnnttccttactctgacacatttcttaattttggcctttcccacttggaaaaaccagatcattttttaacctctgcttttcccctttcactgttatgctagattaatcactagaaacttttcttttttttatatatatactttaagttttagggtacatgtgcacaatgtgcaggttagttacatatgtatacatgtgccatgctggtgcgctgcacccattaactcgtcatttagcattaggtatatctcccaatgctatccctcccccctccccctaccccacaacagtccccagagtgtgatgttccccttcctgcgtccatgtgatctcattgttcaattcccacctatgagt

SEQ ID NO: 668929 - DNA, 644 bp, Homo sapiens
tgagaggctgaaaaacagcaatttgttgtaatggtaatagtcatttcattcacctatgtgttttgaatgaaaaagcaatagatcaaatattgacctcagacacatttgtgatcatatttcacakgagaattggctccagatgtttgttttggatacagataacaaaatgattcagtgtcttagagtggttatataccatatgaaataaataacaacttatgtttaatgttagaataattcaacatttaaatacaggtgaccagggacagagataactctcctaatggaattgactcctctgctctcagctcagaatggaactgtaggggcagaaaggaggtgttccctttcctccccataataagggtcatagatgactgtcctataacaaagaccagttaacaagagaaaatcatagcaaatttatttgatcatagttttttgtttttttttcttgttttaaaatattatagcaatagtttattgataggtaatttgattagtagagttataaatacaaaaaggaggaaagattaccagaaagaagacattatttctaacaaatcttcaagaaaatattgattattaaaatgacttttatcttataagtgttgcatacacagttttagctcttcagagccctc

SEQ ID NO: 668930 - DNA, 1167 bp, Homo sapiens
aatactttatctcaaaaaaaaaaaaaaaggaagccgttgacataaatatatatttcttttgaaatgttgcacccatgtaccattccaaggacaaggtatctctgtcaaattgttaattccattgtaaatcacctttgcaattttgaaaaatggtcatatttaagcacataatataattatgatatgtaaacttatatcctatgtcatatactgatttaaaatgatggatttagattcataggattaattggttagctacttcataaaacacattgttaatatgtctaacaaaaagcactgctgtggtagcaatgttacaaactacaakgatttatcatatcagaaaaggtatttaaaaatgaaagttttggctggccagcacagtggctcatgcttgtaaccccagcactttgggaggctgagacagacagatgtttaagcccatgagtttgagaccagcctggacaacatggcaaaaccccatctctaccaaaaatacaaagaattagctgggtgtggttgtgtgcacctgtagtccttgctactcaggaggctgaagtaggagaatcatctgagccctggaagttgaggctgcaatgagccgtgatcacaccattgcattccagcctgggcaaaccaaagtgagaccctgtctcaaaaagtagaaaaaaagatttttttttaaattgtgaaagaaattcaatagtggataaataagaatattggtaggcatcactgaaatgcttatttttattcagacctttttctcttatttacatttttgttacatcttgcaagtcttagggtcccaggtggggaagagggtcatctggggttgatctttgttaaggttaaatatagtagtagctattatctgttatccttctaaaaagagaaaaagagtgagtgctgattagccagaatgcatcttagctctggtgggctttttcttttgattttattctactcttgaagatcaacatttgagttaagttgcgctgattttaaccagaatatcattattggttccaaaatcctttgctctgtataaaaaagtcaggaacaagaaataactttttttttgcaacctcaacgttgttattagcctcagagctgcttaaaaactttattccactgataccaaaaggatttactagattaaagatt

SEQ ID NO: 668931 - DNA, 1447 bp, Homo sapiens
tgatgtttttggtcaataactgaccacatatatgacagtggtcccataagattatattgccatatttttactgtacctgttctacgtttagatacacaaatacttaccrttgtgttagaactgcttatagtatccaatacagtcacatgctgcacaggtttgtagcctaggagcaataggccgtataatatagcctgggtgtgtcggctctaccatctaggtttatgtaagtacatgctgtgatgtttgcacaatgacaaaaatcacctaataatgcatttctcaaaatgtatccccatggttacgtgaggcatgactgtctattaagagacacccatttcttttcttggtgacatgctgtaaatatctatgaaaataggaaatattgatgaattttggaccttactacctcaaggaagaatgaccaggaaatgaaaatcttgagatttgaaaacccgtcatttttctaggcttcagtttgcctaatttctctctcattttctcttctttcctttttctactaatcttgtgaatccattttgggaagaagtgggccctagagtcaccctctctgccctctaacaggacccggcttggggatgacggcagatcctatctcccttctctccagtctcaattctagcaagcagcatctttcagcttatgttggggagtgaagcaggatctgtgacctaggaccgaagctggcgcctggcgggacgactcagacaccagactttggaccacaataccatcaactattagtgtctgtctctccaggatccctagcaactaatgttatttttagtgactgactctttaatatgtactgcttgtgaatatgaatttaaatgttatgtccagggcacacagcagtgcacacagcactagcagttggggcaattgagttattaattttctactcggtaactcgcatcgtcatccacaacctgcagagcaaagcccaaactctgtaccgcagcactcaagaccctctattagctgactccatcctaactgcctagtgccatgttccagtcacaggacctggggtcctgtcatacagacatgttccatttccaaataagccatgcagagctctgcatctgtgctgagctgctccttcggccgagaaggtcgtttctgtcttctgtggctgaagctcatgctccctcagggtccacagctgtgtactaagtgctggtgctggcacagtgatgcacgtccttctcacatcaaactcggacagggctagggtgtggcctcagaacagcccacttctccttagcagcacattatctgtcatctacttatgagttcaaaagtggagatgacagaaacaaggaaataaaagtgcatcttcaacatacagcaagtgcacagtatcactcataataagaaaaatgctaagtaaaaattccagcaagatacagtttctaatccagca

SEQ ID NO: 668932 - DNA, 628 bp, Homo sapiens
gcacatttagcaaagcacgtagagggggcatcctcgtgtcctgctcactaaaggacatacgcattaaagcaaatgtgtctccaaataagttcaagactttctgaatgtctctgttgtgcaagtaccattggtaagatttaacgccaccctgacataggaaactgcactcttgcccatacaaaggaacctagggacagctggctgctagccaaaaaagtagttagcaagaatggacacttggtgttagaatacgtctgagaaacactataatttattattattgtttctacttgtactttgatacgttggcttcctcagagtacaatccccttgagttgaaagaaacaaaactggccagaagtgaactggtgggaaaaattaatccctgtcaccgtcttcaaagggaccagtgttcctggagaraaggactctctggccccacctggagccctctgcagggcatccttcctgcctccaagcccagttcaaccctctgtcacctctgcaccatgggcctgaggcaccactgagggcagccctcaccattccttggtggatcccgagggaaggttattctgtagcatagattgtgaaaaggcctggctgaagctttacagtgatatttgca

SEQ ID NO: 668933 - DNA, 945 bp, Homo sapiens
gactggctaccatctgggtgcgaggaatcattagcagtgaggccaagtttgaggagcctgagaggagctgtgcgccaagaggagggtttttcttttccgagaatccagaggcccttattatctgcttcctttstcagctgaacccttgcccccggagcccccagcagtgccctctgaggtggagctgcagcacctgaggaaggaactagagagagtggcaggagagctccagtcccaggtcaaaaacaatcagcacataagtctcctgaaccggcgacaagaagagaggattcgggaacaggaagagaggcttcggaagcaggaggagaggcttcaggagcagcacgagaagcttcggcagctggccaagccacagagcgtcttcgaggagctggtgcgttgccccaactggggagcctgccctcctccctagccctccgggcctttgtttccccacctctaaaatggggcagtgtagccctcgcgtgaaaggttacttctaaaggcacctgtgagccaggtggctgtgggagagagggggtgatttttctaacctgcctccagccttcccagtgccatgggaggcagacaccaagttctggggtctccagctgcagtgggtggctgctgattgcttctctctgtccagaacaatgagaacaagagcacactgcagttggagcagcaagtaaaggagctacaggagaagcttggcgaggtgaaggagacggaaacctccaccccatccaagaagggctgggaggcgggcagcagcctcttgggaggggaggtgccaggtcagaggcagcttccagcctgggggctggtgaccacagcaccccgcagggcagtcctgcgactgtttctcacttcctgcctctgacttttaaaggtgggtagccctgggctcctctcaggtctggacatcatcatcccagctagagg

SEQ ID NO: 668934 - DNA, 199 bp, Homo sapiens
tgatcacacccacctgccatttagatcagacrtcttttcttccctttcatgtgttggggggtgttgtggaggagacctgagatgtggagtgattaatatattgctcagctcaggagacattatcactttctttttgtggacaaatgtgacaggttacattttctaaagatgaccttgacaatatctccagtccttcatt

SEQ ID NO: 668935 - DNA, 888 bp, Homo sapiens
ttctgctaattttaaggttttattatacataatatgggtttattgagttgaaatctgagactgtcttttgatgattaggagcttcttatgccaccaggaaaatggtaaaataaatgggagaggtgtcagcactagtggaggtgatgagttggatgatgtgtactgtcacaaaatagggacagggagaggtaagactggaattctttcagtggaaagagagatgtgtttttttggctatccaaggacatgcattataattcacatccattttgctttatgcttgacttccttttttttgtctaaagtgatgtactttatatggtttgtgttgaggtataatttacataaaataaagtgcacagatcaagattgtacagtttgataagttttgacaattttatatatccatgtaaccaccacccaagatataaagcttttccatcattccggaaagttccctcatgcccctttttagtaaatccccccacctcccatgcataataagaaatcattatgtaatttctattagtacagatgagtcttctatattcttggattttgtctaaatgaaatcatgcagcatatattcttttgtgttttgttgcttttgctcaaaattcggtttttaagatccattcatttaccagtaaatttytattttagtttagttctctgagtattagttcattgtgtaaatatactatgatttgtttatgaattcttctattgatgaacatctgggttaagttttaggcttttatgaataaagcttctatatacaatgtatattctttcttttcagtaaattttagcagtggaactgacaccaatacttgattctgctttgaggactttgaatgtagttttagttttaagacatgtcagtgg

SEQ ID NO: 668936 - DNA, 620 bp, Homo sapiens
aactctgagtctctcatgtctttgattccataatcaagtctctagtcccatgtccaatctataagaccaaagtgcaaatatacagaatttctggcaatcggtcagaggttttactcttcatgtttccataactacttgattctattcctaactaatatgaatcttatgttctgtggatcttagtctcattcctgcatcttgcccgttatatttaagatgtgtatgtggtatctccagtatttgacactttctagaagaatatgacttaaatatttggatcaaggctccatgctacagtgggaagagtagcaatcactgacactttattattcaggaatctttactggaccagtgcttatatcaccatgggggagggygagtgagtttggaatttcatatgggccatatacaattgagcaaatggagagtgaagctgggtttggggctttgaaaacaagggttaatataaggcgcattcatgtataaaagtaataagcctatttttaagtctttatttaataagtgatttttgcttaaggatattgataaaatattttcgttaggttcaaaatataaatataactgtgttggattctagcaagataatcttgctggagtga

SEQ ID NO: 668937 - DNA, 599 bp, Homo sapiens
agcacaatagtgaaatgtattttaactcaaattcttctattccaggccagctggcatatgtgagggaaaagctaaaaacataaatctatcatttgcaattggtataatcaccatccttggcataggaaagtcttcattaaacatgtttatagaattatcctttcatacaccttaaattaattgccttccattgagatttaaaactaaatatggagagattgccctggtcttttcatcccaagtcatatttcaagaaaatatcttgtttctttatgtctggctgaattttagatctgttttctgttcaaaagaagtttcatgatcacttttatatatgaaaccatttttcaccagrccacattagaatggagggtataaacatatttccattaaaagtaataaactatactttcttgttttcatatatattcagtattaaaggaattatactttaattccaaccccgattatactttaattccagcctccaacaaagtttcacataggattttttttttctgttaatacaaagatatgctacatctaacaccaaatggagaccttttcttcttcaactccagttacctttgggaatatct

SEQ ID NO: 668938 - DNA, 609 bp, Homo sapiens
ctagatatagttactgtgattatatattttaayaaatggtccttttattaaaaaaaaaaaagatatctaaagagaaaaccataataatctctcaggtaattatggccacagccaaaaccagtctttctaaacctaaagactctcataaaggccctatcacataacttctccacttcccagtaaagcattgaggaggaaacaacaggcttttgagtgctggacattctatcttatacttgagaattatacccaaaataacctaggactctgtatgggtcctaggttattttgggtacaactagttggagcaactaaatttttttaaattgttttgtgattttccttctgagaaagcagctacactaagacaaattagcttgtctgtgatcagaattaatcagattggatctagagttcttattaatataagtctaaggctttggcaaatctcctcagggacaataaggaggatagggaactctggtactgactaaacagtctttactttaattcctcttttcgttatgtcttcatgtttcttcactttagggaaaaacttatgccatctttaatttcctttaaggagaaccctcaagaagatgacagtac

SEQ ID NO: 668939 - DNA, 638 bp, Homo sapiens
ctgttgcagagagtctgaggtgggcctgagaatatggattcctaacaggatcccaggtgatactgatgctgctggtctggacatcacacattgagaaccactggtacatatctgattcacaatctgagctgcaccttggagtcaccaagagaacttaaaaatacaaataacagattctcactccacatattctgatgtagttagtttggggtgtagcttgggcataggaattttccaaagctagcccaggtggttttcttttttctttttttttctttttttgagatgaagtcttgctcagttggccaggctggaaggcagtggcgtgatctcagctcactgccacctccacctcctgggttcaagcaattctcttgcctcaggctcccaagaagstgggattacaggcacatgccaccacacccggctcattttagtatttttagtagagacagggtttcaccatgttggccaggctggtctcaaactcctgatctcatgatccacccaccttggcctcccaaaatgctgggattaccagcacgagccaccgcacccggcccctcaggtgattttcactactgtcaatgtgagatccactggtgttgaccttatcctgaagtctatcatggttactg

SEQ ID NO: 668940 - DNA, 638 bp, Homo sapiens
ctgttgcagagagtctgaggtgggcctgagaatatggattcctaacaggatcccaggtgatactgatgctgctggtctggacatcacacattgagaaccactggtacatatctgattcacaatctgagctgcaccttggagtcaccaagagaacttaaaaatacaaataacagattctcactccacatattctgatgtagttagtttggggtgtagcttgggcataggaattttccaaagctagcccaggtggttttcttttttctttttttttctttttttgagatgaagtcttgctcagttggccaggctggaaggcagtggcgtgatctcagctcactgccacctccacctcctgggttcaagcaattctcttgcctcaggctcccaagaaggtgggattacaggcacatgccaccacacccggctcattttagtatttttagtagagacagggtttcaccatgttggccaggctggtctcaaactcctgatctcatgatccacccaccttggcctcccaaaatgctgggattaccrgcacgagccaccgcacccggcccctcaggtgattttcactactgtcaatgtgagatccactggtgttgaccttatcctgaagtctatcatggttactg

SEQ ID NO: 668941 - DNA, 638 bp, Homo sapiens
ctgttgcagagagtctgaggtgggcctgagaatatggattcctaacaggatcccaggtgatactgatgctgctggtctggacatcacacattgagaaccactggtacatatctgattcacaatctgagctgcaccttggagtcaccaagagaacttaaaaatacaaataacagattctcactccacatattctgatgtagttagtttggggtgtagcttgggcataggaattttccaaagctagcccaggtggttttcttttttctttttttttctttttttgagatgaagtcttgctcagttggccaggctggaaggcagtggcgtgatctcagctcactgccacctccacctcctgggttcaagcaattctcttgcctcaggctcccaagaaggtgggattacaggcacatgccaccacacccggctcattttagtatttttagtagagacagggtttcaccatgttggccaggctggtctcaaactcctgatctcatgatccacccaccttggcctcccaaaatgctgggattaccagcacgagccaccgcacccggcccctcaggtgattttcaytactgtcaatgtgagatccactggtgttgaccttatcctgaagtctatcatggttactg

SEQ ID NO: 668942 - DNA, 2927 bp, Homo sapiens
taaaactatttatattattaattaatttttataatcaatgatgcccaaagaggccttaatttcttagtcccctttcactttcattatcagcatcagcaatttgttagggccattttggaggaatcctccctctctaaaaataaattctttgccacttgtcatcagtgtatcaattggagaaaggtctgttaagatgcaaatgctgagtggttggtaggcaccctcaccagaagctgttcactctaggcaacctcttagataaacagcctgacatagtcacttagtatcacaggcgtctcaaatttaacatctccaatattaattcttgatttggcactatcccaaactgctccttccccagtcttcaccatgtaatttaagggcaaatccaaaacaccagtaaaccctgctggctataccttaaaaacagaataatcatctcactacttctcaccatctcaactgctataccctagtaggtcaccatcatctctagattaccaacagattgctaacagatcttgtttctacactaacctccttctgtctgttgtcaacagctgaaagagtgagccttcctaaatcgtatcatgtcccacttagatttcaaactcttcggtggctccgtatcacaaccagagtataaaagcaagtacttaaaatggtctgtgaagccctgcatgatctgctccaatgtccccgcttctgcaaccacttccactactctccctcttgctcaatctattccaggctcactggcctccttgttattcttcaaataggtcaggcagggttttgctttaggaccttaactctagttcttcatggaaatgtcttcctacagatacctccagaatgtctaactcattcatgacctctaagtttttgctcaaatcttgccttttcaataaagctacccaagtactccatttagagctacaacctactctgtcatctccctaccccttaaccttgacttaggtttccttatttttcaatagcatttatcatcttctcacatggtttataatttacttactcatcatttttacttactattgtctgttctccctgctagaatgtaagctccaaaaaagcaaggacattcctcccctcctattgatgtatgttttccacatctaaaatagtgttacattatacatgctcaataaataattattgagtaaatgaattgttctatctaaatgaaatttcttagtgatataaaataaactccattaatgttggtttccattagctggtatgtcttatttattttatatatatatatatatatatatatatatatatgatttatatgaggcaagtaggctctgggtttgtgattgaaatttgctgaggagctgtgactcttttctctccctcattcatatagtgggaaagagaaaatgaggtggcaacagataggaaaaagaactgcagttaatttattgtttacattttactggtaaatgtgctggttaattgaatatctaaacttatgataagaccaatgccaccaagattcagaagaaattccatagttagacataatcctgtaagctttatagtcaccagaaaggatgtaccctgtgtaagagaagtaattaaattggctaatcttggtcaaaacaatgtgtttccttggctatttctctagttatattttctactgccatttaaaaacttttaaagccttttttcttttatggtgtaaacaattttattatattctgaaatacagcactatggttggggatggagagaaaaggggacatacaatgtttaagaaaccacattctgcagccatactctcagatttgctagtcactatgcaactgcatttgtgggtagtgaaatacaattatccaccttacttttcacatttgtaaagtgggaataataacatatacctgatggagttgttttgagaaataacacttcacaacacacaatgcctagtacgtcgtattcactctataactatttttataaagtaaagaaggattttattaaaagaaaaatatttaaaaagcaaattttttaaatagacatgacattttcataaaatgctattgttcatacagtattaacttgactcatggaggcaaattaacattactgttatttaaaaaaaactctatggccttatttgaatttttatactagaatatttaaaatttgaaacactagttttagagagagagatgctgtgttgttcaaagtcctcctctgcatcttcatggtaggaactttctttggtagccctttctctaagttaagagatatattggcaggaactatgaaggatctgatattttaccctagttataagcaaacaagtagagtgccacagtttcatggaagttggcagaatgtgtgagattcctgagtctgagacaaataactttattactcaaagcacaacaggcaccatgagcttcatacttccatagattcccctcgttctgaagtcccacaaggcgaagaggagctgccagatgggtgttgtacatgcactgtgtttgttatgcaactggaagaactccaagcttaggaaagtcctaagaaggctgctagcaaacgtacccaaactttgccctggcaggaaatactatctttgcaattaaatgtgcagaaaggcaagaaacccatggggccttaactcccaactgcacaaatgcagctgcatcaataaggctattttgatgaaaacaagatgcacaaaaattttgaccacagaatcagactaacattgtaaatgtaaacactcaatccttcctaagcakttctttgaatatgtagttaatccgttggaataaaattttgcaatggtttgttctttctagcgctttatcatttgataccttcataagccatgcatttttcccttttgccacgtaggttttacccttcccctctattta

SEQ ID NO: 668943 - DNA, 1533 bp, Homo sapiens
ttggcagcagctggcaaaacttaaaagctgaagttatcaaggaatgggctaactcataaaacacttcagccctctttacccctttttggtccaggtaacaccggtgatcacagtagctctttgtgtgcattgttaatgacaagagtctaaacatgcaagtctctctttttatccatgattttttttttcctgagatagaatcactttatcatgcaatgaagctatatgaaggtaagatgcctgagagagtgtttaccttgctagaaaatatttagacgtgtgttgaatgactgatttcgaggtccaactctgcatccttcttcaagagacctctcgggtgagagagcaatgaatagtggcccttggctaccgtgttgggtctgcacggctttcaggggagatggccactctttattgacaggcatttcccttatttaaccacatgttccatgcacagatggtatttatcttcaggagatgactcacgcccttgtcaacatacctttctatattaaatatccctatcacatacaaactggacctcagagtgggctgggtggtattagaacaatctcttccccctttttagaagctgtgaagatttttgaatttactcacaagatctacttcccaatgaactaagactttgtaggattttcctatttaagatctgggtttaaactcagctcttccatttaactggctatgtggtcttaagattactgtctctgtgcctctatttaattacttataaagtgagagcaattttcctgatcttatagagtcactgagaagattaagtgaggtagtggcactgagaaagtttgaagcaaatattttttgaataaataaatgactaaaacaataatataaatgttaaaaatcatcaaccaattcagtgtgtataatgaggcttattatttactgagtgatccccgtgcataaagaatagctctaagttcttaaacccataccaccttgtarttaaggaattagaatgtaagcctacatcttgtgggtgggcacccaaggccacactcttaacttctacctgcactgcctcttcttatttgtaataaatgtaataaactccttttggcactaaatactgccctggaaaaaatggtcagcttcttcaactgcggctgcctttacgctaatgtaactgaggttcttagagttttataacttactgagcgaaataaaaaaaaaaaaaatacccttatgacaccttggtttctgcactaagtaattaatgacaaatttgaggatcaggtatctagcttctgttacctgatattctgagctgagaatgcatcagactcaggcctcagaaataacttcactgagagtaaaatgggaacaagtttctagttagtgaaaactggagcatatgatgacttgactgtacacgtgggggcaaatagcagtcctctctctcccatttctggaaagggtttcgtttctcttgggcccagtattttcctgggttctgatagcctctgctgactttgaactcatcctctgtcattg

SEQ ID NO: 668944 - DNA, 563 bp, Homo sapiens
tgagatgtagtctcactctgtcacccaggctgcagtgcagtggcatgacctcagctcactgtcacctccacctcccaggttcaagtgattctcgtggctcagtctccctagtagctgggattacatgcgcccgccaccacgcccatctaatttttgtatttttagtagagaccgggtttcaccatgttggccaggctggtctcaaactcccaacctaagatgatccrtccacctcagcctcccaaaatgctgggattacaggcgtgagccatcacacccagcctggatctctacattctgtgaagcatgagcaagtacataaagttagatgggtggtatggttaagtgcacaaacctgagcctcctcattttctttccctttaaattgtggtaaaacgcacataacataaaatttaccattttaacaatttgaaagtgtacaattcggtggcattaagtacaggtattcatgatgtgcagacattcattcatagtgtgcagacatcatgacctcgttaacaaaaccttttcttcatcccaaatggaaaccccatacccatcaa

SEQ ID NO: 668945 - DNA, 563 bp, Homo sapiens
tgagatgtagtctcactctgtcacccaggctgcagtgcagtggcatgacctcagctcactgtcacctccacctcccaggttcaagtgattctcgtggctcagtctccctagtagctgggattacatgcgcccgccaccacgcccatctaatttttgtatttttagtagagaccgggtttcaccatgttggccaggctggtctcaaactcccaacctaagatgatccgtccacctcagcctcccaaaatgctgggattacaggcgtgagccatcacacccagcctggatctctacattctgtgaagcatgagcaagtacataaagtyagatgggtggtatggttaagtgcacaaacctgagcctcctcattttctttccctttaaattgtggtaaaacgcacataacataaaatttaccattttaacaatttgaaagtgtacaattcggtggcattaagtacaggtattcatgatgtgcagacattcattcatagtgtgcagacatcatgacctcgttaacaaaaccttttcttcatcccaaatggaaaccccatacccatcaa

SEQ ID NO: 668946 - DNA, 372 bp, Homo sapiens
ggtgagagggtgcttgtcgggaggaggagagggaggctgtgcaggcaaggctgmctgctggacagaggacttggagctaccctgggaagcatctgtagggagccattgtaggttctacagcaggggagggaccagaggatgggaggtggctgggatcccctggttgccaccatcttccatggctacagcctggaccccacatgtgcttattgctccttcctccctctgtgcacccctaactcagtccagggagtgcacagaagaagaggagccaataaaacacatttaaaaaaataagtcattattattactttaatttgacttctaggcaccttcttattcaagacacagttgtggctgggctcagtggct

SEQ ID NO: 668947 - DNA, 731 bp, Homo sapiens
agggaggatcacaaaaaggtagaaaaaaaagttgtgccattttcttcatattcctgttttatctgctaacttctgacacagtatttttgcctcttgtgggtaaatcttgaatagaatacacttgccctacacatacgctgattacccaagagttaagcttgatttccactctttcatcatggggccacaccttttcccttttttagggctcatstatatccatgggtatattccaaattatttaatctaatcttccaaattacctactacctactagcgccaattccccgtggattgtatgaaaaaggccaggctggacaggagtgagcaggacacggcgagcattgagtgagtgaggccagtgactgggcataacccagttggtgaatccatgattcacatggaatcagagatctgtggagctgggcaggccttataaatcttctggttcatttaattcatggttctatttcagcacttatcatagtctggatcgatttagagtgggctgtgtgtgtgtgagtcttcctttcccaaccctgaaaaggggttccctgcagacacagtgcagggagagaagcactgagaactcctcctttagcagcggtacacactgacacccaggggtgtgttcttgggtttgtaacttgccaggatgtacagctagtgctggaccagcccagaggctggcttggttcatagtccaacggtgtttccatgacaacgcactg

SEQ ID NO: 668948 - DNA, 731 bp, Homo sapiens
agggaggatcacaaaaaggtagaaaaaaaagttgtgccattttcttcatattcctgttttatctgctaacttctgacacagtatttttgcctcttgtgggtaaatcttgaatagaatacacttgccctacacatacgctgattacccaagagttaagcttgatttccactctttcatcatggggccacaccttttcccttttttagggctcatgtatatccatgggtatattccaaattatttaatctaatcttccaaattacctactacctactagcgccaattccccgtggattgtatgaaaaaggccaggctggacaggagtgagcaggacacggcgagcattgagtgagtgaggccagtgactgggcataacccagttggtgaatccatgattcacatggaatcagagatctgtggagctgggcaggccttataaatcttctggttcatttaattcatggttctatttcagcacttatcatagtctggatcgatttagagtgggctgtgtgtgtgtgagtcttcctttcccaaccctgaaaaggggttccctgcagacacagtgcagggagagaagcactgagaactcctcctttagcagcggtacacactgacacccaggggtgtgttcttgggtttgtaacttgccargatgtacagctagtgctggaccagcccagaggctggcttggttcatagtccaacggtgtttccatgacaacgcactg

SEQ ID NO: 668949 - DNA, 610 bp, Homo sapiens
ttagcgccgggacctgtggggcagtaacctccaacaggtagagtgaaatgacatcctttctctccacgcctgagtgttcctatggcaccagttgcttgtaatgggtgaagaaaaaattgaactcgtttctcctgagacacacatacgaaagctgactctaagaaagaaaaactgaaatgtggaccatcttatttagttccagttaaagagagatgtgtttaaagcactctgatgtgtggccttaaaaaaggatggggctgcctcttaaggcrgaatcacacgagcacatagaaataaaaatcaaagcagttatcatatttaattttcttactgactagattcattttgcattagcaggggatggcgaaggagagggactgggaatgcattatgttcttatttgggtcatttccttgtgctttggggaactttctcttgtcagcgtgcacatgcatgccgggggtgggcgtgagctggccccatgcactcactggcttctttctcggtgtcgtatgacccaggagggagtctgcagcatggggtgattctccacatagagagtcattcaccactctcaaccccgtctccaggtacttcctgtgttcatttg

SEQ ID NO: 668950 - DNA, 610 bp, Homo sapiens
ttagcgccgggacctgtggggcagtaacctccaacaggtagagtgaaatgacatcctttctctccacgcctgagtgttcctatggcaccagttgcttgtaatgggtgaagaaaaaattgaactcgtttctcctgagacacacatacgaaagctgactctaagaaagaaaaactgaaatgtggaccatcttatttagttccagttaaagagagatgtgtttaaagcactctgatgtgtggccttaaaaaaggatggggctgcctcttaaggcggaatcacacgagcacatagaaataaaaatcaaagcagttatcatatttaattttcttactgactagattcattttgcattagcaggggatggcgaaggagagggactggraatgcattatgttcttatttgggtcatttccttgtgctttggggaactttctcttgtcagcgtgcacatgcatgccgggggtgggcgtgagctggccccatgcactcactggcttctttctcggtgtcgtatgacccaggagggagtctgcagcatggggtgattctccacatagagagtcattcaccactctcaaccccgtctccaggtacttcctgtgttcatttg

SEQ ID NO: 668951 - DNA, 651 bp, Homo sapiens
agagaaaacaaagacaaattttacctcaatatagataatgtgatttttagtttccaaaaatggccccagtgaaccatgccttttggtattcatgctcttatgtgttccacttccacactgaacctgggctggtctatgacttgctttagccagtgaaatacagcagaagtgacaatgtaggacttctgaatctagccattaagaagccctggcagcttctattctcacacttttgcaaactgtgagccatcatgtcagaagtccaactaccctgctggggagaccatgtggaaagaccatgtggagaggccagatggagaggagaggacttaagaatatatggaaaggagaaaattctcagtgtcccagttgggcctccatttgactgcaacattgtgagagaccccaagcaagaccagcagtactattcaactaagcccaacacaaattaccaatgcacagaataaagagctaaataatggttgttgttttaagccactaggttttggggtgatttgttatgtaccaatagctaactgatacacctgatcagctgattgtatgtrtgtgtttgtagcatgtctactaaacacattttgagtttctcattgtgcaaaccagcatttgtttttctttacatttgactgaaaa

SEQ ID NO: 668952 - DNA, 795 bp, Homo sapiens
gaggatcttaagtatcattcatattaagtggagttcttatctaaaatcgtgtatcaaagcttgcagagatccaaaaatccctccaaataatcttcgtattataatcagcataacttatggcagagcttgtgaaatcctgccagcaattttgtgactagtaacatagaatccccaattcacctttgggcaaagcagcaccagcaaggcggccagctgttcaaatcaacacaactatctgcaattaggaaatgactaactaccacaacaaagtaatttttaagcgggggagggcatcagttcttctcttaataaaaaggtatacctgcatggtgaatgcaaaaaactcaaataaaatacccactttgggaactatacagacaaggtaataaatagaaaggtgtctcataactaactggcatctgtaccaatataaattcttccgaggagactttttttaaygataaacacccacaagcacatcaatttaggagtcccagcttgaacagatccatcctcccaccgccatcttagcatcagccatcttgaattcctctatcccattgcctcctcacacagctgcaacctggcttctaaggcagactttctagtggagctttcccattagagcaaatgatggcctccgcaaggtggaatcccaggattttgcttggtccttgtcttatgaccagtgcctacagcacttcacattttaaaatcatactctccctccctggtattctctgaaagtgtctccccgtattccatcactctgaggtccagcatggcctgtgctgc

SEQ ID NO: 668953 - DNA, 540 bp, Homo sapiens
gccagaatctatttggattttttaaataaggaaaaaaaaatttcttttgactgttgatccagaaaatcattgttagcagctacagcagatacctatctaggaaagacgaatccaatagagaacttgagatctcacagcattatataaacattttctctgtctaatgccataaatgcattgttctgtatgtcagctgtcacgtaattatattcatatgtgtatattgtatgtcatttttcatcatatgcttttttaataaagtaattttgttgaaatcgcctttttttttcattttgcatcttcttaactcttcttcctagaccttcctctattgccatgttccacaaaggatgaagaaaggaatacgaaggaagttttatttgccttcattaatttgttttatagaactcaaagggttgagtttctgttcacttaggaatatgtcatgtgactgtccactkacacttactggtggtgtgtgagattacacactagttatattaaacattgtaaatatctggacaaaaagaagagttaaat

SEQ ID NO: 668954 - DNA, 1273 bp, Homo sapiens
tatgattgagattgcacaaagcattgaatcatcaaaagtaacgtattatgatgtcatatattaaataaactcagcttttggtaggatataagttgaaaaagcacacagcaacttaaaagtggagatggaggcttagaaacttctatgttggtgagaggaggtggaattagaatattttccaaggattattctcaaagcacataactgagaattgactttgagtgttggcaataaaggaagacttttctcctattacgatatgctagacataacattcttattaaagtaaggaggagaattggagtttctgaatctcctcctttgcaacaaaacagctcccctgtttcaaattgaatgtacaagattagcaagcagagagatgaagatttaagaaaaaaagtatgggctgggtgcagtggcttacacctgtaatcctagcactttgggaggccgaggctggaggatggcttgagtctaggaggtcaagaccagcctgggcaacatagcaagaccctatctctacaacaaatacaaaaattcaccgagtgtggtggcgtgcacctgtagtcctagggacttgggaggctgaagtgggaggattgcctgagtctgggaggtcaaggctgcagtgtgctgtgatggtgccactgcactctagcttggacaacagagcgagaccctgtctcaaaaaaaaaaaaaaaagaaagaaaaagaaaaaaagtatgatgttcaaaatctatttaagagggagccatagagcttgagaaagcagaggatagctgatgatctgccctgttcttgctcctgcttcttatattttgcattcccacattgtgttgtatggaagcaaaacatcattgttttactggtgagtagattgcacctttctccttgcagacaaggtggtgacagcaaccggttccaggaagcccctgrtaacaacccttctttgtgttgtgtgaggaagctatggctcataagtgacctcagcagatttcccacccactacgctgggtccctcaactcacagagactcattgttaagggctttcactctgaacagctgctggcgcttgctggcttcattcactatgaagatggtgatcaaacaccccagatttcaaataatctgtcctatgatcagaccatgggtcagcccatttgccctggtgtctgattaggaaagtatgatcactgtcaccatagaacaacgcctcccaacttctctacccacttggatgttttccccactcacttcattgttttggatatc

SEQ ID NO: 668955 - DNA, 1273 bp, Homo sapiens
tatgattgagattgcacaaagcattgaatcatcaaaagtaacgtattatgatgtcatatattaaataaactcagcttttggtaggatataagttgaaaaagcacacagcaacttaaaagtggagatggaggcttagaaacttctatgttggtgagaggaggtggaattagaatattttccaaggattattctcaaagcacataactgagaattgactttgagtgttggcaataaaggaagacttttctcctattacgatatgctagacataacattcttattaaagtaaggaggagaattggagtttctgaatctcctcctttgcaacaaaacagctcccctgtttcaaattgaatgtacaagattagcaagcagagagatgaagatttaagaaaaaaagtatgggctgggtgcagtggcttacacctgtaatcctagcactttgggaggccgaggctggaggatggcttgagtctaggaggtcaagaccagcctgggcaacatagcaagaccctatctctacaacaaatacaaaaattcaccgagtgtggtggcgtgcacctgtagtcctagggacttgggaggctgaagtgggaggattgcctgagtctgggaggtcaaggctgcagtgtgctgtgatggtgccactgcactctagcttggacaacagagcgagaccctgtctcaaaaaaaaaaaaaaaagaaagaaaaagaaaaaaagtatgatgttcaaaatctatttaagagggagccatagagcttgagaaagcagaggatagctgatgatctgccctgttcttgctcctgcttcttatattttgcattcccacattgtgttgtatggaagcaaaacatcattgttttactggtgagtagattgcacctttctccttgcagacaaggtggtgacagcaaccggttccaggaagcccctggtaacaacccttctttgtgttgtgtgaggaagctatggctcataagtgamctcagcagatttcccacccactacgctgggtccctcaactcacagagactcattgttaagggctttcactctgaacagctgctggcgcttgctggcttcattcactatgaagatggtgatcaaacaccccagatttcaaataatctgtcctatgatcagaccatgggtcagcccatttgccctggtgtctgattaggaaagtatgatcactgtcaccatagaacaacgcctcccaacttctctacccacttggatgttttccccactcacttcattgttttggatatc

SEQ ID NO: 668956 - DNA, 1056 bp, Homo sapiens
tggtgagtaaaccgaatgaaatatgttaaatctctgtccaatcctgtccaaagtcaggcagaggaggccaacttgagtacttatcaccatctcccagcaccttttgttgtttgattagaatagattccctctgtaagacattaatgatttccaaggctgctttaagaagtttctttgttatacgggaagtgattgagaactggcaatcatgaatctggctgtctctgctcaggagcttaaagactgttctgatgacgataattacatttttatgaatatcctgcctagagagtaacaattttactatgtcaaaccgcaccacacaaagatgcatcaatttcatctgcaatgaaaaatagagcctaatagtacagttatatttatatgatagtcaaacatcaagatgtaacgtaagtgcttcaactaaaagaattccgatcattatttaaccttgagatgattaaggtgaaagcttgtcagcttccatgaattacttttttcatgatttttgctgttttggtttgatttttaaaaatccataattaacatttattaacatttggattctactccaacctccatgatgtgtgggcaagggaaaaacaacaacaaaaaagatccatagatatgattaatggtcaaagagagagtattaggtaattataagtcataattatgttcttggtaaaataccatactaactggttttctcctttctccttttctctgctaagtttcttcaactataatgcaaattatggacaatgtatttaggttagatgctatacatacatattaatttaatacaaagaaaactgtttcattgtgattgtgcaccagagctatgccaagtgtggtctgagaaccagcaacattaagcattactcaaaaacctgttggaaatgcaaattctcaggcgttaccccagatctcttgaatccgaatctgtagcagtgggcacaggcccccgggactctgtgttaacaagccttccaggaggtgcgatgagrtgtgagaatcactgctccagcatcttgtaactcattctcccctggc

SEQ ID NO: 668957 - DNA, 1350 bp, Homo sapiens
gtgttagatgttttttcattttcccatggtggcctcctttgggactgtccatgcttttgctccaagagtaaatctcaaaggagcaagcatgagtaggaattttccttgcatgcacacagccagccaaacagccctatgtccgtgatgaggtgcattccagaaccagtggtaggatggggttgggttgtacctactagctgaagtttttattagatgtagaatttaaactcacacttggttctgggtctagtatttaaaaacttcctattgtattatgtatatctttrtattcctagtgcttaataaattatagttcctcaactactgtttgttgatgatttgaataatgtacaaataaatatcagggagtacaacagctccattaaatcatgtgggtttttccaattatttgctgctatttgtttctggaactgatctgaaatagatagcattttgatgtgtgacctttaacttaccaaggcagacagaaaacaggaaaagggtgggagtccctatgactaaaacgtttatgttaagtccatgatggatattccaggtgttctggtaggcatcttcctggccaaaatttaagctgaatttgagcgcaacgtctaataacggctggacttgttttccagggacctcaaaggtattttcttagataggtcatgttctggggcttttgactctaatgcaatgtgggcaatgcaatgaccatgttattttagagacatttacaggtcactcagggagtatgaaggaggcaaacactttggctctcttatatctgtcactcacaggaagctggtggcttaaagtttttaagacatttgttttggttgagttctccaccagaagttgagcaaggcagaattgcaagggcaggtccaggttttgtgatgtctgaagctttagacaatataagttgtcctatttaagaaagataatataaaatcataaataaaaaactagatatgaaaatgagtatgtaacttgaagccccagctaggcacagtgtctcacacctgtaatccttgcacattaggaggctgaggtgggagccttgctcgaggccaggaatttgagactagcctgggcaatatggcgagaccacccctctttacaaaaaaaaaattaaaaattagccaggcatggttgcgcacctgtagtcagtcccagtgactcaggaggctgaggcaggaggattgcttgaactcaggaatctgaggctgcagtgagctatgataatgccactgcactccagcctgggtgacagaatgagaccctttaaaataaaaataataataaatagttagaagccaacccccccccccccgccttgcaactggg

SEQ ID NO: 668958 - DNA, 603 bp, Homo sapiens
gcaggttagttacatatgtatacatgtgccatgctggtgtgctgcacccactaactcgtcatctagcattaggtatatctaaaaatatggaacgcttcacgaatttgcgtgtcatccttgcgcaggggccatgctaatcttctctgtatcgttccaattttagtatatgtgctgccgaagcgagcacttgtcaagacttctttgcgtttgagaattctgtcatgaatatggcctaggtttgatggcaaaatgattaagaaatgaaatggagttaattttcattgagtgcctaacatatgccaggtatcttgcttgagttttgcatatttacttatttattttaaaatttattttttttcaataaaccacctacaaagcttctggatgtgtattatttaagctttgtaaccattttgcacttgaggaagctagaactcagacttaaataayttgtctatggcctcacagggagcaagtggcagagccagaatccaaacgcagatttgtgagtgcacggcttttgctgtgacgctgtaacctctcatttggcctgttctttccagccaatgtgaaagacacataaaacagtgatagagagagggg

SEQ ID NO: 668959 - DNA, 1205 bp, Homo sapiens
ttttgaaggtagaaccagcaagattggcagttggattgaaaaataataagcaaaagagaggagttaaggaaaataggaagtggcctaagtgtagtaagaatagaaatgccatcagactgagatggggcgggctgtgagtacagcaatttggggtggaggggagatactaagacttttgtttgggatatagtgagtttgaaatgtctatgagacagacagccaagtggagatgtcaagtgggcagttggatatgtgtgtctgaatataggagttagaatcctagaaaaaagtcatctttcttaatggtcttggtttaatatcactcctraattcatctgtagcttctaaaacttccattaaaaacatggaatgtgactctgcatagtgatgtgttcactggtttgatttctgggactgaaatcagagagagaatgttcttttgggtaaacagaagtgaagaatcaggattcttgtttcgaactttgcttcttattgcttaaaacttaatgattccataattcttattttaagaaaaagaagtttttttaaacaaaatgagcaaaagcaataccttaacaaatcaagctttcctctgcttttatgtcaaggtagttgagagtattgtgagacggttataatttttatgtttatgtaaatgtcatcttaaatataattgaaattgctttttgtcattgaaacagatattatgtagttttacaaattttaatgaattaaactatgccgtcttcctgtagaaaaggagataccgctggccctccatattcacaagctctgcatctgtgggttcagccaactatggatcgaaatatgcaacttcaaattatcttcattcaggaaggagaaccctgagttcttctgggttggatctaagcatgtaagactattgagttacatttgacttctgaagtcactttttgtctttactttttagtcagcttgtgaaagcaaaaagcatcttatttttaaaatacctatgttagtaccctggaataacactggcatttcctagcccaaactgagactaaaagttttgaattaatctttccctcaacttacaagaaaacagttatcaaatttgtctttaaattatctcattggaccctccaccagcctatgaggcaggcactcccatgagccccattgacagaggtggaaattgcctcagagaggtgaagtgaagtggt

SEQ ID NO: 668960 - DNA, 1205 bp, Homo sapiens
ttttgaaggtagaaccagcaagattggcagttggattgaaaaataataagcaaaagagaggagttaaggaaaataggaagtggcctaagtgtagtaagaatagaaatgccatcagactgagatggggcgggctgtgagtacagcaatttggggtggaggggagatactaagacttttgtttgggatatagtgagtttgaaatgtctatgagacagacagccaagtggagatgtcaagtgggcagttggatatgtgtgtctgaatataggagttagaatcctagaaaaaagtcatctttcttaatggtcttggtttaatatcactcctaaattcatctgtagcttctaaaacttccattaaaaacatggaatgtgactctgcatagtgatgtgttcactggtttgatttctgggactgaaatcagagagagaatgttcttttgggtaaacagaagtgaagaatcaggattcttgtttcgaactttgcttcttattgcttaaaacttaatgattccataattcttattttaagaaaaagaagtttttttaaacaaaatgagcaaaagcaataccttaacaaatcaagctttcctctgcttttatgtcaaggtagttgagagtattgtgagayggttataatttttatgtttatgtaaatgtcatcttaaatataattgaaattgctttttgtcattgaaacagatattatgtagttttacaaattttaatgaattaaactatgccgtcttcctgtagaaaaggagataccgctggccctccatattcacaagctctgcatctgtgggttcagccaactatggatcgaaatatgcaacttcaaattatcttcattcaggaaggagaaccctgagttcttctgggttggatctaagcatgtaagactattgagttacatttgacttctgaagtcactttttgtctttactttttagtcagcttgtgaaagcaaaaagcatcttatttttaaaatacctatgttagtaccctggaataacactggcatttcctagcccaaactgagactaaaagttttgaattaatctttccctcaacttacaagaaaacagttatcaaatttgtctttaaattatctcattggaccctccaccagcctatgaggcaggcactcccatgagccccattgacagaggtggaaattgcctcagagaggtgaagtgaagtggt

SEQ ID NO: 668961 - DNA, 609 bp, Homo sapiens
tggagcttttggttttgaaactggacagtcctggtagacagagatggtggaaaccctagggtatgtttttttcatatttctcaatgatactttatacaacataagccaggtactgtactcgatttggttttacaatcaactttattggrcattcgtactgagttcatttctcgatggcacagtttctttaccaagttagtagtcatgcctgtaagtcctgacagggtttattagtggcttaattaccaggtatgcaaaatgccatgtgttttaatttttttaaagttcaattaaacaaacaagtttcttcaattagggcaatcaatgctttctctttcttgtcagttcccaaatgactttttttttttaatacaggaatggaagtcttagaaagttatatatgattttaaaaaatcctttctcaacttcatctagtgatttctaactccatctcctttagaaagattatatagagactattgccaggtacagtggctcaggcctgtaacaccagcactttgggaggctgaggtgggcacatcatctgaggtcaggagctcgagaccagcctggccaacatggtgaaaccccatctctactaaaaataca

SEQ ID NO: 668962 - DNA, 1116 bp, Homo sapiens
ttgcacttacagtgaatttatagtttttaaagtgctttgagatatctcataactatatgaggctgacaagactagacttattatatattccttttttagatgaagaaaccaagcacagggaagtaaagtgaccagttcaaggccacactgcccagaaagaggtagagctggaagagagtacaggtcttctgaatcctgggaaccaaatcccaggattttttctttctttcttttttttttttttttgagccggagtctcgctctgtcacccaggctggagtgcagtggtgtgacctcggctcactgcaagctccgcctcctgggttcaaagattctcgtgtctcagcctcccaagtagctgggactacaggcgtatgccaccatgcccagctaatttttgtatttttagtagagatggggtttcgccatgttgaccaagctggtctcaaactcctgacctcaggccatccacctgcctcagcctcccaaagtgctgggattacaggcgtgagcccccgcacccagcctggaaggtattttttctattattatacaggtagaaataccataataaaaccaaaatcaaaggcatgggtcaatacagaatctaggcaaggagaaaaatgttaagaatttgtcagggtgtttttagcactagccagtgaagataaaaacctacagcagattctacaaaaatctgcagtaaagaagcctaattcattgggtttactaagggtgtaaatgaccatataaaatcaacacatttccttactctttcatttcatattaactaaacaactttctgttattaactagttcctaatcacttctatttcaggaatgggccctcttgcacatgggagaagaagatattcatcaatagagaagcatttcacaaattgcaaatttaaagttaacttttggttccatagcaggtctcaagagcatttgtatgccattcayctccaggacggacagcaagaggataaataaactgaccaacgaggtttatggaacctccatgactccagcaggttcaaatcccagaaaacagcctcccattaacatcctcaagcctaatcctaaataatgtagtatcattattgattggaccta

SEQ ID NO: 668963 - DNA, 612 bp, Homo sapiens
aaagctaagatgttatatatccaatccagcaatgaagtcatcaatgaggaaagaaaatcagtacactattttgccttggccatacaattcaggtttaattgccacaagatgacacaaatcccttaccttgaccttgatttttatttactatttatccctgtttttacaaaactccctttgagtccattagttcttttttcttggaaggaaagagtatacatcaggagtcccgtagaggatcttgagataaatattggaagtgggatttgcagatgaggcacaaaaatgtacacaaaattaaatatatacatcaaacaaatgacttcctctgagtgcccactaggaagagcttttattgaagtggcttcaagggtgagtagagaaggcaattttgattccaggaaaaatattctaataatgaaatccttagagttctcgtggctaggaaggtgatttttgactttaagcaaagtgtgttcttagaaacatgacctctttcatgccatttcaaattttcagtggaagaatttacttagacagcattaaggttgcattcatggtcatttatttgtatcaggataatttttwaaatttttctagcactacctctga

SEQ ID NO: 668964 - DNA, 1404 bp, Homo sapiens
attagttgcttggggccggagttggtagaaattgggaagaggcaagataaattttggggatgaagatgatgttttatatatcttaattaaggtggtggtcatatgagtttacagatttgtttaaattcaatgaatgtatgtaactttaagatatgtgacttatttgatccaaattataatccaataaaataattaaagcacaataaggaaaacacagttttctggagctttctgatacttttcacctgaaatttaactccagagggaaagtgttgtagttaataagactttcgtttggtcacagtgtacttcacagttattcatagaatgatgggattttgtgattgtaaacagtttaatagatggtagactttgtagatactgggtagctaatgtttctatatttataaattcatcaaggtaattcatcaagataactgttgcgttctggctgttaagcctttttctcatttccttgtctataattgagacgtgctcttttgttccattgctactgaagaatttgttttttttgtttttggtgaaaaacgtaagtattcagaagactgctttaatttgggagttgatgtttaaaaacctatgatcactgagaggagatgcactaaagtatctgtgtgaagaggctgaagttgagcacttggagaaaaacacaacactgatgtttagtatttaatatttgaccgatacttgcgtgtgcacatgcgtgcacatttgtatgcatgtatgtatgatgtgtgtgaacgtgtgtacattcacatgcttactgcagaagtgtatttggactacagtgtgagttaagttggttttagtattgtgttagcttcatattgtctccaacaaaagaactcttaaatacactgacacagagaatataccaaggctgtgtaacactatttctgcaacattctagtgcttgttatagaaaaagaaggtaaagtggcttgttcatgatattttgcttatttttcacctaacgtatgacattttatatattttctcccaataattctttgctctaccattgcagagtgaaaaccactatcaagttcaaagcacacacagtcattaaataaaagaaaaagagtgmacatttatagttaatccctggtgtgagtatattttttccaagtttaattagtgctgtttgttctcataacttgactacaacaacaaaaatatttggcaacagcaatctttcacaaagatgtgaaagtaatcagaaagcctatagtagcgaggagaagagtcaggcattcttgctttctaaataaatgctaggtctgcccataggtaaggttgttgtggccatgaagattactaagcatgttagccccagcacacttctttattgtcctctggctggtagctttttcagaagaaatc

SEQ ID NO: 668965 - DNA, 1404 bp, Homo sapiens
attagttgcttggggccggagttggtagaaattgggaagaggcaagataaattttggggatgaagatgatgttttatatatcttaattaaggtggtggtcatatgagtttacagatttgtttaaattcaatgaatgtatgtaactttaagatatgtgacttatttgatccaaattataatccaataaaataattaaagcacaataaggaaaacacagttttctggagctttctgatacttttcacctgaaatttaactccagagggaaagtgttgtagttaataagactttcgtttggtcacagtgtacttcacagttattcatagaatgatgggattttgtgattgtaaacagtttaatagatggtagactttgtagatactgggtagctaatgtttctatatttataaattcatcaaggtaattcatcaagataactgttgcgttctggctgttaagcctttttctcatttccttgtctataattgagacgtgctcttttgttccattgctactgaagaatttgttttttttgtttttggtgaaaaacgtaagtattcagaagactgctttaatttgggagttgatgtttaaaaacctatgatcactgagaggagatgcactaaagtatctgtgtgaagaggctgaagttgagcacttggagaaaaacacaacactgatgtttagtatttaatatttgaccgatacttgcgtgtgcacatgcgtgcacatttgtatgcatgtatgtatgatgtgtgtgaacgtgtgtacattcacatgcttactgcagaagtgtatttggactacagtgtgagttaagttggttttagtattgtgttagcttcatattgtctccaacaaaagaactcttaaatacactgacacagagaatataccaaggctgtgtaacactatttctgcaacattctagtgcttgttatagaaaaagaaggtaaagtggcttgttcatgatattttgcttatttttcacctaacgtatgacattttatatattttctcccaataattctttgctctaccattgcagagtgaaaaccactatcaagttcaaagcacacacagtcattaaataaaagaaaaagagtgcacatttatagttaatccctggtgtgagtatattttttccaagtttaattagtgctgtttgttctcataacttgactacaacaacaaaaatatttggcaacrgcaatctttcacaaagatgtgaaagtaatcagaaagcctatagtagcgaggagaagagtcaggcattcttgctttctaaataaatgctaggtctgcccataggtaaggttgttgtggccatgaagattactaagcatgttagccccagcacacttctttattgtcctctggctggtagctttttcagaagaaatc

SEQ ID NO: 668966 - DNA, 1404 bp, Homo sapiens
attagttgcttggggccggagttggtagaaattgggaagaggcaagataaattttggggatgaagatgatgttttatatatcttaattaaggtggtggtcatatgagtttacagatttgtttaaattcaatgaatgtatgtaactttaagatatgtgacttatttgatccaaattataatccaataaaataattaaagcacaataaggaaaacacagttttctggagctttctgatacttttcacctgaaatttaactccagagggaaagtgttgtagttaataagactttcgtttggtcacagtgtacttcacagttattcatagaatgatgggattttgtgattgtaaacagtttaatagatggtagactttgtagatactgggtagctaatgtttctatatttataaattcatcaaggtaattcatcaagataactgttgcgttctggctgttaagcctttttctcatttccttgtctataattgagacgtgctcttttgttccattgctactgaagaatttgttttttttgtttttggtgaaaaacgtaagtattcagaagactgctttaatttgggagttgatgtttaaaaacctatgatcactgagaggagatgcactaaagtatctgtgtgaagaggctgaagttgagcacttggagaaaaacacaacactgatgtttagtatttaatatttgaccgatacttgcgtgtgcacatgcgtgcacatttgtatgcatgtatgtatgatgtgtgtgaacgtgtgtacattcacatgcttactgcagaagtgtatttggactacagtgtgagttaagttggttttagtattgtgttagcttcatattgtctccaacaaaagaactcttaaatacactgacacagagaatataccaaggctgtgtaacactatttctgcaacattctagtgcttgttatagaaaaagaaggtaaagtggcttgttcatgatattttgcttatttttcacctaacgtatgacattttatatattttctcccaataattctttgctctaccattgcagagtgaaaaccactatcaagttcaaagcacacacagtcattaaataaaagaaaaagagtgcacatttatagttaatccctggtgtgagtatattttttccaagtttaattagtgctgtttgttctcataacttgactacaacaacaaaaatatttggcaacascaatctttcacaaagatgtgaaagtaatcagaaagcctatagtagcgaggagaagagtcaggcattcttgctttctaaataaatgctaggtctgcccataggtaaggttgttgtggccatgaagattactaagcatgttagccccagcacacttctttattgtcctctggctggtagctttttcagaagaaatc

SEQ ID NO: 668967 - DNA, 1404 bp, Homo sapiens
attagttgcttggggccggagttggtagaaattgggaagaggcaagataaattttggggatgaagatgatgttttatatatcttaattaaggtggtggtcatatgagtttacagatttgtttaaattcaatgaatgtatgtaactttaagatatgtgacttatttgatccaaattataatccaataaaataattaaagcacaataaggaaaacacagttttctggagctttctgatacttttcacctgaaatttaactccagagggaaagtgttgtagttaataagactttcgtttggtcacagtgtacttcacagttattcatagaatgatgggattttgtgattgtaaacagtttaatagatggtagactttgtagatactgggtagctaatgtttctatatttataaattcatcaaggtaattcatcaagataactgttgcgttctggctgttaagcctttttctcatttccttgtctataattgagacgtgctcttttgttccattgctactgaagaatttgttttttttgtttttggtgaaaaacgtaagtattcagaagactgctttaatttgggagttgatgtttaaaaacctatgatcactgagaggagatgcactaaagtatctgtgtgaagaggctgaagttgagcacttggagaaaaacacaacactgatgtttagtatttaatatttgaccgatacttgcgtgtgcacatgcgtgcacatttgtatgcatgtatgtatgatgtgtgtgaacgtgtgtacattcacatgcttactgcagaagtgtatttggactacagtgtgagttaagttggttttagtattgtgttagcttcatattgtctccaacaaaagaactcttaaatacactgacacagagaatataccaaggctgtgtaacactatttctgcaacattctagtgcttgttatagaaaaagaaggtaaagtggcttgttcatgatattttgcttatttttcacctaacgtatgacattttatatattttctcccaataattctttgctctaccattgcagagtgaaaaccactatcaagttcaaagcacacacagtcattaaataaaagaaaaagagtgcacatttatagttaatccctggtgtgagtatattttttccaagtttaattagtgctgtttgttctcataacttgactacaacaacaaaaatatttggcaacagmaatctttcacaaagatgtgaaagtaatcagaaagcctatagtagcgaggagaagagtcaggcattcttgctttctaaataaatgctaggtctgcccataggtaaggttgttgtggccatgaagattactaagcatgttagccccagcacacttctttattgtcctctggctggtagctttttcagaagaaatc

SEQ ID NO: 668968 - DNA, 697 bp, Homo sapiens
cacaaccggttcgggggcattccacaagtggctcagggagatacacttccttgaagcaatggagtctaatcaaacatcttggctcctcctgaaacccactcccaccttttccgtccctataagttaaagatcttttttttttaagaactatatatatatattttatgtgaagtttactctctataaagtttggatgaagacattttttaaagatcttaagtagtttagacacacgcctttgctcgaggaaattcacagaaaccgagactgctaaacatcttattgagtgactaacgagttctccttcactgattaatccttttcctcatcccttcctcccmctcccatctgccctaagaacaaagagcttgtaaaccaataaattaggtggagctaaagagctctggacgcgccttttaaactcttactctgtctctttctaactcctttgtttctgctggactcggggtacccaccgggtagtgtggggctggtttccccaataattttgatagaaatattaagcactgattttcttaagaaggggacaccgccaaaccaagataggcctttggctactgcatgtcctattcctggtttttctaatataggattcttgtgtgcatgtccttttaagttttttctgttaaatctccatatgatgacatagagataagtgaccttccgttttggtatg

SEQ ID NO: 668969 - DNA, 634 bp, Homo sapiens
tcttctgttttagactgagttttattgggagagagagctcatattgtttattctgcattcccggagtcctcacacaggtaactgttcactggataaataaatgtacaacactgttagtttcacacttaattctgaaaacatagcttaaactttaatttatacacaagaatatgttaaggcaggggtttgcaacccccagtccactgactggtactggtctgtggcctgttaggaagtgagcggcacagcaaatgagtggtggatgagcaagcgttatgcctgagctctgtctcctgytaagatcagcagcggcattagattctcaaaggagcacaaaccctactgtgaactgcacatgtgagggatctaggttgtatgctccttacgagaatctaatgcctgatgatctgaggtggaacagtttcatcttgaaaccacccctccacccccaatccttgacattgtcttccacaaaaccagtctctggtaccaaaaaggttggggactgctgtgttaaggtattaacataattggaaatattaatattttaaaacactacaattctcagagacattgggggtggttttaataaaaccagaaagctttttaaaatggggaatagatatttcctcaa

SEQ ID NO: 668970 - DNA, 686 bp, Homo sapiens
ggcctcccaaagctctgggattacaggcgtgagccagcacgcccagcattttttcttccataaaaactatgtgcatatattactttaataatttaaacaaatagtaaagaacttaaaaatgaagagggtaggccaggcatggtggttcacatctgtaatcccagcactttgggaggctgggaggatgggaggatcgttggagcacaggagttcaagaccagcctgggcaatatggtgagaccctgtctctacaaaacatacacacacacacacatacacactagccaggtgtggtggtgtgcacgtgtagccccagctactcaggaggctgaggtgggagaatcacttgagcctgggaagtcaaggctgcggtgagctgtgawggtgccactgcactccagcctgagtaacacagtgagaccctgtctcagataaaataaaatgaaataaacagggttcatggcaacaggtcatagatagagattttcatttctgttttagagagctattagagacaaactaaacaatcccatattcaaattgacaaaatagacccaatgtttttaattactacagctatggtctaataacctcaggctcttcctgttcttgtttttggctttatgattggatatttcttcattcatcccctatttattttgtgcctaccatgtattaggctcaag

SEQ ID NO: 668971 - DNA, 686 bp, Homo sapiens
ggcctcccaaagctctgggattacaggcgtgagccagcacgcccagcattttttcttccataaaaactatgtgcatatattactttaataatttaaacaaatagtaaagaacttaaaaatgaagagggtaggccaggcatggtggttcacatctgtaatcccagcactttgggaggctgggaggatgggaggatcgttggagcacaggagttcaagaccagcctgggcaatatggtgagaccctgtctctacaaaacatacacacacacacacatacacactagccaggtgtggtggtgtgcacgtgtagccccagctactcaggaggctgaggtgggagaatcacttgagcctgggaagtcaaggctgcggtgagctgtgatggtgccactgcactccagcctgagtaacacagtgagaccctgtctcagataaaataaaaygaaataaacagggttcatggcaacaggtcatagatagagattttcatttctgttttagagagctattagagacaaactaaacaatcccatattcaaattgacaaaatagacccaatgtttttaattactacagctatggtctaataacctcaggctcttcctgttcttgtttttggctttatgattggatatttcttcattcatcccctatttattttgtgcctaccatgtattaggctcaag

SEQ ID NO: 668972 - DNA, 613 bp, Homo sapiens
aagtgcataaattcttggtcaggaatgaggaactgtccttagaaaaatgggctagacatttaaaaaggaatcttgtagagcaccttggcctgttcagcagtttatgtttgtggttagtttttttctcttccaataatttgggtgggaatagtagttgctcatcttttgagattaatgttctaattatttgaatacaaatgttttctctcaraataattgggaaggaagtatgaaaacagaaaaggtcatcttttgaattcttaaagttttatgtcagagatcttcacatctttctagagaaggaaggttgtaaatcattcagcctactccgattctgaaatggggctttttaagtgtgcgtgcattcctgtatgttttatagaggaggagttggatgtgtgctcattcatcttactttttacctctttcccatcctctgtaaagatagtggagtgttttctgtaatcacagtgataatttgtctgcaggataggaatggtccgagcctggttttacctggatttgggtgaacagccctgtggtcttgctcactcggggctgcccattaggtagaatccatgggaagtgttaaaactgaggaacaaagtgtgcc

SEQ ID NO: 668973 - DNA, 613 bp, Homo sapiens
aagtgcataaattcttggtcaggaatgaggaactgtccttagaaaaatgggctagacatttaaaaaggaatcttgtagagcaccttggcctgttcagcagtttatgtttgtggttagtttttttctcttccaataatttgggtgggaatagtagttgctcatcttttgagattaatgttctaattatttgaatacaaatgttttctctcaaaataattgggaaggaagtatgaaaacagaaaaggtcatcttttgaattcttaaagttttatgtcagagatcttcacatctttctagagaaggaaggttgtaaatcattcagcctactccgattctgaaatggggctttttaagtgtgcgtgcattcctgtatgttttatagaggaggagttggatgtgtsctcattcatcttactttttacctctttcccatcctctgtaaagatagtggagtgttttctgtaatcacagtgataatttgtctgcaggataggaatggtccgagcctggttttacctggatttgggtgaacagccctgtggtcttgctcactcggggctgcccattaggtagaatccatgggaagtgttaaaactgaggaacaaagtgtgcc

SEQ ID NO: 668974 - DNA, 613 bp, Homo sapiens
tttgacaatttttggtttttggttctttgcactttcatatgattttagaatcagcttttcattttacatgtacacatgcacacacacacaaatgtttacmtagcttttcattaggatttaactgaaagtataaattaataagagagaattaattttttgtaatattgatctttcagtttacaaaaattatatatgtttcaatttaggcctttaaatatagtaatgatatataattacatataataatatattttataatatctacaataatatataatatataatatggaatatcttacaaatatgttaacattaatataatatataataaatataaaatatatgcattataatatttaaatatcattttatatataatataaaatactttatagaataaaatacataataatatataataatatattttgtgtaagaatcctgtatatttgtttagatttgcttctatctgtgtgatgtttcttgatgccattgtaagtgatagaatttaaaagttattttataattgctggtatccaataatattgtatctagagacattgctaatttcatgtttattctcatagcttacccataaatatttaagggaatt

SEQ ID NO: 668975 - DNA, 613 bp, Homo sapiens
tttgacaatttttggtttttggttctttgcactttcatatgattttagaatcagcttttcattttacatgtacacatgcacacacacacaaatgtttacatagcttttcattaggatttaactgaaagtataaattaataagagagaattaattttttgtaatattgatctttcagtttacaaaaattatatatgtttcaatttaggcctttaaatatagtaatgatatataattacatataataatatattttataatatctacaataatatataatatataatatggaatatcttacaaatatgttaacattaatataatatataataaatataaaatatatgcattataatatttaaatatcatttwatatataatataaaatactttatagaataaaatacataataatatataataatatattttgtgtaagaatcctgtatatttgtttagatttgcttctatctgtgtgatgtttcttgatgccattgtaagtgatagaatttaaaagttattttataattgctggtatccaataatattgtatctagagacattgctaatttcatgtttattctcatagcttacccataaatatttaagggaatt

SEQ ID NO: 668976 - DNA, 613 bp, Homo sapiens
tttgacaatttttggtttttggttctttgcactttcatatgattttagaatcagcttttcattttacatgtacacatgcacacacacacaaatgtttacatagcttttcattaggatttaactgaaagtataaattaataagagagaattaattttttgtaatattgatctttcagtttacaaaaattatatatgtttcaatttaggcctttaaatatagtaatgatatataattacatataataatatattttataatatctacaataatatataatatataatatggaatatcttacaaatatgttaacattaatataatatataataaatataaaatatatgcattataatatttaaatatcattttatatataatataaaatactttatagaataaaatacataataatatataataatatattttgtgtaagaatcctgtatatttgtttagatttgcttctatctgtgtgmtgtttcttgatgccattgtaagtgatagaatttaaaagttattttataattgctggtatccaataatattgtatctagagacattgctaatttcatgtttattctcatagcttacccataaatatttaagggaatt

SEQ ID NO: 668977 - DNA, 2546 bp, Homo sapiens
ttgttatcaaatgggttttggagtttaagtattatgtagcatatgttcaaatgacatggatatatagaaaagaaaatattgtaggtggtcaatcagattatggagctgtgtcaaaatgtaaatcaacacggggagattttcattgagaaagttttgccattcatgacaaaagaagctgaactaaagagtgtgcacagtgccacagtaaaatttgtaaattttataaagtctggtgcctggaattttagatttttcttattgtgatctgataacatagaaactggtttaaataaatattgaatgttaaaccctgatagttatcactgggaacaatttcaagaatgcttgaattatacaacaggttatcagtgtttctataagaaagaagtataaataagtagatgggattgcaagatattttctgatatccttgacatctttgatgacctcaatatatcygtgccaagatagaacatggttttcaatggaaaataagatcaaagagcaaaactaaaaagctttgaagaacagaatttctacagattgtcatgacatgttttgtaatttaacaaaaattttagatgaactctgtgatgatctttatgttgcatatctatgagaaattgttaataaacactatgaatctgatagactcctttgaaaaatatttgttatcaaaagaggatccaaggacaagaaatttaaggatgtagaactcatttctttcattgaaggataatttaaatttaagtatgattttaccaggacaatttgtttgaactagctactaatgcattgaaaatgaattatgaaattttagcgtactttgctttattttgggtaaaaagtttttttttaaaggtcttttgcttacagaagttgctttaaattttattaacttttccattcctttcaacaaacttctgaaagaccatgtagaggtttttgcgccaatcaaaagaacaaaaaacataaaaaggtttataggtatattactttttgttaatagcatgttgtgtattttaccttgactagatggattaacaaacaagaaagatgttcatgggtcatatagaaactttaaatatcagtgtttgttaaaaatttacatgtatgaatcaatatgggaaagaaaatttctattataagtttttagttactatcgaacaatgataaaatgttacaagtatgtatacacttctctatattgaccacctataagcgtaactgtcaaggaacgagctgcatacttgtaattctttttgtttctctatgttttgtttggctgaattacacttaattaaaagtaaatgtatttttattaagtaaagtcataaagttataacatcatttgtatgtctttaggtgtttatttgtttgtttgttttgagatggattctctgtcacccaggctgaagtgcagtggcgtgatctcggatgactgcaacctccatctcccgatttcaagcgattctcctgtctcagcttcctgagtagctgggactacaggtgcgtgccaccacacccgcctaatttttgtatttttaatagagacggagtttcaccatattggtcaggcttgtcttgaactcttgaccttgcaatccgtctgccgcggcctcccaaagtgctgggattacaggcatgagccaccgtgcctggccctgtctttagggttttttattattattattttaaaagaaaattctttttattattccactaattcctttgtattgtattttataaattatcagtccaaaatagatgggaaataaaagcaaaaataaaattaaaaacaataacaacaacaaaaaaatccccaaacagctttactttaatacagatggtttgagaaaataagtaaggcctttcttatcatggcatggcatttaattttagatctgacatctgattttgtcattgcactgtcaacagaaaaagtgaagggagaaggttctgaacagacccacccactaatctggctcacagtttctggctgaaactgactgttaacggcaaacgttacggcctaatatcgaagcacaagttctacctcaggccgggttcctcaacattcatcactgagagattcaggcaagagggagataagttcaagaggacagccattctcccaggtacctcagtgctggctgaaggctctcagccctcctgtggccattaactatccatgggacatatggaatatttgcactctctgggcctttctgtgtttgtctgtgccaattgttctagttactgtctgctgaactgatgttcggcatttgtcaaagatataatttattctggcaaagggggagatgaggaactggggacaaaaagaatgacagagtccaaccaagtaagacaacataatttactctcaggaactaagaatgtcaggtgtgattcctgcctttggtttttctaaattgcatcttctctgtaaagaaaatgattaaagacctgtgttggattctcttattctataatatttgcctaatcccccaaatagtcatactggaacctgtattactattggttcc

SEQ ID NO: 668978 - DNA, 635 bp, Homo sapiens
aatgtacattagagattatgtgcttctcagtttaaatatattgactccttttgaaggcaaaagagcaatgtttcggttgactacagtatttctcaccactggagtttcagaagaccgtggatgtgagtggtagttggcagaaccaaatatcatatcacatgttgttttctttcagattcctgtggtactatgacatgttcgcatttaaactaattcattgaaagtcaattctcccaaaattgagtctgtttaaagatttagttccctgataactagtctccctaaaatctaacacttcagaacatgtgaacacccatcatgaaaaatgattgttttatagtttgtggatgtgcttttaatgttttattcacctttgaatcttttcaggaatttttaatcagttgattaaaaaaatatttttcttcataatatcatgttctcattttatatttatctggcagtgatgttttgagatattattttgtgtttatgatctagaattgttttattcaaattaaaaatcctaaaaataaaattaagtttaataaaactacggcctagacattgcatttattaatttctrtcaacaaactatcaatgcctcatagaagcccctgaaaatttaacaaacacat

SEQ ID NO: 668979 - DNA, 663 bp, Homo sapiens
gtgactggatataagatcaatataataatgttaattgcatttttatataacagtaataataaactttttaaaaagtccttcttgacctgagggaagagaagagaaaggatccttaaatcagatgcaaaaagcattaacattccttgaaaattaggagcttctrttcatcaatggacaccctagagaaaattaaaagccaaaatacaacccaaaaaaagacattggtattacatacagccaacaaatattagcaccatgtatatataataatcttctatggactaatacgaagacaacaatataatagaaaaaggggaaagacgtaagaaggcattctaaagaatagaaaacaaatatcggtaataaacacatgaagcgctctacggtcagcaggtggcgaagccagccgggcttgtgtcctttccctcaggatggtgagtttcccccatcctcagtcaggtccagagatgccatccaggagccagggcctggagtcagaagccttaggaatctgcctggtgctctcttctactgtggctgagctggcacccaagctactagacagagtccttcccactcttacctcccctttccacaaaccaaggagtctcttcccatgaccaccactgccctaggcccatgacaagtactgcctggctacca

SEQ ID NO: 668980 - DNA, 663 bp, Homo sapiens
gtgactggatataagatcaatataataatgttaattgcatttttatataacagtaataataaactttttaaaaagtccttcttgacctgagggaagagaagagaaaggatccttaaatcagatgcaaaaagcattaacattccttgaaaattaggagcttctattcatcaatggacaccctagagaaaattaaaagccaaaatacaacccraaaaaagacattggtattacatacagccaacaaatattagcaccatgtatatataataatcttctatggactaatacgaagacaacaatataatagaaaaaggggaaagacgtaagaaggcattctaaagaatagaaaacaaatatcggtaataaacacatgaagcgctctacggtcagcaggtggcgaagccagccgggcttgtgtcctttccctcaggatggtgagtttcccccatcctcagtcaggtccagagatgccatccaggagccagggcctggagtcagaagccttaggaatctgcctggtgctctcttctactgtggctgagctggcacccaagctactagacagagtccttcccactcttacctcccctttccacaaaccaaggagtctcttcccatgaccaccactgccctaggcccatgacaagtactgcctggctacca

SEQ ID NO: 668981 - DNA, 1999 bp, Homo sapiens
ttagcttgagagagatgtaaaatgctagaatgataaattgggtgaggactgtggcaaattgtggagatgaaaattgagttgtttaatgaaatgtgtgactgagaaaagtaggtaggaaagggatcttgagaacagggtgttcttggcttgaatgaattcaaagaggatgtgccagagaaatagaaaatgggatatagggaaaggaaaactatgtatgtttccagttaatctgttacaaggtagagctgatctgggtactttttaatgagtcatagacatgcaaccaaggcttactgcttctaaagagaaatcctcattttttgaaaacggtagtgtctggaaaaataacttatcaatgtcagtcttaatttctttcatcagcccatcgatagaatgtgagaagagtcatttagcaatcatcttatcgctggtacagtgtctgctccactcattttgcacaggatcagataaaaggatgatgttttctttatctttgctttgccactttcttgcagctgaaagcttttcaggaagggggaagagcaagctgagaggttactaggttatgaaacattgttacagccaagccaggagcattgaatcaatttccaatatgtttcttatgtagctaaaacctatactctggcgatgttattgtttgattataaaagctggaggaatttgaagagagactttcatgccgtggtgataaaccgtctctgcctgtaactccattgtgtcagctcccaaacagaggggaaatatattttaaagtgagtttctgcccatttgaaaactcaggcctgagttctaccttcagaggccatttggaaggaatcctaagtgtacaagaacatatttggagtgggcattggccgccctgcttccaaatgaatgtgtcgcatttccaaagatgtcatttcccctcaccattgacccagtcaaaatgttttcctggtctcaaagtatttatctataattctgcttcaaaacatgtttaaataaatcagtccctttcctatacaacctaaatttttttttaaaagaacttattttctgggttttaattgagtcaggtttttctaaggagatttaaaactgttggagagacagggtaatatggtaatgaatgttggtggtggggcagggaggaatcaaaagcatagttttgggttctgtcaaaatgcttcatctctgtctctctgcgtgtctaactctcctcaaccacagagagaggttattctagatacactctaatgcttttccctggcccaagtttctgcaactttttgagggaggtaggtgtactacctgaacttcataatgtctgcccttttcaagttcccatttcctaaggctctgtggggagacaatgtttcagtcatcggacctaagtacactagaaaatttgcaaagcttatccagctatttctggacagaacttagaccttgttggtaatgttaccagcatgtatttgcctcaagttttgcatttttgagtgtgttttcattgattcctgcaacagtctcacagcctgggtgctatggtcacacaggcctcctccagttctccctttgccaaggaactgagcaagttcctgaacctctttgagccccaattcctcatctgccaaatggagataatactactaatgatagttaaagcattatggagagcattaaatgtgcttttgcatctgagtgtttgataccattccaggtgctagcaggaactcaagcatcgatcttcattattattatagttattattattattattattattattattttgccatttagcatttttttttytgagacagaatctcgctctgtcacccaggctggagtgtagcggcacgatctcggctcactgcacaccctccacctcccaggttcaagcgattctcctgccttagcctcctgagtagctgggattacaggcgcgcgccaccatgcccagctaatttttgtatttttagttgagacggggtttcac

SEQ ID NO: 668982 - DNA, 600 bp, Homo sapiens
gggattgcactttttggctagaatatcaaaggctttcaaggaaataattgagaagcattagattcttgcattaamagtaaaatttatttatataaattatttgaaaacactgtaattaaatttgagtttctaatgcattctggacataagtcctcattaaaagtttttttttcgtttaaaattggttgtctaacttttaagtaaagatatcttaatatgaaaattactttaaaaattaacttttatgacttggttataatttgagggttttcaatgccttgttgaatgggattcaaattatattgtggtaactattgtaggaaatttgggttgggttcaaaaggattagttttagtataactcaaatgactctagtaacaaaataaaagctacattttaaagagagaatatcgaaggcattctgaagaacacttatttttccaggtctgtagcagctaaagtggtgcattcagtaaaaaatctccttcctgcatcagaacatttgtattttattttaactataattgtgtgtgtgtgtgtgtgtgtgtgtgtgtgaagagagagagagagaaacttgaacgtggcaaagaatcaagccca

SEQ ID NO: 668983 - DNA, 620 bp, Homo sapiens
attttccagtcttgctggtgtaaacatttgttagacccaaacgtatgtgaatactcagcacattcccttctaatccttttgagtggctctttcaccagcctcaggtctcttcctcacatgtacacactgatcagtactcagctgattacaaaaggaggacttgctgaagatctccagaattctctctctgtacagccctctcctcttcagtattctgtcctgaaagtctagacacttcagattctcccaattgcaactcagttcttcaactcaaggaatccaccaggatctgactggaatgcctttcccctggtgttccccgaaaactccctcagtctagtaggctggggcagtattatggctcatctctcaaagatcactgtacattgaagcctagtggctactgccttaaaaaacatgayttcatatattttcagacagggttaaatctggcctcatgccatcttcccacctcccttactccataattgactttcaacttacaatctttcaactttaagatggtgcaaaagtgatacacattcagaagtggtaattcccactgaataacgacacacagacacacagacatacacactgagaatatgttttgtttacac

SEQ ID NO: 668984 - DNA, 461 bp, Homo sapiens
ccaccctgggtgacagagcaagattccgtcaaaacaaaacaaacaaacaaaaaaagattaaaytgtaaatttaaccactatctttactccttatattaaaagagataaaggaaaaaaaaacagtagttcacatattcacatatatagtggtatgctttagtactcacattagaataactttctttatctaccacccattccatgatactttgcccccagccacaatctcagttaatatcgtcctcacttgatgggaatgagccaaatcttcattgctgaaggtctgagtccttagtggagtagcctctttgggttgtctaagcttctaacaattattcccattgaactttagagcgcttcaggaaacctccttcattccagatataattctctctgtctccactatagagcagcaactcaacttctccttggtaatcaggatcaatcactgaaaaatcatg

SEQ ID NO: 668985 - DNA, 1749 bp, Homo sapiens
tccaaagagatttggcataaaaagtatttgtaatattttatatttaacttacttaaaaaagtaaagcctgagcctacatatgttttaaatctgacactgaattcaaatatgccaaaggagttattaaatggggaaatagagtttccagtgcaaataccacacttaagtgactttggtagttacatttttggcgctggtatcaagtcctacattgctgctgtggtaagacctgacagatcctactagcacctgtgagttggaaatcaaaaattaagtagaaggtaaagcagcaaagaatacaagaaaggtacctgaatcccttcatatatccttcagtgcttctcaaggcaaagaataaaactcaaactgtttagtatggcatgttttcatgacctgtcccctctctgcatttactatcttccatcgtttctcagtcctcaggacattcagctactgaaccatttcccttatagccgtatgcattcatacctcaagaccccccagccgaccctgttcattcatctacttagctaaaatggactccttaacctctccctgagagaacagctactcccacaaggactcctgtcattcactgtgcattcacctgtcacgctacctaacacaatcatgctttctcttctggctggtgaaagaagcaataatagtgttttctgtaaaattctcaagacacagtaagaagtgatttgaaaaaataaatcaatgaatgattaaatagacttcttcatataaaaatagaaacgttaatattatgtcatttttatttttttgagayggggtcttgctctgtaaccaaggctgtagtgcaggggtatgatctcacctcactgcaacctttacttcctgggctgaagcaatcctcccgtatcagcctcctcagtggctaggactatgagcacataccatcatgcctggctttttttttttttttttttttttttttttgaaaaaacagaatgttgccatgttgcccaggctggtctcgaactcctgagctcaggtgatccacccacctcagcctcccaaagtgctgggattacaggtgtgagccaccgtgcctggccctatgtgatatttaaatacaaaatgggttcaatatttactcaataatgaaatattgttttttatttcatcatgaattctttaattataaacctgaaggttcttttcttttctttccttttcttttcgttacttttctttttttgagagggagtctcactctgtcacccaggtggagtgcagtggcgcaatcttggctcactgcaacctctgcttcccaggttcaatttcccacctcagcctcttgagtagctgggactacaggcacgtgccaccactactggctaattttttgcatttttagtagagacggggtttcaccatgttggccaggctggtcttgaactcctgacctctggtgatctgcccacctgggcctcccaaagtgctgggattacaggtgtgagccaccatgcccaggctgaaggtacttttataaattgaaaaaatgggaaattatgactaaacttcactgggggcatgtacaggaaagtacagttcagaatgagagttagctataaatttacataataagaataactctgaaataatatttatttagcacttacgatgtgccagacattatactgcttggggaatagatacaaaggagagaacactgaaaacatgactttggagacattggcaatataccaggtgagaaaa

SEQ ID NO: 668986 - DNA, 585 bp, Homo sapiens
tgtgctgaggtcacacctttgctttcttaggaggatgtgaaagccactttgtccactctcccaggacatccacatcctcccctgtatctttaaacttgggataaggataaggataaatcagacttggttcattttaaagggagtttctggcaccagccattagtgtgggaagtgtgtgcctctacaatcacgctattgtgaatctcgtgtctttattgctgagtcaacatggagcatctgtaaagagcaggagtggggcaggagtggagggaagagccaaggttgttcttcacaaatccctaggcctgcacctcacctcaggctgccagaccagccctcttacttagagtttctgagtggatgattttatgtcccagtgtgaacccagaagtatccccagggccccattattaggtcccaggcccaacctcatgcctaatctcagtcctctattggcctaaaacgtcttgcacacatgcaggcatagcctttcttctaaatccctcagccctatatgcctccatccttaattagcgggaggcagaagatgcaggaaataggatrtgctgcccaagaagaggaagg

SEQ ID NO: 668987 - DNA, 619 bp, Homo sapiens
cgaataaaaccatgcaaaaatacttcatattggttagtgtaatgaagttaggttccaagttgagtttattgtaaccatatttttaatctatatatactattggtggagcctttgaaagatgcacagaatggggatcaattcattggtgtgcaacacagctctctatatagctggatgtctaatattcttggccctggttcatttttattgtgaagtccaaaaacatgccccaacaaaattgaaatactatatagaaaataccattcctattgagaagcatgagtgcaaaataaacagtccctaaaatagyaagtaagcactgggctcgtgtgtgtgtgtgtgtgtgtgtgacacagagagagagggaaagagagagaaggaggggagagaagagggagaaagaggaagaatggaatgggatgtggagaacagctagaagaaacctattaatctttctatcaatctccagatttggttagcacctggggcttcaaaaaaaagaaaagaaagaaaagaaaagacatttgctccatcagtatctccaactgcaccaaagggggaaattaccctttgacccctaaagccatttactaatgacctgcagtatcagattggatgg

SEQ ID NO: 668988 - DNA, 619 bp, Homo sapiens
cgaataaaaccatgcaaaaatacttcatattggttagtgtaatgaagttaggttccaagttgagtttattgtaaccatatttttaatctatatatactattggtggagcctttgaaagatgcacagaatggggatcaattcattggtgtgcaacacagctctctatatagctggatgtctaatattcttggccctggttcatttttattgtgaagtccaaaaacatgccccaacaaaattgaaatactatatagaaaataccattcctattgagaagcatgagtgcaaaataaacagtccctaaaatagcaagtaagcactgggctcgtgtgtgtgtgtgtgtgtgtgtgacacagagagagagrgaaagagagagaaggaggggagagaagagggagaaagaggaagaatggaatgggatgtggagaacagctagaagaaacctattaatctttctatcaatctccagatttggttagcacctggggcttcaaaaaaaagaaaagaaagaaaagaaaagacatttgctccatcagtatctccaactgcaccaaagggggaaattaccctttgacccctaaagccatttactaatgacctgcagtatcagattggatgg

SEQ ID NO: 668989 - DNA, 998 bp, Homo sapiens
tgtataaatgaatgttttaaattggaacaattactatagcatcaaaacgcacatttgatgagatgtgaaaatttattcttaagtatttatccatttctggttttgtagcaaaggcattattatacttctataacttgtctaatagaatcagatagaatcaagcaaagttggcagagcctaggcatctacctaaaagaaatgctctctcccatttccgtgaacacattaactcctcctgagttccagtggcactatttctggagtccttttcaaggcacataatcctaaagcaggtgtcacttgttactctctttcaaagcrtcttgctctttttcttcacagtacttttcaaaatatttaatatacacttatttcttatagaagttgcctacctcactggactttaagatctatgaggttaatcccatgtctgttttgttttctaccttattgcccctgctccccaggcacagagcaatatgtacctgacgtatatttggctctcaatacacatttgtcatatttgtgtgtgtgcttgttcaacttctctcactctgtttgtgtgtaggtgtgtactttcttgtcattttgggacacttaggaatttccttattttgcttcaagttcagctatgcattaaaactattttataaaaacttttttttttttttcagaaagagtttcactctgttgctcagtctggagtgcagtggtgtgatctcggctcactgtagcctctgcctcctggattcaaaccactctcctgcctcagcctcccaagtagctgggattacaggcaactgccaccatgctcagctaatttttgtatttttggtagagacagggtttcaccatgttgtccaggctgatatggaactattggggagtctgagatgggaggattcagctaccttggcctcccaaagtgctgggattacaggggtgagccactgcaccaggcttaacatgtttaggtgttttatatcagaagacatttt

SEQ ID NO: 668990 - DNA, 640 bp, Homo sapiens
cgccccgggcctgcggcttcatgcatgcgaggtcccgggtccctcccattccgcccccaacacccgcccctcagcccctacggcccgcacgcctccttcccgctgcctttccgtggccctggtttgggacacccagcccggccttcatgaggcgccccccacccagctccgcccctccacgcccctgtctttagtctcttaggcgttggccgccaccgccacagccctgggcctggcacccccagtcgcccgcagtctccttgtggtggcaccggcgtccccgctggagctgctggaggccaagcccaagcatgacagctgctcctggcctgggaaccgcaacaccgggcatacctatgyggctacggccagacctacagcaagaattctcccttgcaggcacatctgcgcagacacaagtgacaagcccgaccactgccactgggatggaagcagctggaagcgtggctcactcagacaagctaacgctccaccaccacaagcacaggggccactggcatttcagggccattggtgccaccacgccttcttgcgctctgcccaccttgccctgcacaggaagcggcacatgcagcccagaggcctccccacctgcacacggccccctcccaaactgtga

SEQ ID NO: 668991 - DNA, 640 bp, Homo sapiens
cgccccgggcctgcggcttcatgcatgcgaggtcccgggtccctcccattccgcccccaacacccgcccctcagcccctacggcccgcacgcctccttcccgctgcctttccgtggccctggtttgggacacccagcccggccttcatgaggcgccccccacccagctccgcccctccacgcccctgtctttagtctcttaggcgttggccgccaccgccacagccctgggcctggcacccccagtcgcccgcagtctccttgtggtggcaccggcgtccccgctggagctgctggaggccaagcccaagcatgacagctgctcctggcctgggaaccgcaacaccgggcatacctatgtggctacggccagacctacagcaagaattctcccttgcaggcacatctgcgcagacacaagtgacaagcccgaccactgccactgggatggaagcagctggaagcgtggctcactcagacaagctaacgctccaccaccacaagcacaggggccactggcatttcagggccattggtgccaccacgccttcttgcgctcygcccaccttgccctgcacaggaagcggcacatgcagcccagaggcctccccacctgcacacggccccctcccaaactgtga

SEQ ID NO: 668992 - DNA, 1624 bp, Homo sapiens
gataaaaaaaattctaagagaataaaaacaatttcatcctgcctccatattataaccagaataattgaaataatatgcttcaattgatagtaaagtagcatttatgtttttggatcaatgaagctaagccagcactaagaattttcttactattcctccactacattacagttacttcttcatccctatacataccgcaataatgagtcggctacatccatttagattatcaacccaaccctaaaagaaagaaaatttccattggttacacatttcagaaaattgttgtatctttggaacatctgccgtctaatcttaataaatttcaaacaagggcactgagactccagccgatagaactatctaattcagtatgattaagatcccaaagatcaatggcaaagcgttggctattttctgcagtttgtgcaagaattaaaatttggccaggattgttgtttgtagcaggagtcatgaatggttttgtggcgttttatgacaacttaagggctacaatggaccttgtccttatatcatgatctgctaagcaattcaccaaccatacttcacctcattcctgattttagcctccttaggagaacattgaaaacatgattggtaataatgtgtattgacttgcttaaagatgttacaggaaagattatgcttaagagtagttagagggaaatgtatttttcagtttgtttcctaagccctaagccgtctctttaccttacagtataaaagtcgaaatgcgtataatgggagaccagatatacgggaagagaagatgaagggactaatattcgttgagccttttagtagggatctaccttttactagagattgagcactcctcatacattgtctcattaaaccaactctccaaagtagtatctgtcctgttctaccgaaagaacaactcaaaaatgttgcattgccagtaagtggtggagctggaatgtatctgccctcaaagcttcacggacttgctttgaagaagatggtataattcaaagtactttcaaaaggacatagcagtatactgaggttaaaaaaaattagtattcccaaactgagatccttctgtgagctttgtaaccctggcagttagttgcaatactaccaatttggccatcaagaacattctgatatgtttaagctacagtgggaaagccaagatatgaaaacatcacccatgggaattttgagactagagtagttagaagctaatttaagatctccatccaactctaagatagggtaactgccagaagagccgcatgatcccaaagtggaattttgccctagtataatgggttaatatttgattggctgcacttaactataaatcctgaggagaagaagaagaagaaagacatcagaaaataattgggctagaagaaccttagtttgaaagcaaaacacagaatccaggtaagtgggcttaccaggaaaagctggtgccacgttgctccgcacaatgcagggccttaggatggcaatggttaggttcctgctctcctgctgcaccaccatttctcccaaggccttgctayaggtctaagtattgggacaatctccaatccgcttgggagtgatctcgtcaataatggcgttgtct

SEQ ID NO: 668993 - DNA, 2009 bp, Homo sapiens
tcaatgttatctcactatgatgatggttacctgtcactgaaaaagtaagaaaaggtgatattactattttggctgatatacttgattttgattatcaatgaaaaatagaattgctattttaataatggggggcaaagatgggagaatatatattggctgcctcccaataaattctatatccagtaaagttcaaaaaaaaaaaaaagagagaaaaaaagaaagaaagaaagcctatggcagccaaatagtagcagaactaccaaagaaccagaggccttactagtaaaagttttggtcttcctagcaggtaaagagcccaatgtgattacttgcttactgaaaaatagggagcattaaatacgtataagaggagattagacatgacaactacacattatgtagagttgcagatatgaattttagtagctacctatatttactttcttaaatgtatatcaagtttcattcatctatttactatacacttactattttctttactagttcatagtcatagtcaactataattttttttttcactctgttaaggtagaattagaaataagcagaggaatggcatcatctagagatgaatgtcatgcccattgaaggactaccattcgtggaaaaggtaagcatgtttttgcttgtgtggcagagttatgttgcacggaagcatgttgtttggaagtttaaatatatgtagaaggttagtaaggaagctttaagataaaagcaagggaaatggataactgtcaattggtacacagccattccaaactcttgctaaaagatgtctctcttctacagaatttacatgattaaaaatcaccatttctcagatacccagatatgaaagttctacatcaaagttaactttcttaatttgtgtagtatatgagagacagaaggaaagtagaaattccttcttcttgatgctgtagatataccaatgttgaaaattttcaggatcaacattccaggttgttattaagtttttctaaagaaaaatctgcacttagtttagataactgtacttagatatttagcaactgagtacagattttgaaagtcctttaattattttcatggttatccagagaatgttgaggtagaagcaacagtggctttttggtgctctgatctctttgtgacttttgaacccatgtagaccacatgcctgtctccatgttttccactttcttgactatggaagtggaaggtgtgatcctggtggacctgtctgataatctttttctgggacccattccttaaggtccttctgataaccattgccctagccatttaatttctaagcactccagtttttagwtgaaatttctgaatgctaagagcagaatgctgtctattctctaaaaccgaaaactacatgtttaataaagcatatttgtacctacatgtagtaaaataacagttttacacataattgctgtaaaaacttttcttcagttggaggaaaaaaaaaagcatgcaggacttaactacttgttgaatctttctttacaaatctgaatgatttacccaaatcagagagttacaaatagaagagcttttctctccaagttgatctgaaagctttaagaattttatgagtataattttttgatactgttactgtttatacagaatgagttgaaattgaaacaagaactgaaatatgtgcacattatattacaatgtataaaaggagcttttaatagtagaaataaaaatccaaagtcctttaattgaaccaactaatatgagaagcagaagaaagaaatatactcagcaggtaataaaaatggcaaacaagatattttaaattcacagatttgggcacatatagaaagtgtaaactaccatggtctgtgacatagcctcaggaagtcctgagaacatgtgcccaaggtagctgggttacaacttgattttatacattttagggagacaacagttacaggcaaagacataaatcaatgcatgtaaggtatacattggcttggccc

SEQ ID NO: 668994 - DNA, 598 bp, Homo sapiens
tctcagggattttcatgaatataatacattgtgattaaatatggtcaccaagttgtacagtatagctctgaaactaattctttctaactgaaattttgtattctttggccaacaactttccactcaccctccacagacccagcctctggtatccactattttactttccaaaatttttctataactccaacttttttagattctacatataagcaatatcatgtggaatttgtctttattctctggcttttagtgagaaaagttcatcctcaaaattcatgggcatattgccctgtcattaccactaaggaaggcacaagaggaaatagctgtcctctagtgtagcaaagccattcttagaagcatgcaatcaccactccaataaggcctgatgcatttcattttcctctgccaccaccacscatattgaatctgtgagctctttggaggcaaggattatgtcttcttcaccattatattctcagcatctgattctgtaacagatactgaagtctcctgtgccccaagtcttgttgaactccaaatcatcaggaaaaggaaaccagaaagaagaaaaccagtggtttgtttttgtttt

SEQ ID NO: 668995 - DNA, 1365 bp, Homo sapiens
gattattcttatagatagcctttacaaactgatgaaggagaagttgattttggtgtattgtgtgattgactattttgcaactactaactgaaagattttaattataaagaaaatatgatataatggctaatattttatactttgtgtgtgcccaagcactactctgagtgctttcatatgttaacttgtttaaaatatgcagtgacttggaaagatcagtactattattattgccatcttagagatgataaaaccgatacagagataggcttagtaatttgcccaaaactttcctagtgtggatttgtggtgacacaactaaaaatgagagagccaggatttgacaccagacaggtcgcctccagagctggtgttatcacacaatactctgcttttctaagtgaataaaaagaaaagactacaaaactatgcatgatataactattttataaatatgtgttaatatttgcgtatattttaaagttacacaatttaattcatgtgtaaactttttatctaattacacagtcatagaaaagacagatggcattttgacattttccaacagtggttacttccctctagtgggattttgggtaaatgttgttttgaacttaaaatttctgtattttccaagttattaatattataatcatataaccattatataatcacaaaatagtgtttttaaagttacacatttcaaagttgctttgctgtcttgaagtgcatcatttatattttagtacacttttgaagtatcagtcagtgtttgagttcccattctctgctaggtaccaagctaactggtgtcccctagttctttatcttaagcaaaagcaatgttgtacaattttagagccaaaaggaatcttagaaacycttccgtttctcagatgagggtcctgaagctattacagatttaactgacttacccaagattcactgacagtaggtttttaaccaggcttcgaatccaggtttgaagactaaggtcttctgactttagatactgttctctatgaagcaccagagctctccaagacctcaatcaggtgggaactgtagcacagtggattttttgtgacattgttttgaagtggggaagtataactagactggttacaaatgtattctttcacagcaattgaaaacataatgggaaggttctcagagatactgttatgccacctctggaggtcagtgaaagatcctcacccagatttggaagatccctaagtattgctgagccccacttgtagaaggcgatacaaaagctggagggaacacagcagtggaaagaatattaaccagaaacagtagtttcaatagatggcttttctaaaacagacaaactttctcttt

SEQ ID NO: 668996 - DNA, 1147 bp, Homo sapiens
aaatggtaatagtaatagcaaacaattattgactacttcccaggcactttctgtgtactttacctgtattaacccatttaatcttcccaccaggttccttgaggtagtcttattatttcattttacagatggaacacttgggcaccagtgaggttactcatgatctgaagactagagagtggaaaagctgagatttctgactcagaaaactgccctaaccaccaagcttcaccacctctctagtgtcacaggggagttcaccccaatggagtgacttgagggttcctgaaaggtttttatttttttttaaatgtctttttccactgggctttgagtaaagctatggccttagaaaaagatgcctaccaaaatggaaatgccaacccatgagcacccatttccccaccaaaccaggtttttttttcgttttttttttttttttttttttttttttagcttatttgcagttaaaaactctgagggcatgagacatataaacttttcatggggagaaaatcactgggtgatttctgggaggccaatacatgtatggcatctggggacagtatcaggagtcttaggctgagaagtaagaaaactttttgttttttcctttttgactgagatgggatcaaggatgtgagggaaagggaaaaagatgtgttaaaggcagctctgtctagggcctgtccatagattgaaacattatttctttttcttttcttttcttttcttttttttttgaaacagagtttcgctcttgttgcccaggctggagygcagtggctcaatctcggcttactgcaatctccgcctcccgcgttcaagtgattctcctgcctcagcctcccacgtagctgggattacaggcacccaccaccacgcccagcaaaatttttttttttttttgtatttttagtggagatggggttttaccatgttggccaggctgctcttgaactcctgatctcaggtgatccacccaccttggcctcccaaagtgctgggattacaggtgtgagccactgtgcctggcctgaaaactatttctttcttcttctgtttttttttttttttttagagacagagtctcctatgttccccaggctgatctcgaatgctggcccaggctggagttcagtagcat

SEQ ID NO: 668997 - DNA, 1147 bp, Homo sapiens
aaatggtaatagtaatagcaaacaattattgactacttcccaggcactttctgtgtactttacctgtattaacccatttaatcttcccaccaggttccttgaggtagtcttattatttcattttacagatggaacacttgggcaccagtgaggttactcatgatctgaagactagagagtggaaaagctgagatttctgactcagaaaactgccctaaccaccaagcttcaccacctctctagtgtcacaggggagttcaccccaatggagtgacttgagggttcctgaaaggtttttatttttttttaaatgtctttttccactgggctttgagtaaagctatggccttagaaaaagatgcctaccaaaatggaaatgccaacccatgagcacccatttccccaccaaaccaggtttttttttcgttttttttttttttttttttttttttttagcttatttgcagttaaaaactctgagggcatgagacatataaacttttcatggggagaaaatcactgggtgatttctgggaggccaatacatgtatggcatctggggacagtatcaggagtcttaggctgagaagtaagaaaactttttgttttttcctttttgactgagatgggatcaaggatgtgagggaaagggaaaaagatgtgttaaaggcagctctgtctagggcctgtccatagattgaaacattatttctttttcttttcttttcttttcttttttttttgaaacagagtttcgctcttgttgcccaggctggagcgcagtggctcaatctcggcttactgcaatctccgcctcccgcgttcaagtgattctcctgcctcagcctcccacgtagctgggattacaggcacccaccaccacgcccagcaaaatttttttttttttttgkatttttagtggagatggggttttaccatgttggccaggctgctcttgaactcctgatctcaggtgatccacccaccttggcctcccaaagtgctgggattacaggtgtgagccactgtgcctggcctgaaaactatttctttcttcttctgtttttttttttttttttagagacagagtctcctatgttccccaggctgatctcgaatgctggcccaggctggagttcagtagcat

SEQ ID NO: 668998 - DNA, 1147 bp, Homo sapiens
aaatggtaatagtaatagcaaacaattattgactacttcccaggcactttctgtgtactttacctgtattaacccatttaatcttcccaccaggttccttgaggtagtcttattatttcattttacagatggaacacttgggcaccagtgaggttactcatgatctgaagactagagagtggaaaagctgagatttctgactcagaaaactgccctaaccaccaagcttcaccacctctctagtgtcacaggggagttcaccccaatggagtgacttgagggttcctgaaaggtttttatttttttttaaatgtctttttccactgggctttgagtaaagctatggccttagaaaaagatgcctaccaaaatggaaatgccaacccatgagcacccatttccccaccaaaccaggtttttttttcgttttttttttttttttttttttttttttagcttatttgcagttaaaaactctgagggcatgagacatataaacttttcatggggagaaaatcactgggtgatttctgggaggccaatacatgtatggcatctggggacagtatcaggagtcttaggctgagaagtaagaaaactttttgttttttcctttttgactgagatgggatcaaggatgtgagggaaagggaaaaagatgtgttaaaggcagctctgtctagggcctgtccatagattgaaacattatttctttttcttttcttttcttttcttttttttttgaaacagagtttcgctcttgttgcccaggctggagcgcagtggctcaatctcggcttactgcaatctccgcctcccgcgttcaagtgattctcctgcctcagcctcccacgtagctgggattacaggcacccaccaccacgcccagcaaaatttttttttttttttgtatttttagtggagatgggkttttaccatgttggccaggctgctcttgaactcctgatctcaggtgatccacccaccttggcctcccaaagtgctgggattacaggtgtgagccactgtgcctggcctgaaaactatttctttcttcttctgtttttttttttttttttagagacagagtctcctatgttccccaggctgatctcgaatgctggcccaggctggagttcagtagcat

SEQ ID NO: 668999 - DNA, 2175 bp, Homo sapiens
acttaaatagatccttttgtatataatttttagttgctgcctcatactgtattttatgtctgtaccattgttgaactatcctccattgttgaatagctagatttttttttttgctattaacataatgtggcaatttatctttgaacggttttttattgtcagagagcaaaaggatgtttaacagctggaaggtaggaggatagatagagtgacaagagtttaggttctgcaatgagaagacattgcttcaagtcccaactctgccacttactagccatgtgaccttaagccattcagctcaacctctttgcctcagtatcctcatctgcaatatgagaataacaatacttacctggcaggatagcacaggagattaactgaagaaatacatgtgaaagtacctttcaactgtacctcactctgagagagaagggggaaaaaaacatgatcttccatttactgtgaatctctcatatgccaggcactttcctgcgttttacgtgctttattgcatttgatcctcatggcaaacctgtaaggcaggggctatttttttattacccacatgttacacagaagggaaatgagacatgtggataatctaccccatcatgggcacaacggtagaagcggcagcacagagattcagacccgggtctgcgggacacaccccaggctctgaggtggatacaatgcagaagagaagcacactccccagtgtggcaggaggccagttctagagccttccagacccagctccccgggagatgaatcaccagctagggacaatcccgaggccaaaaagctcatgatagcctgctcacagtcttgaatcaataggtcttttattagtctttaaaatggggaccacaatctttatatgtatacaatattcgtgcattccagagctctttcccatccattctctcactgttctgacaatagctctgtgctgtgggtggggcaggaatcagcttgtgaagcatcatcctatatgttaggacagggaagactggaactctggatgcctggtcccaaatcatttgaaatttgaataatcccagcttattggaaaaggaatcctgtcttttctacttggtatctgtgtagctttgggtaactcatttcatttctcagattttcagtttcttcatctcttaaaagagaccaaaagcaggaataatgtttatgtcaaggattgtcctaaaatccaaatgaagtcatggaggatattaaaaatgcctaccactgtgtccctcccacctctaaggcagtgtacccactccagccacccagcccatagtgtgctatggtctacaccagatgcccccttcccactccactgtgggtgattggactgaggtgggcaatgagctcaaagagtagttcactggccttaaaggaattcatcaaatactgaactgaatcaccttgattcttttgagattttttttcactgataattgaatttttaattctacttagttttaattaattttaatttaatagccacatggagctaatggtgaccataatgtacagctcaaggctataagtttattctctggggaaagtaaaacagaagtcaaagaacaytaaaaaattgagagcttttcttatggggaaaattggcacactaaagataccacggacccagagaaaggccaaaaaatatatatatgagggaaagaaatggtaatgcctggaggggcccgtgttagtagaattcaatatgaaagtattaaagagcacttctggtactataaggaatgaaatattatgaaatgcttagtgctataaaataaagacaacctgacaaagtatacttttaattttattcctgggcttgcaagaagttatgtaccacttatgcactaccaccttcacccccaacaaagacctgaacacacagcaataagtgctaagcataggtgaaaggcagggttgccctgctggcaaatgctgatgttaaaactgcaatcaaaagccagctaacaagatagagagattaagcctagggtcccagcagtgggctaaagtttctataggtgggtaaccctctggctctcaacaaaaacaaatctctctggagaaaagcttcctcaatttgggtccttagatttccgtggattaagcaacaatatatgagcactcaataaaatatgatcaatgaaa

SEQ ID NO: 669000 - DNA, 2175 bp, Homo sapiens
acttaaatagatccttttgtatataatttttagttgctgcctcatactgtattttatgtctgtaccattgttgaactatcctccattgttgaatagctagatttttttttttgctattaacataatgtggcaatttatctttgaacggttttttattgtcagagagcaaaaggatgtttaacagctggaaggtaggaggatagatagagtgacaagagtttaggttctgcaatgagaagacattgcttcaagtcccaactctgccacttactagccatgtgaccttaagccattcagctcaacctctttgcctcagtatcctcatctgcaatatgagaataacaatacttacctggcaggatagcacaggagattaactgaagaaatacatgtgaaagtacctttcaactgtacctcactctgagagagaagggggaaaaaaacatgatcttccatttactgtgaatctctcatatgccaggcactttcctgcgttttacgtgctttattgcatttgatcctcatggcaaacctgtaaggcaggggctatttttttattacccacatgttacacagaagggaaatgagacatgtggataatctaccccatcatgggcacaacggtagaagcggcagcacagagattcagacccgggtctgcgggacacaccccaggctctgaggtggatacaatgcagaagagaagcacactccccagtgtggcaggaggccagttctagagccttccagacccagctccccgggagatgaatcaccagctagggacaatcccgaggccaaaaagctcatgatagcctgctcacagtcttgaatcaataggtcttttattagtctttaaaatggggaccacaatctttatatgtatacaatattcgtgcattccagagctctttcccatccattctctcactgttctgacaatagctctgtgctgtgggtggggcaggaatcagcttgtgaagcatcatcctatatgttaggacagggaagactggaactctggatgcctggtcccaaatcatttgaaatttgaataatcccagcttattggaaaaggaatcctgtcttttctacttggtatctgtgtagctttgggtaactcatttcatttctcagattttcagtttcttcatctcttaaaagagaccaaaagcaggaataatgtttatgtcaaggattgtcctaaaatccaaatgaagtcatggaggatattaaaaatgcctaccactgtgtccctcccacctctaaggcagtgtacccactccagccacccagcccatagtgtgctatggtctacaccagatgcccccttcccactccactgtgggtgattggactgaggtgggcaatgagctcaaagagtagttcactggccttaaaggaattcatcaaatactgaactgaatcaccttgattcttttgagattttttttcactgataattgaatttttaattctacttagttttaattaattttaatttaatagccacatggagctaatggtgaccataatgtacagctcaaggctataagtttattctctggggaaagtaaaacagaagtcaaagaacattaaaaaattgagagcttttcttatggggaaaattggcacactaaagataccacggacccagagaaaggccaaaaaatatatatatgagggaaagaaatggtaatgcctggaggggcccgtgttagtagaattcaatatgaaagtattaaagagcacttctggtactataaggaatgaaatattatgaaatgcttagtgctataaaataaagacaacctgacaaagtatacttttaattttattcctgggcttgcaagaagttatgtaccacttatgcactaccaccttcacccccaacaaagacctgaacacacagcaataagtgctaagcataggtgaaaggcagggttgccctgctggcaaatgctgatgttaaaactgcaatcaaaagccagctaacaagatagagagattaagcctagggtcccagcagtgggctaaagtttctatagktgggtaaccctctggctctcaacaaaaacaaatctctctggagaaaagcttcctcaatttgggtccttagatttccgtggattaagcaacaatatatgagcactcaataaaatatgatcaatgaaa

SEQ ID NO: 669001 - DNA, 1087 bp, Homo sapiens
ctcctggccaagtctgtttttcatatgatccaagcactttggcaggtgttagggctgtaaaagggatggcatgggacccccttgggtaggggacgtggcagacacatctcttagaaatattgccgcaagcctcactgttcaagtctggtgtgtggagcagctgcatcagcacctccagggagcatgttagaaatgcatcatctcaggcccttcccaagcccttctgagtaagaaactgcactttacaatatgctcccaggtgaactgtccgcagggaaargcttgaaaagccttgctacaggacagcaaatcccacaagctgtcctacagtgaaagggagcagaacgataatgtgcatttgagaaagagtacatcccatgcctcagatttagaaaggtggcgtgttcaagactgagatctcctcagaaagaaacatgcttaaaaatccaatgctactcaactgtatttgatggctcaacaacaaatcaccgactgtaatcactcaacagaaccagcatcctgtgaaacacaccttgagaaaccagtagtggaccttctggcattcccggattcaactttcttggcttcaatgactgcagatggagtgagcccatggggtgataactggcagttttgctgaggaacaaatctgaatcatgcctactgccaggctgaggctctgggccaaggtctcagcttgggatagggtgaggatcagaaggctggaaagatagagggactcggagactgccagctactggttaacttgtggcataaggaggatatatacagaaaacactggattctatagctgaaatatgtcatttggagaaatttaggagccaatataagcattccttatttgtcatttcatgggctatatatattccacaggtgtcaagaatctataatgatgatgatgatggcaaagacaatgatagatacctttttaaaacttactatatgccaagcactgtcctaattcatatgttcccaacagcaatgctaagtggtataatcctcatttctgcagatgagaaattgaggcacagagctggctcctcgttttaatccgtttcatgctaaa

SEQ ID NO: 669002 - DNA, 613 bp, Homo sapiens
ggaggggaacttctttttggttcgagtgtgctgggatagcttcaggatgacgttgctgagctgaaatgggagggaagtcagagacctcgagtggttgaagaaagctagatttctggttaactcacaggtgacacaactgaggttcagagaggaaacggaatttgtctgaggccacatatcttgttcaaattacagttgtgctaaaatccaggtcttggggctctcaggtccccaagtccccagctgcatggccgaggcagccagcagatacctgcggctagcatgtcctggcttgacatgcgcacctggacaaagctgtgttccagcttttgtctgcctctgtcactccccaggctcttgcctggacttcccggccctgtcgccagcttgtttacaaggccccctggaagctcccctggctcagtggctgagggcagggtgcrtggctggccttgtggtccccatgctgggacacagtgggcacttgtctccatcgtctgacagcagcccccgaaggagcacgaggatctatctggccctctttctggctgctcccctgcccctctggctgggaattcaacaccatttccaaaagaaaatggccttgagtttc

SEQ ID NO: 669003 - DNA, 613 bp, Homo sapiens
ggaggggaacttctttttggttcgagtgtgctgggatagcttcaggatgacgttgctgagctgaaatgggagggaagtcagagacctcgagtggttgaagaaagctagatttctggttaactcacaggtgacacaactgaggttcagagaggaaacggaatttgtctgaggccacatatcttgttcaaattacagttgtgctaaaatccaggtcttggggctctcaggtccccaagtccccagctgcatggccgaggcagccagcagatacctgcggctagcatgtcctggcttgacatgcgcacctggacaaagctgtgttccagcttttgtctgcctctgtcactccccaggctcttgcctggacttcccggccctgtcgccagcttgtttacaaggccccctggaagctcccctggctcagtggctgagggcagggtgcgtggctggccttgtggtccccatgctgggacacagtgggcacttgtctccrtcgtctgacagcagcccccgaaggagcacgaggatctatctggccctctttctggctgctcccctgcccctctggctgggaattcaacaccatttccaaaagaaaatggccttgagtttc

SEQ ID NO: 669004 - DNA, 613 bp, Homo sapiens
ggaggggaacttctttttggttcgagtgtgctgggatagcttcaggatgacgttgctgagctgaaatgggagggaagtcagagacctcgagtggttgaagaaagctagatttctggttaactcacaggtgacacaactgaggttcagagaggaaacggaatttgtctgaggccacatatcttgttcaaattacagttgtgctaaaatccaggtcttggggctctcaggtccccaagtccccagctgcatggccgaggcagccagcagatacctgcggctagcatgtcctggcttgacatgcgcacctggacaaagctgtgttccagcttttgtctgcctctgtcactccccaggctcttgcctggacttcccggccctgtcgccagcttgtttacaaggccccctggaagctcccctggctcagtggctgagggcagggtgcgtggctggccttgtggtccccatgctgggacacagtgggcacttgtctccatcgtctgacagcagcccccgaaggagcacgaggatctatctggccctctttctggctgctcccctgcccctctggctgggaattcarcaccatttccaaaagaaaatggccttgagtttc

SEQ ID NO: 669005 - DNA, 658 bp, Homo sapiens
taacacagaaaattcttctgtatcttagctttaagaagtaaaataaggatgggcgtggtggctcacacctgtaatcccaacactttgggaagccaaggtgagcagatcacctgagatcaggagtttgagaccagcctggccaacatggtgaaacactgtctctactaaaaatacaaaaattagctgggcgtggtggcaggtgcctgtaatcccagctactggggaagctgaggcagaatcacttgaacctgggaggcagaggttgcagtgagccaagacaacactattgcactccagcctgggcaacaagagtgaaactccttctcaaaaaaaaaaaaaaawaaaaaataaaacaataccagtacaggggaaggcatctgtttctattttttggctgtatcccccgcatcctatcatgagtaaccacaatcttgaatttgtgcttatcacttccatgcattttttttcttttactacttaaatatatattactaagcaaaatgtactttctcatgttatacacagaaatatacatacacgtgcacatatatagacacatacatataacattgtcttcctttgtgacttactcttttttacctaatattaagtttgtgagagtcatccatttgatgcagataacaccaatacattcttt

SEQ ID NO: 669006 - DNA, 1070 bp, Homo sapiens
taagggaaatccgcctatataaaatttttgtgaaggtgtctctcccagggtttgacytggactgggacttggcgacagaaatacaagttgtgttccaataacatcagaggctgattcttggctgtctagtaagcccaagtcccatctgaagtctgaggtgatttccatgtcactgcggcattgagctatcagctaccttcatcattgctgactgagcccatagtcgagtgcctggagaccttccttcaaaatgcccctcaccataaagtgggctggcagaatatctctggctgccagtacaatactgatgttcaaggccaacagctgtgcaggcactgtctgtctgaatgcctctcttgcaacttcatttcttctcagtctgtttcatggaggaatggagcaatatttcacaacagctcagagttttcaactggagcagctaggattgttgcatcataattcaaacaagcaagaatgacactaaacaatcatatttatggtatatgaccaaattatacagacacacttctatgtttgtccatcaagatgtttctctcttctatatgttgtttcaaggcttacacccactgggatcctgtattagtccattttcacactgctataaagaactacctgagactgggtcatttttaaagaaaagaggttaaattgactcacagttccatatggctggggaggcctcaggaaacttacaatcatggcggaaggtgaagaggaagcaaggcacgtcttacatggcagcaggaaagagtggggaactgctacatacttttaaaccatcagatcttgtgagaactcactcactatcacaagaacagcatgggggaaactgcccccataatccaatcacctcccaccaggtccctccctcaactcgtggggattataattcaagatgagatgggggcacagagacaaactatatcagatcctgatattccactcatatacagttcaacagttcagttcaacaaatttccttggaatgaatcctctgtgtcagtcatttgctgggcactgagaatagagtgacaaatgagacaccatgc

SEQ ID NO: 669007 - DNA, 664 bp, Homo sapiens
ttcttaactgcacataattgtataagcacaagcatttcctgggcatctgttctctgtcaggcactgaactgaaggatgaaaatacaaagacacggatttgtactggagttgyccacactccacgagaaggatgattttagagtcaaggattgacaatgggttagacagggaagtttgcagcatagacaaaccatttaaagttgcttgtggggaacagctgaatccccaacaagccatagctagatgcatctgtcaggcacagagttggctacagagggcactgcatgggcttataaccttgggcttattcccaggattcctgaatctctcctccttgcctaagactagtgtccctctcctgattgcattgttttgattgactgcttagtttccttctgccatgtagcttacatattgttcacatttcaagttccatgtggcaggttcttgtctttcggattttactatttgcaatgttcagtctacatgtgtgatgtcctttgtaaaccatgaatgttaatcagagtttaggtgtcagccacaacaaattttgagatgacaatgtctaaatcctaaaaacgtttgaaaccagaatgcaaaaccattgtcctcaccactctctataatttccattaattgctctaatatgctggttcctcttttt

SEQ ID NO: 669008 - DNA, 664 bp, Homo sapiens
ttcttaactgcacataattgtataagcacaagcatttcctgggcatctgttctctgtcaggcactgaactgaaggatgaaaatacaaagacacggatttgtactggagttgtccacactccacgagaaggatgattttagagtcaaggattgacaatgggttagacagggaagtttgcarcatagacaaaccatttaaagttgcttgtggggaacagctgaatccccaacaagccatagctagatgcatctgtcaggcacagagttggctacagagggcactgcatgggcttataaccttgggcttattcccaggattcctgaatctctcctccttgcctaagactagtgtccctctcctgattgcattgttttgattgactgcttagtttccttctgccatgtagcttacatattgttcacatttcaagttccatgtggcaggttcttgtctttcggattttactatttgcaatgttcagtctacatgtgtgatgtcctttgtaaaccatgaatgttaatcagagtttaggtgtcagccacaacaaattttgagatgacaatgtctaaatcctaaaaacgtttgaaaccagaatgcaaaaccattgtcctcaccactctctataatttccattaattgctctaatatgctggttcctcttttt

SEQ ID NO: 669009 - DNA, 664 bp, Homo sapiens
ttcttaactgcacataattgtataagcacaagcatttcctgggcatctgttctctgtcaggcactgaactgaaggatgaaaatacaaagacacggatttgtactggagttgtccacactccacgagaaggatgattttagagtcaaggattgacaatgggttagacagggaagtttgcagcatagacaaaccatttraagttgcttgtggggaacagctgaatccccaacaagccatagctagatgcatctgtcaggcacagagttggctacagagggcactgcatgggcttataaccttgggcttattcccaggattcctgaatctctcctccttgcctaagactagtgtccctctcctgattgcattgttttgattgactgcttagtttccttctgccatgtagcttacatattgttcacatttcaagttccatgtggcaggttcttgtctttcggattttactatttgcaatgttcagtctacatgtgtgatgtcctttgtaaaccatgaatgttaatcagagtttaggtgtcagccacaacaaattttgagatgacaatgtctaaatcctaaaaacgtttgaaaccagaatgcaaaaccattgtcctcaccactctctataatttccattaattgctctaatatgctggttcctcttttt

SEQ ID NO: 669010 - DNA, 651 bp, Homo sapiens
tggaagggctgaggatcactgtcttgcttcatgctgcacccctggctttcttcctcttccctgctctcctgacatgtacatactcttgctgcttcaatgatataatgctttgctttaaggtttgcttatcttcgcctgtgaaaccacaggtgaagaattataaactaagggttttagccatgtattcaagaagggatttggcaaacaaatggttcccatgaacacactgacatggtgtctttctggattgtcaccactcacagagctggaaaggagccagagaacagccttctggagtatgctattggggtcctgggcraagccagctgtttgcaatgttactcccgcttgatgaatttctctcaggggcaggactgggatgcagaaactgtggattagtaccccaaccaccatgtatgtgccctgtgaccttgatgacatcagctcaaatgggcttcatttctaccaacacacaggagcattttaatgaaatcacatgcatttatgcagataacagctaccatttaaaactaccacttatcagatagtcactatgtgccaagcattagattaggacatttacatatttgatttaatttaatcttcatgatagctttgaaaattagttattatgcagcttgcccagagtca

SEQ ID NO: 669011 - DNA, 651 bp, Homo sapiens
tggaagggctgaggatcactgtcttgcttcatgctgcacccctggctttcttcctcttccctgctctcctgacatgtacatactcttgctgcttcaatgatataatgctttgctttaaggtttgcttatcttcgcctgtgaaaccacaggtgaagaattataaactaagggttttagccatgtattcaagaagggatttggcaaacaaatggttcccatgaacacactgacatggtgtctttctggattgtcaccactcacagagctggaaaggagccagagaacagccttctggagtatgctattggggtcctgggcgaagccagytgtttgcaatgttactcccgcttgatgaatttctctcaggggcaggactgggatgcagaaactgtggattagtaccccaaccaccatgtatgtgccctgtgaccttgatgacatcagctcaaatgggcttcatttctaccaacacacaggagcattttaatgaaatcacatgcatttatgcagataacagctaccatttaaaactaccacttatcagatagtcactatgtgccaagcattagattaggacatttacatatttgatttaatttaatcttcatgatagctttgaaaattagttattatgcagcttgcccagagtca

SEQ ID NO: 669012 - DNA, 643 bp, Homo sapiens
attaactgtgtattctgaaagaatccagaaaatagtacatgcatcagaggcttctatggtataaagattactttgcttattttggttgttcagttccttatttacacttacttgtttaatgtctgtttctcccttaggctataaataccacaagagggaacaactatgtcttttttattctcagctgcatcccttgcaccaagcattccctgcacctagcatctttactaagcactaaataaatatttattgactgatttttaacaaacatgacagtcttactggatagtctgacactgccacatttgcacatttcaaatggctttactagttaaacaaaatcttccacattcacctacagctcagagcagggttttcacaccatatggttcaaagcctctcctaagcttaccacgcccatgatcccccagtcactccttcagtcatctgaattggccctgcactctcctaggcacctggagacttgtcaggatggtatttaccttggcgtctaatggctcacttctctcatcagagtccatatccctaatttcaaaaaagcatccaacagcttgaccaggacagacagagttgtttctttctttytttttttttttttacagctttattgaggtataatgga

SEQ ID NO: 669013 - DNA, 645 bp, Homo sapiens
tggattttttccatctttttctatttatcaattaaaaatagattacaaaggcagcaagcacaagttattaagagggaaaccactgcatttttaagaattactattattcgagtcagtagcatttttccagtgccagcaatgcagcctcctctctattgtaatgtagctgctgtgttccccctctcattaaacttcagctaaggagaggcatggctttattattaaggcacctagttcmatgttttcttctatgtggtaggaattgttacattaaaacataaaggaaaaaaaacaccctcaattgtaacaaaatctgttttcttggaaacagtttttacaattttgcaaagggatgactttgttactttataaaacaacttcccagtgcaaaagctattagcccaaacaaaccaatgtttctactgctaaaatggttacgattaaaaatgagcaaaaatccagcacaagtcctgacgttctgaggctctgacacaattcaaaggaagtaatctccagcaataacaataaaaatcaagaccatcttgtgcaatggaatgaagcagagttgatgtaccatgaagtgatgaggccatcataagccaatggctccacaaacatctctgaggcaggagagctcagtggcat

SEQ ID NO: 669014 - DNA, 600 bp, Homo sapiens
tattgtgaactgcacatgtgagggatctaggttgtgcactcattatgggaatctaatgcttgatgatctgaggtggaacggtttcayactgaaaccactccccctgcccccatctgtggaaaaattgtcttctacaaaactggtcctggtgacgagaaggttggggactgctgctctaacgccatataagtgttcctgaaaaatctatgctgtaccaaaaataataaggcaaatggagtagacaaggttcaggaagacactaaaaacttatgaactatgtaaccagaataccaataaaaatattactaataaaaatgttaccacagttagctttcttctagttttcatggctgttaatcatttgcttccttataatttcctagacttgtgcttcctcctttaagatgtaagtattagaaggcatttgcttttaaaaaattcaattttcatcaaattttaaaatcgtatccagtctgtaggcttcctaatccattgttttatataactagaaatatcttcttagtgtctttatccatgcctgttccagatagcttaactgaatgaaaattactgaaggtccctaaagctactaaatgaggc

SEQ ID NO: 669015 - DNA, 600 bp, Homo sapiens
tattgtgaactgcacatgtgagggatctaggttgtgcactcattatgggaatctaatgcttgatgatctgaggtggaacggtttcatactgaaaccactccccctgcccccatctgtggaaaaattgtcttctacaaaactggtcctggtgacgagaaggttggggactgctgctctaacgccatataagtgttcctgmaaaatctatgctgtaccaaaaataataaggcaaatggagtagacaaggttcaggaagacactaaaaacttatgaactatgtaaccagaataccaataaaaatattactaataaaaatgttaccacagttagctttcttctagttttcatggctgttaatcatttgcttccttataatttcctagacttgtgcttcctcctttaagatgtaagtattagaaggcatttgcttttaaaaaattcaattttcatcaaattttaaaatcgtatccagtctgtaggcttcctaatccattgttttatataactagaaatatcttcttagtgtctttatccatgcctgttccagatagcttaactgaatgaaaattactgaaggtccctaaagctactaaatgaggc

SEQ ID NO: 669016 - DNA, 600 bp, Homo sapiens
tattgtgaactgcacatgtgagggatctaggttgtgcactcattatgggaatctaatgcttgatgatctgaggtggaacggtttcatactgaaaccactccccctgcccccatctgtggaaaaattgtcttctacaaaactggtcctggtgacgagaaggttggggactgctgctctaacgccatataagtgttcctgaaaaatctatgctgtaccaaaaataataaggcaaatggagtagacaaggttsaggaagacactaaaaacttatgaactatgtaaccagaataccaataaaaatattactaataaaaatgttaccacagttagctttcttctagttttcatggctgttaatcatttgcttccttataatttcctagacttgtgcttcctcctttaagatgtaagtattagaaggcatttgcttttaaaaaattcaattttcatcaaattttaaaatcgtatccagtctgtaggcttcctaatccattgttttatataactagaaatatcttcttagtgtctttatccatgcctgttccagatagcttaactgaatgaaaattactgaaggtccctaaagctactaaatgaggc

SEQ ID NO: 669017 - DNA, 600 bp, Homo sapiens
tattgtgaactgcacatgtgagggatctaggttgtgcactcattatgggaatctaatgcttgatgatctgaggtggaacggtttcatactgaaaccactccccctgcccccatctgtggaaaaattgtcttctacaaaactggtcctggtgacgagaaggttggggactgctgctctaacgccatataagtgttcctgaaaaatctatgctgtaccaaaaataataaggcaaatggagtagacaaggttcaggaagacactaaaaacttatgaactatgtaaccagaataccaataaaaatattactaataaaaatgttaccacagttagctttcttctagttttcatggctgttaatcatttgcttcctyataatttcctagacttgtgcttcctcctttaagatgtaagtattagaaggcatttgcttttaaaaaattcaattttcatcaaattttaaaatcgtatccagtctgtaggcttcctaatccattgttttatataactagaaatatcttcttagtgtctttatccatgcctgttccagatagcttaactgaatgaaaattactgaaggtccctaaagctactaaatgaggc

SEQ ID NO: 669018 - DNA, 600 bp, Homo sapiens
tattgtgaactgcacatgtgagggatctaggttgtgcactcattatgggaatctaatgcttgatgatctgaggtggaacggtttcatactgaaaccactccccctgcccccatctgtggaaaaattgtcttctacaaaactggtcctggtgacgagaaggttggggactgctgctctaacgccatataagtgttcctgaaaaatctatgctgtaccaaaaataataaggcaaatggagtagacaaggttcaggaagacactaaaaacttatgaactatgtaaccagaataccaataaaaatattactaataaaaatgttaccacagttagctttcttctagttttcatggctgttaatcatttgcttccttataatttcctagacttgtgcttcctcctttaagatgtaagtattagaaggcatttgcttttaaaaaattcaattttcatcaaattttaaaatcgtatccagtctgtaggcttcctaatccattgttttatataactagaaatatcttcttagtgtctttatccatgcctgytccagatagcttaactgaatgaaaattactgaaggtccctaaagctactaaatgaggc

SEQ ID NO: 669019 - DNA, 2239 bp, Homo sapiens
ttgcatacctttttgagattacaaaagcaatacatgttcattgttgaaaatgcagaaaattacaaggaagataaaaagtagtcataattctaatacaatgaaaactgcttctaacttattagttcaagtttttttagtcattttttaggcaaatagaagagtgtgtatcttttaaataaaattgagatcccactatatcctgccctgaaattctaggagtctataaactatgcacaactaaatagtaaatttcttgctcaaagcctggcatacaatagtcattccacaaatatttgttaactgaatggtgaggaaaacctggtttgtgggcttgagcaacttcacactcaggccatacccaaatctagacaacgagctttgtgtgccaaaggaatgaaatgagctagaaactgaccactttccttcaagaaagcttctcttcacaaagagaacatcagtggtaattcaaatcccttttttatattcattatttatttcaggagattgcttccatttgatctgaaagctatacatacaaggggctagaagcatggacctcagtgaaaaatggactttggaggaaggagcctggttatcccatgctggaattcatcattttgccagcaccagagcgggtaaggccgtttttgatgtccctgatagcatggtactcttcagcttctgcacctcattatgtcaatccactgtactcagtacgtgcccacgctgtttgtcttttcaaaagcagctgagtggagaggagagggaatggactttgaagtcagacagacctgggttcagataccgaattcactatttacaagttttatggccttgagaaaatctgtcattccctgggctctaacatgagagtaagaatgcccacttcgcagtgttatgatgaggaccatcagctgtcatgtaatgagctcttgccctggccaggtgggaagctrgtcagacatctttgagcacctaacatgtgttaggcactctgttcctgttttgctcatttctcctctcagcagcctgtaaacattcaagttgaggataaagcaaccaatataaacagagtaggccagctctttcccttctttatgattatccaattaatgtgactcagcattaaatgatggagatattgttactttcctggagcagagcatacaaatataagaaccataccctgacacagagctgtggtcctctgtcaggtctaagagtccgctccctcctccatccctcaaatctgatagagacctactttgatggtaggagccattctatagatggacgatgaaaggttgttgaggttaatgcactcacagatgttttcacaaggatatgtctcccatttgtttgttgtttattcatttattcaacaaatattattgagtatctattttatgccaagcactagtaatacaagaacgagagcaagatagacatagagaacagcagactatactctctgatgtgcccacctctaaaacagggtaacttatatggcaacaaacatttgcagaccttctgcactacaccagggtatgtcttccaaccaagactgctgcacacaatgagatagtcgccaaagggaagacaggaagctttgagagaggaaatttggatgcattccacccaaaaaccaactgtcatttgttcctgtgcactgtcatactgtcattccagcctctttttagaagttcttaagccagcatctcttcacaccccatggaaaaaaactaaacctccctagttcaacacacagcccttccagatctgacctctgcctgcccctctagattcatctcctgctgcccatcactaatagcaaccccctccttctcactgtatcagcctcttcctggatccctgaatacatcctgccctcacatgcctgtgaacctttgcaaaggctgctattatcatctctcttccacttggccagttcctactcatctttgaagcttctgcttaagtcatctgttctgggatctcttcctgccaccacctcctaccaacccccatcctggtctgaaggagagtctctcctccctcctcagtgctgccatagcctctgcagattcccatgtcacagcacgtatcatcacactgtattgtgcttgcctgaatcctgaacagcctgtgtgcttcttgagacagatgccttgttttattcatcttttgcacccctttcactgttgcatggcaaattcatggtgtatatttgatggctggc

SEQ ID NO: 669020 - DNA, 642 bp, Homo sapiens
atagatgaaactttgctcacttacctattgctgtgtggcccagtccctaataggccacagatgtgtactggtccatggcccagtggttggggaccacygtgctagctgacacctcctacatggaatactcctttcccccacttcttcacccgctctgtccaaaccactggttcttgtctgtcagtgtgacttcagctcaaaccacccctctcagagactccttctctgctctctcagtaggaagtagccatggggtcattccctgtcacttggggtcattccctgtcacatcactccaccttattctttggagagtacttgttacgttttgatacttggctttattgttgggtggcttgcctttctctctccctaccatgtaaacatctgagagcagggacctggtctgtcttgttcgctgtttccccaatagccggaatggtgccaattgagatgggagcacagtgaatacctcccactgggaagtgcactgatggcctctgaccatggaagccatcaacagtgccagtattgttggggcttccttcctgctcccaccatttccccaggctctaactgctgccttccattgccttgcagccgcccatgccaacttccgttcccatcaaccatgcagcagca

SEQ ID NO: 669021 - DNA, 642 bp, Homo sapiens
atagatgaaactttgctcacttacctattgctgtgtggcccagtccctaataggccacagatgtgtactggtccatggcccagtggttggggaccaccgtgctagctgacacctcctacatggaatactcctttcccccacttcttcacccgctctgtccaaaccactggttcttgtctgtcagtgtgacttcagctcaaaccacccctctcagagactccttctctgctctctcagtaggaagtagccatggggtcattccctgtcacttggggtcattccctgtcacatcactccaccttattctttggagagtacttgttacgttttgatacttggctttattgttgggtggcttgcctttctctctccctaccatgtaaacatctgagagcagggacctggtctgtcttgttcgctgtttccccartagccggaatggtgccaattgagatgggagcacagtgaatacctcccactgggaagtgcactgatggcctctgaccatggaagccatcaacagtgccagtattgttggggcttccttcctgctcccaccatttccccaggctctaactgctgccttccattgccttgcagccgcccatgccaacttccgttcccatcaaccatgcagcagca

SEQ ID NO: 669022 - DNA, 595 bp, Homo sapiens
cttggaggagcttacattccaaaaaggggagagagttgcatatgctaccttcagtaagagtgtgaagggtctactgtaggaacagcagaggtggctcttgaccggagactcagaggctaagtaggattaccccacctggacaaatgtagaagagggaacacggagagtaaataacacggaggaggccatgcgcggtggtccatgcctataatcccagcactttgtgaggctgaggcaggtggatcgcttgagcctgggagtttgagaccagcctgggcaacatgccaagaccctgtctctacaaaaattagccagtcatggtggcccatgccttgyagtcccagctactcaggaggatcacatgagcttgggaagcataggttatagtgagtcaagatcgctccactgcactccagcctgagtgacagagtgagaccctgtctcaaaaataaaaaataaataaaaccacagagaaatgaagtgagagataccaaattttcctttaaatttaggaatctcagacaggaaccttgtgttgtcatgttcatttcattagccggtctctgcaaaaagcagccttgcctcaacatgagag

SEQ ID NO: 669023 - DNA, 595 bp, Homo sapiens
cttggaggagcttacattccaaaaaggggagagagttgcatatgctaccttcagtaagagtgtgaagggtctactgtaggaacagcagaggtggctcttgaccggagactcagaggctaagtaggattaccccacctggacaaatgtagaagagggaacacggagagtaaataacacggaggaggccatgcgcggtggtccatgcctataatcccagcactttgtgaggctgaggcaggtggatcgcttgagcctgggagtttgagaccagcctgggcaacatgccaagaccctgtctctacaaaaattagccagtcatggtggcccatgccttgcagtcccagctactcaggaggatcacatgagcttgggargcataggttatagtgagtcaagatcgctccactgcactccagcctgagtgacagagtgagaccctgtctcaaaaataaaaaataaataaaaccacagagaaatgaagtgagagataccaaattttcctttaaatttaggaatctcagacaggaaccttgtgttgtcatgttcatttcattagccggtctctgcaaaaagcagccttgcctcaacatgagag

SEQ ID NO: 669024 - DNA, 595 bp, Homo sapiens
cttggaggagcttacattccaaaaaggggagagagttgcatatgctaccttcagtaagagtgtgaagggtctactgtaggaacagcagaggtggctcttgaccggagactcagaggctaagtaggattaccccacctggacaaatgtagaagagggaacacggagagtaaataacacggaggaggccatgcgcggtggtccatgcctataatcccagcactttgtgaggctgaggcaggtggatcgcttgagcctgggagtttgagaccagcctgggcaacatgccaagaccctgtctctacaaaaattagccagtcatggtggcccatgccttgcagtcccagctactcaggaggatcacatgagcttgggaagcataggttatagtgagtcaagatcrctccactgcactccagcctgagtgacagagtgagaccctgtctcaaaaataaaaaataaataaaaccacagagaaatgaagtgagagataccaaattttcctttaaatttaggaatctcagacaggaaccttgtgttgtcatgttcatttcattagccggtctctgcaaaaagcagccttgcctcaacatgagag

SEQ ID NO: 669025 - DNA, 595 bp, Homo sapiens
cttggaggagcttacattccaaaaaggggagagagttgcatatgctaccttcagtaagagtgtgaagggtctactgtaggaacagcagaggtggctcttgaccggagactcagaggctaagtaggattaccccacctggacaaatgtagaagagggaacacggagagtaaataacacggaggaggccatgcgcggtggtccatgcctataatcccagcactttgtgaggctgaggcaggtggatcgcttgagcctgggagtttgagaccagcctgggcaacatgccaagaccctgtctctacaaaaattagccagtcatggtggcccatgccttgcagtcccagctactcaggaggatcacatgagcttgggaagcataggttatagtgagtcaagatcgctccactgcactccagcctgagtgacagagtgagaccctgtctcaaaaataaaaaataaataaaaccacagagaaatgaagtgagagataccaaattttcctttaaatttaggaatctcagacaggaaccttgtgttgtcatgttcatttcattagccgrtctctgcaaaaagcagccttgcctcaacatgagag

SEQ ID NO: 669026 - DNA, 1030 bp, Homo sapiens
gcctccaaagtgttttggaaagtttgtcagaaaagtactagtcatagatagaaacagtcctatacacaggtgaaaatcagacagtattaaagcggaacacggaaactgtacgtggctttatacctcgggagtcttcttactctgtcttttcccaaaaatgcagtcaagatctgttttgctccgagatgacagatccttccctagaaaaacaatgtgatgcttttcagtaagactgttcttcctaaaagaaagagcgcagacatgaactatgcagcacctcaaaggaaaatggcttttgggaaagaaagaaacaattttgaaactactgactttctacccactttttcattacaactctttcattagtaaacaaaattaattaaattttaaaaccaagtaaatgttttagaaccagaactcttgacattctcttaattgtagaaacaacctagagcatactgactgcaaggaaagctaaattctacagctcaccctactcccgctatgccctcaagatgcaattcctgggtctctgggttcttcatttaaaaatagatctcatttgcttcagagacatgagctacttacttagaagattacgaaatacacatgaaaaaatatcactagatacacagctccagaccccacatatgcacatgaatgagaacgtatcatatttgacacacaggatcttaataattaactcaacaaataaaaattttaaaagaatatatgtaaatcaaaaatactgtawaagggtgacagggtttcagatttttcttcttaaaatgttctttactgctctagctatattgtctctaaataaaaagctacatagggagagtaggaaattaaatggctctatggttcttatttaaaacactaaactctttaatttcaaacccccaaaccaactaatttaaaattcacttctttggaatttccacttctacccaataatcctctgtgagcagtaggccaaatctagtcccatttgtcaacggcatggtaaatgcattttaaaatgtaa

SEQ ID NO: 669027 - DNA, 2994 bp, Homo sapiens
aagctcttaaaaccacttgcttcatctgtcaacaaacaaaaagccaaatctaatcctttcaggccgaacgtgtcctggtgaagctctaaccaaacaaaacagcccagcaacttccaacccttgggtgtgttggcaggccctgccctcaccctcactgctttctcatttcttctttatgagtgtcttattatgaagttatgtttgctgatctacaagacgacataaatttttactggtactaaaacaactctcaaaaagtcaggacccactttctcctttctggctcctctagaaagcagaggcaggcccaagccccgtttgaagtccttgctgccgggagatggccagtttatgtctcttgtcctaggacaggaaaaggatgcactctcggcaccatgtgctagagcgagataagaccagagattctgtcctcggcaccttatcagcttttcctgccactttccagagcagacagcaccatggctggcaatgaacgaagctagttgaaggggggttgggtgtgcgagtggcttggggactgcagggagtgaggtaggcagggtgtagaatgagaaaaggaaagagaagaggttcttcgtgtatcttaaaatggtttggtccccccaaaattgccttttttttaaaaaacacatggattttgcatctctgttggaactggagcaactaggagagatgtttttataaggacttccgttctggttagaatgaaccaccactttcattgcttcgcactctgcccgtcactgccttgtgcgactggctcctgggcacgtagcacaggatggatctgctatcagatactccgtggaaagactgcggggtccaggttgcagagcgggtgccttccacaggcacgcaagcctctatctgcacacccagcaatctcctggggccaggacacacttgctcacacgggataatccgcctcacagtgcaaaggaacaagggaggctatgggacactcctccaaatacagacgaatggcatcgatgagctgctttgttctccaacaaataacatctgtgaatccaaggattacactctttagaaaccctggtctttgggggctgggttagggagggggtgaatataactcttggaaaaaaacctagactaagcagggaaattttaacttagttatggactcagttattgataatgaactcatgaaagttcaggttgagtatcccttatttgaaatgcttaggaccagaagagtttccgatttttgatttagggatattcaacctggaatatcaatataaatatgctaaattgatattccaggttgaacatccctctcgtttttgcaaattgttgtcgatgaaaccaaatcatttgtcctgtaaagttctctcataatcagatttttgctgaatgtatccccgtggcataggttaacacatttctctgtctcatgtatctcctgtagggttcaagtgagaggcagccttactttctaacggagcacttttccaatgccagcatgttgttttatgaaaaactgggctggattcatggtctaagtaagtttgggaaacaaacctgtgctattcctccctttgattcacaatgcatatcaccatctgagacacgtggcygctgttaaacttcagaatggcccacatttatttgatcctggaaccctttttggtaaacacccactggcatcccatgaaattagtgctctgctgaacttactttgaaagggctatttaaacagatagttccattatctggataaaatgagtagttctcttgttaaatctcatagttaaatctttgttttgtcccagattgtccaagagggtgggcttttacccatgtaagtttttgcaaaaatgacaaaagcatagcagggaagtgaaaagagggcatggcaagcatcccactatggacgctagcttgcagagcagcctctgggaggagaggttagctctttctcagctatcacatgattgaaatgggaatgtctgttcctaggtttagaaaaattacgcttccattttggaatggagggtagcggagaaataacatatcctaaatgatgccaagtatggatgtattttctttgtttacttttaagactgcctacaatctagccgtattttttaaaggattatgtgtaagcagcaagccctgcagagtctgacagtgagatgaccactgtgaagaaagatcctgggcgtcaggttccacttaaaggccgtgcaaagttcaaaccacagaaccaagaataaatgtataaaataacgaagtgaataaaatatggaacacagaagtcaatggacatataacaaaatcaaattcaaaaaagcaatttctaaaagtgaaatgaaacaaacttgattctgcaactagctggtgaagagccacacaaaaagaaattccagatgactgaaaacataataatttaactgtatagactgaatgggaaatacataaagacaaaaagaactgccacacacccaaaacaaaccctctgaatctctctctctctttttttaaaatgatcaagttattggcattactctgtaactattgtgtgtataatgggaaataagcaaatgagtactgtgatattttaatgcttttatttctggaacctgttgattccaggaaacttactgtcgggaagtaaagataaaagatgagtggggttaagtacttgtggtcctaaatctaatctggcaatatgactataaactcaggatatattttatcataaagaaattatagttttatacatgtaacaaggcctacaaatgaagaccaatctaggaagaaatgaacaaccccaacgcctagactgtgtcgctaaatatcacttaccacaaagaaaggaatcagggagaaagggacgactccaagtgtggggcagaaaatgtacacagtggacctggaaactcttacactagattggaaggaagctattaaataccacttagggtcatctcaacagtactcaggtca

SEQ ID NO: 669028 - DNA, 935 bp, Homo sapiens
taaaacaaaaggccaaaaaaaacaaccaatcagcatctatttatttttgaaagttagctccccttaggttccatgcattccacttctttctggatctctggtttcacaggcaagatgggacaggcagagagaacctgggcatgtgccctctgtggagaaagtgacttcagaaaccgctgaggctctattagcctgggattctaaactcggggggacatgaaaaactcaagagacgagtcatcaggctctatattcataagactcttctctgtgtgtgtgtgtgtctcttttcaaacaaatagcactgcgcagcatccttagagactacagccaaatgtccttcatgtattttctctacatttcaagaatctcgggacctgcttcctatctaatgtgtgaccttgagagttaaaatcaaggggaaaaggtcaccgaattgggggcaagtttgagttcccgtcaccagccacaatctctatatcaaatggaggacaacacaccacctgggcctcagccaggtttgcctgaagcagggccaggcagcctcaaggcctccatggtaggctggggacatggggacgtggggaaagggggtgcagggaaactgggaactaggaggggagcgtgagaaagagggaataaatgcgtacgcggatgaagaggaacagcaggaggagatgaaggcggcgcacagggcagaacggcagacacagggctgggaaggtggcagggcsggactccagaacctcagctgagcgttttcttctcctgtgtcccagggatggtgtgaagtgtctacaggcatccgagtgaacccaaagggagagtttggctggcacacggggagacgggccaaggcgcggcgggcgagggcggcacaagcatggcgctgcgacaccactgctgggagcagggctgaaaggtgtcttttgctg

SEQ ID NO: 669029 - DNA, 578 bp, Homo sapiens
tgcgtttctgaaatgagcacttgctgagtgatcttggggaagttacttcattcctctcggccatggtttcctcatctgtaaatggacacagtaattatattcaacttgtaggatgctcgcggagattacrtgaaataggccgggtatggtgcctagtgaagagctcaagaagtgtgagacattattactatcgtgggcagggaatttggacacctgtggtgtaagctgccccaagagattgggtttctgtaagggcgtttcatattaggctgggccctattctagagatgaggatatcttcctataggccagctccgcccctgtcactccagaatcgctctctgcctgcagtatgccacaagagcagacttgcccagggacccagggtggtcactgacaccccattcccaccaaatacacacactctcccctggtgtcctccttagccccttgctgggtctcttctgctagcaggagctgctggatttgccatcaggactggctttccctgtgacccctttgtgggtggggccttgcctggtaatcggagatccagattcagctctgttactgactta

SEQ ID NO: 669030 - DNA, 578 bp, Homo sapiens
tgcgtttctgaaatgagcacttgctgagtgatcttggggaagttacttcattcctctcggccatggtttcctcatctgtaaatggacacagtaattatattcaacttgtaggatgctcgcggagattacgtgaaataggccgggtatggtgcstagtgaagagctcaagaagtgtgagacattattactatcgtgggcagggaatttggacacctgtggtgtaagctgccccaagagattgggtttctgtaagggcgtttcatattaggctgggccctattctagagatgaggatatcttcctataggccagctccgcccctgtcactccagaatcgctctctgcctgcagtatgccacaagagcagacttgcccagggacccagggtggtcactgacaccccattcccaccaaatacacacactctcccctggtgtcctccttagccccttgctgggtctcttctgctagcaggagctgctggatttgccatcaggactggctttccctgtgacccctttgtgggtggggccttgcctggtaatcggagatccagattcagctctgttactgactta

SEQ ID NO: 669031 - DNA, 1129 bp, Homo sapiens
gtaccaatcatcaccctgtcaaaacggaccaaccagctctctgtaaaacagaccaattggctctctgtaaaatggaccaatcagcaggaagtgggtggggccagataagagaataaaaacaggctgcccaagccagcagtagcarcctgtttgggtccccttccacgctgtggaaggtttgttctttcactctttgcaataaatcttgctcttgctcactctggttccacacagcctttatgagctgtaacattcaccacgaaggtctgcagcttcactcctgaagctagcgagatcatgaacccactgggaggaacaaacaactccagacgcgccaccttaagagatgtaacactcaccgagaaggtctgcagcttcactcttgagccagcgagaccatgaacccaccagaaggaagaaattccgaacacgccgcctttaagaactgtaacactcaccacgagggtccgcagcttctttcttgaagtcagtgagaccaagaacccaccaattccggacacactaggacggcagaaaacttgctccactggctgcccctgagcaggctagcacctgggcctcattaaactccctgactacttgtgtcaaggcattatcgagtcaggaacagttcttgagtttatagtatggaaacctggccctcatttttcttattgttttgtccacatagcattccccttaccccacttattttccaaactgctctattttctgaaagtgctcacatcgccacctctgtccaggtgtttttcagtgggatgagtagggttacagcatgagccagcactcagctgtagctaatcagtgcagaggtggttccccaggatcaaactgtgtccaaacgcttgggattgcaaaccggtcagtctccgtccaggcggctgaagatataagctagaaaccagttattccaacttggcatgcatcagaatcacttggagggcttgttaaaatacagactcctggccaggcacagtggctcacgcctataatcccagcactttgggaggctgaggcgggcagaccacctgatgtcaggagttcaagactcagcctgactaacgcggagaaaccccgtctctaccaaaaatacaaaattagctgggca

SEQ ID NO: 669032 - DNA, 1129 bp, Homo sapiens
gtaccaatcatcaccctgtcaaaacggaccaaccagctctctgtaaaacagaccaattggctctctgtaaaatggaccaatcagcaggaagtgggtggggccagataagagaataaaaacaggctgcccaagccagcagtagcaacctgtttgggtccccttccacgctgtggaaggtttgttctttcactctttgcaataaatcttgctcttgctcactctggttccacacagcctttatgagctgtaacattcaccacgaaggtctgcagcttcactcctgaagcyagcgagatcatgaacccactgggaggaacaaacaactccagacgcgccaccttaagagatgtaacactcaccgagaaggtctgcagcttcactcttgagccagcgagaccatgaacccaccagaaggaagaaattccgaacacgccgcctttaagaactgtaacactcaccacgagggtccgcagcttctttcttgaagtcagtgagaccaagaacccaccaattccggacacactaggacggcagaaaacttgctccactggctgcccctgagcaggctagcacctgggcctcattaaactccctgactacttgtgtcaaggcattatcgagtcaggaacagttcttgagtttatagtatggaaacctggccctcatttttcttattgttttgtccacatagcattccccttaccccacttattttccaaactgctctattttctgaaagtgctcacatcgccacctctgtccaggtgtttttcagtgggatgagtagggttacagcatgagccagcactcagctgtagctaatcagtgcagaggtggttccccaggatcaaactgtgtccaaacgcttgggattgcaaaccggtcagtctccgtccaggcggctgaagatataagctagaaaccagttattccaacttggcatgcatcagaatcacttggagggcttgttaaaatacagactcctggccaggcacagtggctcacgcctataatcccagcactttgggaggctgaggcgggcagaccacctgatgtcaggagttcaagactcagcctgactaacgcggagaaaccccgtctctaccaaaaatacaaaattagctgggca

SEQ ID NO: 669033 - DNA, 1129 bp, Homo sapiens
gtaccaatcatcaccctgtcaaaacggaccaaccagctctctgtaaaacagaccaattggctctctgtaaaatggaccaatcagcaggaagtgggtggggccagataagagaataaaaacaggctgcccaagccagcagtagcaacctgtttgggtccccttccacgctgtggaaggtttgttctttcactctttgcaataaatcttgctcttgctcactctggttccacacagcctttatgagctgtaacattcaccacgaaggtctgcagcttcactcctgaagctagcgagatcatgaacccactgggaggaacaaacaactccagacgcgccaccttaagagatgtaacactcaccgagaaggtctgcagcttcactcttgagccagcgagaccatgaacccaccagaaggaagaaaytccgaacacgccgcctttaagaactgtaacactcaccacgagggtccgcagcttctttcttgaagtcagtgagaccaagaacccaccaattccggacacactaggacggcagaaaacttgctccactggctgcccctgagcaggctagcacctgggcctcattaaactccctgactacttgtgtcaaggcattatcgagtcaggaacagttcttgagtttatagtatggaaacctggccctcatttttcttattgttttgtccacatagcattccccttaccccacttattttccaaactgctctattttctgaaagtgctcacatcgccacctctgtccaggtgtttttcagtgggatgagtagggttacagcatgagccagcactcagctgtagctaatcagtgcagaggtggttccccaggatcaaactgtgtccaaacgcttgggattgcaaaccggtcagtctccgtccaggcggctgaagatataagctagaaaccagttattccaacttggcatgcatcagaatcacttggagggcttgttaaaatacagactcctggccaggcacagtggctcacgcctataatcccagcactttgggaggctgaggcgggcagaccacctgatgtcaggagttcaagactcagcctgactaacgcggagaaaccccgtctctaccaaaaatacaaaattagctgggca

SEQ ID NO: 669034 - DNA, 1129 bp, Homo sapiens
gtaccaatcatcaccctgtcaaaacggaccaaccagctctctgtaaaacagaccaattggctctctgtaaaatggaccaatcagcaggaagtgggtggggccagataagagaataaaaacaggctgcccaagccagcagtagcaacctgtttgggtccccttccacgctgtggaaggtttgttctttcactctttgcaataaatcttgctcttgctcactctggttccacacagcctttatgagctgtaacattcaccacgaaggtctgcagcttcactcctgaagctagcgagatcatgaacccactgggaggaacaaacaactccagacgcgccaccttaagagatgtaacactcaccgagaaggtctgcagcttcactcttgagccagcgagaccatgaacccaccagaaggaagaaattccgaacacgccgcctttaagaactgtaacactcaccacgagggtccgcagcttcwttcttgaagtcagtgagaccaagaacccaccaattccggacacactaggacggcagaaaacttgctccactggctgcccctgagcaggctagcacctgggcctcattaaactccctgactacttgtgtcaaggcattatcgagtcaggaacagttcttgagtttatagtatggaaacctggccctcatttttcttattgttttgtccacatagcattccccttaccccacttattttccaaactgctctattttctgaaagtgctcacatcgccacctctgtccaggtgtttttcagtgggatgagtagggttacagcatgagccagcactcagctgtagctaatcagtgcagaggtggttccccaggatcaaactgtgtccaaacgcttgggattgcaaaccggtcagtctccgtccaggcggctgaagatataagctagaaaccagttattccaacttggcatgcatcagaatcacttggagggcttgttaaaatacagactcctggccaggcacagtggctcacgcctataatcccagcactttgggaggctgaggcgggcagaccacctgatgtcaggagttcaagactcagcctgactaacgcggagaaaccccgtctctaccaaaaatacaaaattagctgggca

SEQ ID NO: 669035 - DNA, 1129 bp, Homo sapiens
gtaccaatcatcaccctgtcaaaacggaccaaccagctctctgtaaaacagaccaattggctctctgtaaaatggaccaatcagcaggaagtgggtggggccagataagagaataaaaacaggctgcccaagccagcagtagcaacctgtttgggtccccttccacgctgtggaaggtttgttctttcactctttgcaataaatcttgctcttgctcactctggttccacacagcctttatgagctgtaacattcaccacgaaggtctgcagcttcactcctgaagctagcgagatcatgaacccactgggaggaacaaacaactccagacgcgccaccttaagagatgtaacactcaccgagaaggtctgcagcttcactcttgagccagcgagaccatgaacccaccagaaggaagaaattccgaacacgccgcctttaagaactgtaacactcaccacgagggtccgcagcttctttcttgaagtcagtgagaccaagaacccaccaattccggacacactaggacggcagaaaacttgctccactggctgcccctgagcaggctagcacctgggcctcattaaactccctgactacttgtgtcaaggcattatcgagtcaggaacagttcttgagtttatagtatggaaacctggccctcatttttcttattgttttgtccacatagcattccccttaccccacttattttccaaactgctctattttctgraagtgctcacatcgccacctctgtccaggtgtttttcagtgggatgagtagggttacagcatgagccagcactcagctgtagctaatcagtgcagaggtggttccccaggatcaaactgtgtccaaacgcttgggattgcaaaccggtcagtctccgtccaggcggctgaagatataagctagaaaccagttattccaacttggcatgcatcagaatcacttggagggcttgttaaaatacagactcctggccaggcacagtggctcacgcctataatcccagcactttgggaggctgaggcgggcagaccacctgatgtcaggagttcaagactcagcctgactaacgcggagaaaccccgtctctaccaaaaatacaaaattagctgggca

SEQ ID NO: 669036 - DNA, 605 bp, Homo sapiens
tttttcaacttaataactgtctaaagtccctatctgtagtatctataaaattttgttcttattttccatttatgtcttgttcataatgtattttctggatttgccccctgatgtattagttctctattgctgcaaaccagtttaccacaagcttagaagcttaaaacagcatacctttattatctttgtttctatgggtaaggattctgggtacaacctaactggttttgctgaagttctcacaaagctgcaatgagaccctgagccaaaccagttagatgtcatcyatacagcattcctttctggagctcaaggtcaagtcggcgttgacagaatttggttctatgtagttgcaggactgagatctcctcttccttgctggctgtcaaccagaggcttctctcagctttgtggagatctgcatggttccttgtcacatgctccctcacatatgacagcttacctcttcaaagccagaaggagagcctctctagtctgcaaagacaggcacttttttaatataacatgattatcctatcactatcctatcacttttgccatatagtgtgaactaatcaaaagagtaagtataccattatatccac

SEQ ID NO: 669037 - DNA, 605 bp, Homo sapiens
tttttcaacttaataactgtctaaagtccctatctgtagtatctataaaattttgttcttattttccatttatgtcttgttcataatgtattttctggatttgccccctgatgtattagttctctattgctgcaaaccagtttaccacaagcttagaagcttaaaacagcatacctttattatctttgtttctatgggtaaggattctgggtacaacctaactggttttgctgaagttctcacaaagctgcaatgagaccctgagccaaaccagttagatgtcatccatacagcattcctttctggagctcaaggtcaagtcggcgttgacagaatttggttctatgtagttgcaggactgagatctcctcttccttgctggctgtcaaccagaggcttctctcagctttgtggagatctgcatggttccttgtcacatgctccctcacayatgacagcttacctcttcaaagccagaaggagagcctctctagtctgcaaagacaggcacttttttaatataacatgattatcctatcactatcctatcacttttgccatatagtgtgaactaatcaaaagagtaagtataccattatatccac

SEQ ID NO: 669038 - DNA, 604 bp, Homo sapiens
gttggaaaatctttgttgcatgtataaatgtatgaacttggctgggtgaggtggctcatgcctataatcccagcatttctggaggctgaggtaggaggattgctttggcccaggagttgaaggctgcagtgagctatgatggggccattacactccagtctgggtgaaagagtgagaccctgtctctaaagaaaataaaataagaatttaaaaaaaataaaaataaatatataactagatgaactattgaagcaaaaacgtatttattactgtcttctaaacatttaaatattgcccttttaaaattaatgtatatgttgtgaacattaacttttttctttttaaaatggccatttctcaataaataattgacttagtttgatatttgtttccaggtgatgaatgaaggggattcaagccttgccaccgacttacaggaagatgtagaggaaaatcctagtccaactgtggaagagaataatgtggtagttaaaaaacaggggccaaatttacataattggagtggtgactggagcttttgggtaatttctttttttacktctttattttaatcttgaatacaaattttctttaaatctgcaag

SEQ ID NO: 669039 - DNA, 667 bp, Homo sapiens
gtatgtgaattatagcacagtaaagctgctgttaaaagaaatggtttaaggggaacagtagagatttcctgcagataagaaagcctctttttttttttttcgagatggagttttgctcttgttgcccaggctagagtgcaatggcgatctcggctcactgcaacctytgtctcctaggttcaagtgattctcctgcctcagcctcccgagtagctgggattacaggcatgcgccactgagcctggctaattttgtatttttagtagagacagggtttctccatgttggtcaggctggtctcgaactcccgacctcaggtgatctgcctgcctcggcctcccaaagtactgggattactggtgtgagcctccacccagacaagaaagtttctttctttgaagctggcaggtgggaacttagcctcctctcctccctactccccagctaagcaccttcctgaagtggacagacacattttggcctccagagctcttcatgttgaatggccttttgaactgaacagctgaggacaggctctcctaagcagtgcccaactcaaatgctttcactttgctggagtggggacccttggagaagtagcctacaagtctgagatggggaagggacagaggagaaaagctggtgtgggtgagggggcttgccaagc

SEQ ID NO: 669040 - DNA, 667 bp, Homo sapiens
gtatgtgaattatagcacagtaaagctgctgttaaaagaaatggtttaaggggaacagtagagatttcctgcagataagaaagcctctttttttttttttcgagatggagttttgctcttgttgcccaggctagagtgcaatggcgatctcggctcactgcaacctctgtctcctaggttcaagtgattctyctgcctcagcctcccgagtagctgggattacaggcatgcgccactgagcctggctaattttgtatttttagtagagacagggtttctccatgttggtcaggctggtctcgaactcccgacctcaggtgatctgcctgcctcggcctcccaaagtactgggattactggtgtgagcctccacccagacaagaaagtttctttctttgaagctggcaggtgggaacttagcctcctctcctccctactccccagctaagcaccttcctgaagtggacagacacattttggcctccagagctcttcatgttgaatggccttttgaactgaacagctgaggacaggctctcctaagcagtgcccaactcaaatgctttcactttgctggagtggggacccttggagaagtagcctacaagtctgagatggggaagggacagaggagaaaagctggtgtgggtgagggggcttgccaagc

SEQ ID NO: 669041 - DNA, 2207 bp, Homo sapiens
tcaaaatgaattgccaaaattaagacttatatacttaatcaaatccggaaaataattattaaaattttgaattctgttcctctcttttaaagctaaaatagaatgttttattaattgtttagtgttagctgtctttcttaaattttcctcatatggtcaggaatattggtttgcaggctaatattgactggaagtttccatttcaatttcatccctccagtctccagcagaagttttacagttacttctgcctaggaaccagtgcagaactggtgattttgagttcccgtgcctcagtgactgatgttaacaatatctcagactagtcattgaactagtaggcagtttcactcaggtggtaactgagaagcttccgcctacttcctcctcctccagccagtgcagcagggacctttccagagttttcttccccctaaatgaaagactttggtgttaaacagtgaagagggctctgtcccctatcccaccggagatggatttagtttccatcatcccataggatcaacattttttggtggcaaaggctcacttctggccccacatcctggcaagctgaatgttctgtctcatttagcactgtttcagttccatttctggtctgcaaagatctttgtcttgtttccaaaaatggttgtcttggctgatgcatttggaaaacaattttctatttatataaaagtgacttaattatatttaaaactatattgtacacaaatacatgtatatacatgtactttagatttgcaatgctaagaacagaacactcaaattaacatttttaaatgtattgtctttctgtacatcattattttaaaaacatacacaaagtcccagaagcaagtatgcttcttcattcttaaataaggaaatctgtgttgactgtatgttcctttaaggtatttgaatacaaatcaactgggggaaactcacaatcagatgtgaagcatttcactcattttcacattcagcaattaattgcttatttctatggcactgaaagtctactgttttcactgaaatacatagtgccatctactggttcaattgtcgttaaaaggacagaatcaagcaaaatttgtgttggtgggaactcacatcacgcctaattccattctcttcttttcaccctcatatgagagctgagtgaagagctaaaagctgacccctgatctaaatcacacagctgtttcaattcaataatggtattatctttatcagtgactgagaactccaggacttgaagctcattagctttctccaacttttttttaaagtattttttttagtagaaaaattttgtattgaaatgtaataaattaaaggcaccaaatagtcttttatattattgcaacataagaagaaatactttagcttctaacaaaataaggtagcaggacatagaatctttactgccaccatcattaatgacttgttcctcctaggagaatggtggggctgttagttgcttggtatatttgtcagtatagggctcagtaacaagaaggaagcatcaggctgcatggctgaggctatgaattgatttcaatactaacataaagaaaacagctaagttagacgaaaatggcatatcccaaataaaagtttaatttatatgttagtgtattaaagctttagaatataatggtaactttcctataaaaatcatgtcagtaaatatttacaagacaggtttattatatctcaattggatctgagtttggctgacagtctcagattcaaccccctgataattatcttcctggggtctgcagcccccacaggcactttcattgttcactgaatcttaaaattatggagaccttaatatttcagtttgtcaataatacagtttctaggcaaccatattacaattcctcattacaatctccagacataatcagctgcagagttttagatccatctaaaactgattagcaattaatcaaataaatttcagattagagaatctcaaagactcaatattgcttttaacataaatgttttaaatctcagtttctaataaggcaaaacttaattttattttcaaaataatttaatttaaggcatcacaataatggattaatttaaaaaaattttaaaaaccytttccctcagctcataatcatcagggttgtgtgtaataattctatgggaaaacagaatattaaaaatatcagctgcttgag

SEQ ID NO: 669042 - DNA, 650 bp, Homo sapiens
tgcttattttgtgtctttaaacatacaaaacatgtttcttttatatgctgtctgatagcagttgtatctgaagtcttcatgtgtctgatctgcagatagctgttttcgttgtctttcttttctatttcttttagtgttctgtgcttttatgaatgtgagattatatgccttggagcttcatttatgggaattttctaaatcctggaataaacatgggtttctccaaatgattgggttttcctctgccaggtccctcagtgaactatgtgtcaaggatcgctgtaaataayaacatatcattggaatttggaccatataacgggtggctaagaattattactgtttcatagcagcaaggtggctgtatctaattcatatttacagtatgtttagacagttgggagccaagagttgcaagatggatttcttctggaagaagactcctgattttgccttgtatcatttaagttacacaagactatgaagacataaatttaagtttatgaggtttaacaattaccctaaagatgaaagttgtcatcaatgctcccttcttggtttccaacttcacttaggttttggcctgctgctgctgctgctgctgctgctgctgatgatgatgatgatgatgattttgatatcacatggaa

SEQ ID NO: 669043 - DNA, 657 bp, Homo sapiens
tcttggctcttgtggcacatttctggtcatctctgcagtttatataatactgcttccttagtcatgtgctcttaaatgtaactcttaattataagattgggtctttaacagaataggagcttcttgataatatcaattggctagcatgagcactaggatgtcttatggaaaaagtaggtgacaaccaataacaacccattaacagactagcatctctaatgaccctagtaacaaaagaatggtatttaaactgtttaaaattttattgtggaaatatacatayaacacgaagtttaccattttaagaaagtgtacagttcagtggcattaagtacattcacaatgttgtgcaactgtcaccactatctagttccaaaactccttcatcatctcaaacagaaactctataaccattaagcaataattctcccgttccacactctcccagacctggtaacttctattctactttctgtctctatgaatttgtcttttctagctatctcatataagtggagtcatactatattgtcttttggagtctggcttctttcatttagcatagtgtttttaaggttcatcgatgttgtagcattcatcaaaatttcattcgtctttatggctgaataatattctattatgtgtgtataccacggt

SEQ ID NO: 669044 - DNA, 643 bp, Homo sapiens
ccaatctggactctcaacaacctactggcacctttccataccagtaaaacaagctggcctctagtatcttccatgctctccttccaaagtacacaggcccttgactttgtatctttacccctgttattgtcttaattaggaccctcacagaagcagagctgagacaaagatttggatgcaaacagttcatttgaggggtgatcctagaggcaggtataagagagtggggaccgtgagacagggaggaggaacagccaatctgtgtgtgcatggtcactgctggaggacagggtgagggattccaccaagccctcagaagcagacacaatgcctccaaatgatgggaggctggagtggttatctgccagctcctatcccctttcactgagagatgcctctggatgtaacctcccccagcttgcaggccttgcttgcaagaagccctagaggcagaaatcagaaggctgcatggtgtaacctgaggtgggtgctgcactgttgggtctgagcccatcgtrgctgaggctgaagtctgaagcagaccaaagggagctgcctctgcctggaatgaccttcctcattttttctggcctgagttgcaggcaggatccaggtttgttcccattcaactttaagacaccct

SEQ ID NO: 669045 - DNA, 615 bp, Homo sapiens
tctgcccatgtatcacataactttaaaaaaaaaatgctttattccagaaaagtactattctaaagaaggaagaaagataatctaggaaaaatataaactaacgcaaatttggtcataatatgccagtaacaaattcaatcctttgcagcaggcctgcaraagtcagtgatcttttacaataaatagccacaaatttattttctattcatgaggcatctatcaacttgattcaaagtacttacatgaaaaaaaaaaagtgaggcagattctactttttgtcttacacccatgtgtgtcttaatttctattttatgtcactctgaaatacttcagcagaaataaattcgtactagcagcaattcattcagtaatctctgaatctgtactctcttctgatttgaaatataaatgaagatggaacacacccatatgaataaaacctgttaattcgtttatggatcagcaatccccaagtgtatatcacaaatctgtatgatattcctgggcctgcttttacatttaaaattcagaattggataaaagatgggtataattacatggagccagatggctctcttgtgactacacatttacagaagcttttgcaagttgttt

SEQ ID NO: 669046 - DNA, 1351 bp, Homo sapiens
ttgatactttaagccagctattttactaggtcagttacataatgccaaaatcatcawgtaacttatttattcatgtttatttttgaaggtagtgtgaaatatgtttttcctgctatcagtacaatttatttttatctttaatgactggtatttacccgcatgtttcctcacccaaactcttgttcttatgttatatcacacttattcagtacttcctagctttctgttagttgtgtgcttgtaagtattaaatgccttttttataccttagctcattctcctctattaatatggtgtacaaccttgcctataggcaaaactaggcatttgagagaggtggctgggcaggacagaataaaaagtgtacagttcatgcaggtgcaaaaatgtctgaggacatgactggacattaggacacaggtaaaggtcatttcaccaggcagtaagagaggcaatgatgcactattcacgtttcatctttatctctaatgttccagtcttcctctgactgtgattgtattttcttcccatcacagacatgcaaatatggcagtgatgttttatcaaaagtgacaaatagctaaggatattacgtatgctacagaatgggtatggttatatataggacatgtgcatatacattctaacacaccttggccagacatacacatattaggcacataaacaaatgcacatacacatataccaaactcacaccacacatgtagcatcctttctttgttgtgtatttgtttaaaagtaaaattgtgttgttttcttaataacacataaataatttaatttatatgtttatagtttatatagtcttacatatgtttttattttttaattttttaaatattctctttgaagtatcccaagagttcaatatttgtatataagattatataaagaaaaagtttcttcccttttccgtatacattccttttatatctctatatacattccctttatatctctaagaatataagaaaaggatatacattccttttatatctctaagaaaagccgctaattatttctaatgttgttaaaagtattactgtaaaataataaatcatgaaattggctcctaatttcataaatgacttttactataatatacttcagtattagaatgtattataaaaataacatttgggtaataagagataattatttcaaatattaagttaaaaatattaactaatactagatatttgtttttctagatttatggaaatatcaccataaaaatgtaattatagacttatgaatatagacatctttaacatctcagtctgaggaaatttattgaaatcatattttatctctaccacttgacaaaggg

SEQ ID NO: 669047 - DNA, 662 bp, Homo sapiens
ttttaaagttctggtgtggtccaaatatcaaagctggcacttatctaggactacaaccaaattgtctttagaaaattcctacaaaatggcatatttgaagagaggcaaattcttcaactgagaaatctttttcaggaagaatgccaggaaatatcatgttcagttacccatggggtatacgcacataatagcttcaaaatactatgacaagctgcagatattctctgaagattgaataaagcaaccctattcatcagttttgggcttgctgcaagtagagaatgttttaagagggagggcgtaagatgcacatrttgtagcttgggaactattccacatgggtcaggaattcccagctcttacttcaaaattagtccagtctaagatacctgtcatttcggccatgtgggattgcgggatacccatcacctggtagcaagcctcgatctgctgtgtcaccaagggtttcgttggggccatgaagaccacctttcctgaagggaaccagcggtagaaattgtacatgaccacggcggcaataaaggtctttcccagtccggtaggcagacacaccagcgtattgcaaaacagagcagcccgggaaatgtgcagctggtagtcccgcactgggcaattggtagggtaaatccacagggcgcccg

SEQ ID NO: 669048 - DNA, 594 bp, Homo sapiens
gtttttattctaaaacaaaatgatgccaagagactcctcaaaagtctaattacatcttgatgttccaggaagtttctttaaaggcagaaaactatatttatataaattaatcaattatatcacattaattaatcattgcattccattcttaaactatgatattcatttattcattcaagttctttttttcatcacctyaccaatttattgttttttgtagtcagaacattaaaaatctattttagctaatttgaggtatgtgacacattgttattaactgtggtcacaaggcagtatgatagataagtaaaacattcccatagtctaactggaactttgtagcctttgatcaactgcttccctttcctcattcttccctggcctttcctagactctgctaaccacttttttactctgtttgtgagagtgacttttttagattacacatacgagtgagatcctacagtatttgtctttcggtgcctggcataattcacatagcaaaatgtcctgcaattcaattccattcatattgttgaaacttacagaggtttttaagactgtagaatatatttaattatatatatatattta

SEQ ID NO: 669049 - DNA, 666 bp, Homo sapiens
  misc_feature 2, 3, 4, 5, 6, 7, 8, 9, 10, 11, 12, 13, 14, 15, 16, 17, 18,19, 20, 21, 22, 23, 24, 25, 26, 27, 28, 29, 30, 31, 32,33, 34, 35, 36, 37, 38, 39, 40, 41, 42, 43, 44, 45, 46,47, 48, 49, 50, 51, 52, 53, 54, 55, 56, 57, 58, 59, 60,61: n = A,T,C or G
  misc_feature 62, 63, 64, 65, 66, 67, 68, 69, 70, 71, 72, 73, 74, 75, 76,77, 78, 79, 80, 81, 82, 83, 84, 85, 86, 87, 88, 89, 90,91, 92, 93, 94, 95, 96, 97, 98, 99, 100, 101: n = A,T,C or G
gnnnnnnnnnnnnnnnnnnnnnnnnnnnnnnnnnnnnnnnnnnnnnnnnnnnnnnnnnnnnnnnnnnnnnnnnnnnnnnnnnnnnnnnnnnnnnnnnnnnnccccagcagcttgcacaggcagggaagtttgatctttttcggattttgcrgttatattagatgagatgtccctgtaagctaattactttggcaaccaagagggcaccaacaattctgtcaggcatccatgggggcaccttaatagtgttttaaacaatgtgtacagaaggggttaaaagctacacagggaggagcagagcctgagggaaaagacactgcaggtgtgtggttaacaaggaactaattgggtaaccaggcaggaggagaagcaagcataaagctggtcaacaggcttgtgtagaattccagcagttagctggtgctgagcccttgaggagttgaaataaagacaagttgaatctggagtctattttttcctgtgatctttgctagaaactgcaaattgggacttgacagctttcttcgcctcctgttgctttgtttcaggtggtattgttttgaactagctaagagctgacattctggatgtctagcctgggtgtcttgtatccagacagaaatgtacatcaactcttaaagacatgttactctttcttctcctctt

SEQ ID NO: 669050 - DNA, 1723 bp, Homo sapiens
ttctgtgtaccaaataccttaataactgagaagaaattcatagtagccttaaaaggaaagaaaggaaactatgagcagataagatatcttgaggaatttccggacaagggacaggttgatttatgaatgatgaaaagtagattgtattaaattgattgagaagcaagagaacagagaaaatccaaagctcaaaatgcttcaaagaaaaacactttctgaaaaaaaccacttctgaattcagagcagattcagaaaaatggcaagtgaaagtgaacaaaaatgaagagggggagatgttgtctctaaataatcatcagggtaaatgattatacagtttcttactataattcttacatatgctaaacacaaggtagcactgtttaatggtttaagagtagaatataaaacctataaacaacattataataaaatgaactgcttattatcactagtatggcttgtgttataacatagaaaggcctagaaaacattattccaaagaggaatttgtgatgtttagactactgtcaatgaaagaaaggaggaaattatctgcccagctcctaagtgcagcaaacttctttactatctctgatggttaattttatgtgtcagcttgccatgggtgtctggatattggtcaaacattatttaggagtatgtctatgagcgtgttttggatgagattaacacttgaatcagaagactgagtaaagcagattgccctccctaatgtggggtgtggggggcccatccaatcagatgaagacttgaatagaataaaaaggctgacccttccaaaagtaagggacagtcttctaccgcctgactgccttgtgctgggacattggtttctttctgccttcaaaatcaagctgaaacattggctcttcctgggtcttgagcctatcagtaattgraatgaagccacgtgattggtttgcctggttttcaggccttcagactcactgaaatgataccaccaactcttctgtgtctccagcttgctgactgcacctctcgggacttgtcattctgtataatcgtgtgaggtaattctttataataaatctctctctcacccagataaatagatctttttctctgtgaatatatacatcctattggttctatttgtttatataggatggtaactaatacaaattttggcactaagagtgattccagaagaacagaattttaaggatgagttttaggaattagttctgggatatctggaattggatctctaagctgattaaatttataaacactaatgattttattttcagtagtaaaaagagcactaatagttcatggcatgatgtaacaatggagaaacacaaaatatcaccattggatactcaactacttacaagaagcaagaatctgtttaactatgtataagatactttgaaatatttttggcaaactaatgagtataatgagatgggctggttgcttctaatgtcactgaacatagtggagaaagaaaagaaaagaaaacgacgagctcaggcatttgagtttccaactcaagtgctgcataaatgacctaaaagcttctatgtgtgccctgaaaaagacccttagctctggtagctgcagggctgagattgctgagaatcaaatccagattctcattctgtgacttgctgaattacaatgcaagttgaactcccagccttgttaagtatgaactgttaaagtgaggatattgatt

SEQ ID NO: 669051 - DNA, 1723 bp, Homo sapiens
ttctgtgtaccaaataccttaataactgagaagaaattcatagtagccttaaaaggaaagaaaggaaactatgagcagataagatatcttgaggaatttccggacaagggacaggttgatttatgaatgatgaaaagtagattgtattaaattgattgagaagcaagagaacagagaaaatccaaagctcaaaatgcttcaaagaaaaacactttctgaaaaaaaccacttctgaattcagagcagattcagaaaaatggcaagtgaaagtgaacaaaaatgaagagggggagatgttgtctctaaataatcatcagggtaaatgattatacagtttcttactataattcttacatatgctaaacacaaggtagcactgtttaatggtttaagagtagaatataaaacctataaacaacattataataaaatgaactgcttattatcactagtatggcttgtgttataacatagaaaggcctagaaaacattattccaaagaggaatttgtgatgtttagactactgtcaatgaaagaaaggaggaaattatctgcccagctcctaagtgcagcaaacttctttactatctctgatggttaattttatgtgtcagcttgccatgggtgtctggatattggtcaaacattatttaggagtatgtctatgagcgtgttttggatgagattaacacttgaatcagaagactgagtaaagcagattgccctccctaatgtggggtgtggggggcccatccaatcagatgaagacttgaatagaataaaaaggctgacccttccaaaagtaagggacagtcttctaccgcctgactgccttgtgctgggacattggtttctttctgccttcaaaatcaagctgaaacattggctcttcctgggtcttgagcctatcagtaattggaatgaagccacgtgattggtttgcctggttttcaggccttcagactcactgaaatgataccaccaactcttctgtgtctccagcttgctgactgcacctctcgggacttgtcattctgtataatcgtgtgaggtaattctttataataaatctctctctcacccagataaatagatctttttytctgtgaatatatacatcctattggttctatttgtttatataggatggtaactaatacaaattttggcactaagagtgattccagaagaacagaattttaaggatgagttttaggaattagttctgggatatctggaattggatctctaagctgattaaatttataaacactaatgattttattttcagtagtaaaaagagcactaatagttcatggcatgatgtaacaatggagaaacacaaaatatcaccattggatactcaactacttacaagaagcaagaatctgtttaactatgtataagatactttgaaatatttttggcaaactaatgagtataatgagatgggctggttgcttctaatgtcactgaacatagtggagaaagaaaagaaaagaaaacgacgagctcaggcatttgagtttccaactcaagtgctgcataaatgacctaaaagcttctatgtgtgccctgaaaaagacccttagctctggtagctgcagggctgagattgctgagaatcaaatccagattctcattctgtgacttgctgaattacaatgcaagttgaactcccagccttgttaagtatgaactgttaaagtgaggatattgatt

SEQ ID NO: 669052 - DNA, 1723 bp, Homo sapiens
ttctgtgtaccaaataccttaataactgagaagaaattcatagtagccttaaaaggaaagaaaggaaactatgagcagataagatatcttgaggaatttccggacaagggacaggttgatttatgaatgatgaaaagtagattgtattaaattgattgagaagcaagagaacagagaaaatccaaagctcaaaatgcttcaaagaaaaacactttctgaaaaaaaccacttctgaattcagagcagattcagaaaaatggcaagtgaaagtgaacaaaaatgaagagggggagatgttgtctctaaataatcatcagggtaaatgattatacagtttcttactataattcttacatatgctaaacacaaggtagcactgtttaatggtttaagagtagaatataaaacctataaacaacattataataaaatgaactgcttattatcactagtatggcttgtgttataacatagaaaggcctagaaaacattattccaaagaggaatttgtgatgtttagactactgtcaatgaaagaaaggaggaaattatctgcccagctcctaagtgcagcaaacttctttactatctctgatggttaattttatgtgtcagcttgccatgggtgtctggatattggtcaaacattatttaggagtatgtctatgagcgtgttttggatgagattaacacttgaatcagaagactgagtaaagcagattgccctccctaatgtggggtgtggggggcccatccaatcagatgaagacttgaatagaataaaaaggctgacccttccaaaagtaagggacagtcttctaccgcctgactgccttgtgctgggacattggtttctttctgccttcaaaatcaagctgaaacattggctcttcctgggtcttgagcctatcagtaattggaatgaagccacgtgattggtttgcctggttttcaggccttcagactcactgaaatgataccaccaactcttctgtgtctccagcttgctgactgcacctctcgggacttgtcattctgtataatcgtgtgaggtaattctttataataaatctctctctcacccagataaatagatctttttctctgtgaatatatacatcctattggttctatttgttyatataggatggtaactaatacaaattttggcactaagagtgattccagaagaacagaattttaaggatgagttttaggaattagttctgggatatctggaattggatctctaagctgattaaatttataaacactaatgattttattttcagtagtaaaaagagcactaatagttcatggcatgatgtaacaatggagaaacacaaaatatcaccattggatactcaactacttacaagaagcaagaatctgtttaactatgtataagatactttgaaatatttttggcaaactaatgagtataatgagatgggctggttgcttctaatgtcactgaacatagtggagaaagaaaagaaaagaaaacgacgagctcaggcatttgagtttccaactcaagtgctgcataaatgacctaaaagcttctatgtgtgccctgaaaaagacccttagctctggtagctgcagggctgagattgctgagaatcaaatccagattctcattctgtgacttgctgaattacaatgcaagttgaactcccagccttgttaagtatgaactgttaaagtgaggatattgatt

SEQ ID NO: 669053 - DNA, 1723 bp, Homo sapiens
ttctgtgtaccaaataccttaataactgagaagaaattcatagtagccttaaaaggaaagaaaggaaactatgagcagataagatatcttgaggaatttccggacaagggacaggttgatttatgaatgatgaaaagtagattgtattaaattgattgagaagcaagagaacagagaaaatccaaagctcaaaatgcttcaaagaaaaacactttctgaaaaaaaccacttctgaattcagagcagattcagaaaaatggcaagtgaaagtgaacaaaaatgaagagggggagatgttgtctctaaataatcatcagggtaaatgattatacagtttcttactataattcttacatatgctaaacacaaggtagcactgtttaatggtttaagagtagaatataaaacctataaacaacattataataaaatgaactgcttattatcactagtatggcttgtgttataacatagaaaggcctagaaaacattattccaaagaggaatttgtgatgtttagactactgtcaatgaaagaaaggaggaaattatctgcccagctcctaagtgcagcaaacttctttactatctctgatggttaattttatgtgtcagcttgccatgggtgtctggatattggtcaaacattatttaggagtatgtctatgagcgtgttttggatgagattaacacttgaatcagaagactgagtaaagcagattgccctccctaatgtggggtgtggggggcccatccaatcagatgaagacttgaatagaataaaaaggctgacccttccaaaagtaagggacagtcttctaccgcctgactgccttgtgctgggacattggtttctttctgccttcaaaatcaagctgaaacattggctcttcctgggtcttgagcctatcagtaattggaatgaagccacgtgattggtttgcctggttttcaggccttcagactcactgaaatgataccaccaactcttctgtgtctccagcttgctgactgcacctctcgggacttgtcattctgtataatcgtgtgaggtaattctttataataaatctctctctcacccagataaatagatctttttctctgtgaatatatacatcctattggttctatttgtttatataggatggtaactaatacaaattttggcactaagagtgattccagaagaacagaattttaaggatgagttttaggaattarttctgggatatctggaattggatctctaagctgattaaatttataaacactaatgattttattttcagtagtaaaaagagcactaatagttcatggcatgatgtaacaatggagaaacacaaaatatcaccattggatactcaactacttacaagaagcaagaatctgtttaactatgtataagatactttgaaatatttttggcaaactaatgagtataatgagatgggctggttgcttctaatgtcactgaacatagtggagaaagaaaagaaaagaaaacgacgagctcaggcatttgagtttccaactcaagtgctgcataaatgacctaaaagcttctatgtgtgccctgaaaaagacccttagctctggtagctgcagggctgagattgctgagaatcaaatccagattctcattctgtgacttgctgaattacaatgcaagttgaactcccagccttgttaagtatgaactgttaaagtgaggatattgatt

SEQ ID NO: 669054 - DNA, 1723 bp, Homo sapiens
ttctgtgtaccaaataccttaataactgagaagaaattcatagtagccttaaaaggaaagaaaggaaactatgagcagataagatatcttgaggaatttccggacaagggacaggttgatttatgaatgatgaaaagtagattgtattaaattgattgagaagcaagagaacagagaaaatccaaagctcaaaatgcttcaaagaaaaacactttctgaaaaaaaccacttctgaattcagagcagattcagaaaaatggcaagtgaaagtgaacaaaaatgaagagggggagatgttgtctctaaataatcatcagggtaaatgattatacagtttcttactataattcttacatatgctaaacacaaggtagcactgtttaatggtttaagagtagaatataaaacctataaacaacattataataaaatgaactgcttattatcactagtatggcttgtgttataacatagaaaggcctagaaaacattattccaaagaggaatttgtgatgtttagactactgtcaatgaaagaaaggaggaaattatctgcccagctcctaagtgcagcaaacttctttactatctctgatggttaattttatgtgtcagcttgccatgggtgtctggatattggtcaaacattatttaggagtatgtctatgagcgtgttttggatgagattaacacttgaatcagaagactgagtaaagcagattgccctccctaatgtggggtgtggggggcccatccaatcagatgaagacttgaatagaataaaaaggctgacccttccaaaagtaagggacagtcttctaccgcctgactgccttgtgctgggacattggtttctttctgccttcaaaatcaagctgaaacattggctcttcctgggtcttgagcctatcagtaattggaatgaagccacgtgattggtttgcctggttttcaggccttcagactcactgaaatgataccaccaactcttctgtgtctccagcttgctgactgcacctctcgggacttgtcattctgtataatcgtgtgaggtaattctttataataaatctctctctcacccagataaatagatctttttctctgtgaatatatacatcctattggttctatttgtttatataggatggtaactaatacaaattttggcactaagagtgattccagaagaacagaattttaaggatgagttttaggaattagttctgggatatctggaattggatctctaagctgattaaatttataaacactaatgattttattttcagtagtaaaaagagcactaatagttcatggcatgatgtaacaatggagaaacacaaaatatcaccattggatactcaactacttacaagaagcaagaatctgtttaactatgtataagatactttgaaatatttttggcaaactaatgagtataatgagatgggctggttgcttctaatgtcactgaacatagtggagaaagaaaagaaaagaaaacgacgagctcaggcatttgagtttccaactcaagtgctgcataaatgacctaaaagcttctatgtgtgccctgaaraagacccttagctctggtagctgcagggctgagattgctgagaatcaaatccagattctcattctgtgacttgctgaattacaatgcaagttgaactcccagccttgttaagtatgaactgttaaagtgaggatattgatt

SEQ ID NO: 669055 - DNA, 1377 bp, Homo sapiens
aaaggaatattttattccatctaaaagctttaatataaaaaaggacttcacaaagctcacctgcaaagtaaaaccaggacaaaacctcagagcagatctctcagtaacctagagtattataaaatatgtaaagtttcaggtaataaactatgtttcaggtaaaagttggtaacatgaaagtatgtcagtctaacataatttagcaatagaaaataaacgttcattaagttcttcctgttttatttccttggatatacaggaggtagcgaagtcataaagtagtcaacttcatttgttgttaaaatattgtactgtcactattaagacactgtgttttgcaggctaaatttgtcatttgttctaaaattttagtagctggttgttgatataaaaagcaaaacaaacaaattaaatagattttcagcccctgaatatattaaaaatataaattgtatcctaattttcagaagtttacaattcctatagatacaaaatctaccaatagcgtggtttctagatgtaaaaggtatagttacaaaacaagtgctctgaaaacaagacactgaacctctaaattcagtgaatgccaattatcaaaataaaagtgaatgccaattatcaaaataaaaatacattttcaagaaagtcattaaatagcaatgccaaagaaactgacatactcttcaaaccaacttctttatgacactgggggaaaacattaaatcaaaaggcaatttaaattaaagcattaaaaayttacctgaaaaatgtcaactccatcctttttctttcaatgcttgtaagggaattcttacaagctttcccttacaagcattgaaagaaattccttacaagcattgaaaaaatcccttacaagcattgaaagaaatgtcagcaaacatgatgtccatttctcattaactttatttcctacttgttatcagaacgaaattaatagctacctgattcaaacccttcacatatttatttaactattactcctctttgacagaaggggaaactgagacacagagtaacttgtccaaggtaataatttctgccaggagatggtggagccagaatctgaaccctatacacccaaattaatggacgcattttaaaagggatgggatggaaaaggagcagttaatttttttccccaaaatagcttgcaaaaaaagattgttgtgaatgggaacaaaccgtttaaattacaaatgcaggtagatgagaatgcagagtacacaaactttacccctaaaaaagtaggggtatatttgttatatttgattacaaacactttgaacaacatcaaacccctgtgacggtcgactgagtaaataatttaatgtcaccgttcagacactgtattttaca

SEQ ID NO: 669056 - DNA, 2485 bp, Homo sapiens
gtagttttctaagatttgaacaattttctaaaatgtgtttactttgtgccttaaaaagttcaaaatgctgaccgggcgtggtggctcacacctgtaatcctcgcactttgggaggccgaggtgggcagatcacctgaggtcaagagtttgagatcagcctgaccaacatggaaaaaccccgtttctactaaaaatacaaaaaattagccaggcatggtggtgcacgcctgtaatctcagctacttgggaggctgaggcagtagaatcgcttgaacccgggaggcgcacccccgagagagccgagatagagcgccgttgcactccagcctgggcaacaagagtgaaactccatctcaaaaaaaaaaaaaaaaagttaacacgctgagcgcaattacatgtagttttttaaataaggtattgaccacaggttgtgattgtaggctatcatagttgcagatgttaggaaattggaccaaatacatatattgacccaggctaaatattctaaattggcattttaaaatagtctctgctaaaactgaccttaataattagtatgcgatagttttgccataataacagactatgcctaaatctcagtggcttaacatatcacaggctgatttctgacactgccagtcccatgtgtgttggtttgagagcttgctcatcacaatcactcagggacccatcctgttggtatctgcatctcaacaagcttttacggtcactctggtgaagggaaacaaacaaacatggtgattcacaacacaggcttttatagcttcatatttaattgatataggtcagttccactcacatttcgttagccaaagcaatggaaatgtggccatgccccacttcaaagagagtagggaattgcattccacaaatatattgaagggaacgagattctttatagcctaaatgattaccacagttccctcatggtttaatgtcttcctactgaaaagtaagtcccaaatcatccagataataaaaggttttacttagacatattctatttcataaaggcatttgcatgtgcttgctgggttttttattcattaaataatttatatagtaagtggtgctgatagcattccctgtcactaaagagttcaagcagagaccagtttgccaagtggtaggaggctgaagagaagattctagtactacgtgagtgactggactaggagaccattaacatttccttatgactctgaatacctgtcattccaaagatgacagtcctagtgacaaccatatatactgaagtatctggcatctcccagcttctaccccagctttcctcaatctgccacctgctttgtgttgttttccagaccaccttgttcctatgctgtataccatgtggtaacatcacgtgttccctgtgaatttccctgagaattagcattacagtactttaaaccaagcattcttcataacgttgaatgaatataccaatactttaatcttcatagaattttacattcttgccttccctcatggagcataagcccaggcaaccattccaagataatggcagactctgaagtgaacatactatatttgtaagaactataaaagatagcatcttgtctaatccagtgtattattttgcacaggtagctggtaaattcattctttgctttgtgatgcatttttctgtcactgaattaatccctctttgaatataatatcaaccagtctagaccatcattgatatgtgtggctggccaaggtattagaatttctcttgaatcttaattccaaaattacatgaagcataatttctaagctaatgcagtgctataataatttaagacaactgccattccaatctatcttggagcctataaaaacagactttataggaagtctgcttttaagaggatgaaatataaaatggcagtctgttgagagagtagcttggcaatgtttagcaaaattttcaagactttgtattctttttagaccccaaaagaacactcctaataatctatcttacagaaataatcatgaatatgacagattttactgcaagataatttatcacaaaattgttaataattatgaaaaataaaattcctgatactaaactacagagtattggttttaaaattcttgtccctttatatagtggaccactatgcattgattaaagaattatattgttggccggacgcggcggctcacgcctgtaatcccagcactttgggaggccgaggcgggcggatcacgaggtcaggagattgagaccatcctggctaacayggtgaaaccacgtctctactaaaaatataaaaacaaaattagctgggcgtggtggcgggtgcctgtagtcccagctacttgggaggctgaggcgggagaatggcgtgaacccgggaggcagagcttgcagtgagccgagatcgggccactgcactccagcctgggcaacagagcaagactctgtctcaaaaaaaaaaaaaaattg

SEQ ID NO: 669057 - DNA, 606 bp, Homo sapiens
tcagttagcagcattttattttgtccctttggtgatatcatgttttactgattgttcttggggctgcgtattgagatatacacatttgtagaagtaggtacttattccagtctttgcagattggctttgctggaaaagctcttcaacagtccattcagagattttggacaggccattaagcttggttctgaatcgcagggtcactacaggggtggggtatgcccaaaacctggggctgctgaggcctgcctgctgctctggcctgtccagatcctatagacactgaagtcaagccagcggtagtacaactgggagaccaactctgcctcacaggcttgaagtctgggactgcagggtcccacccaggactgggactcagtttgtggatactactytggagtctggggctgtgggtgcctgccagcctgcctgatgctggatttcgctgtggtgggcccagggttggggtccaaggcaaagtcctgttctcacacccctctctttcccccaagtggatggtgtctctctcaatgttgtgatggttgggggaggggtggtgcaggtaatgtaaaattctcctttctaccattttcaatgcatctttta

SEQ ID NO: 669058 - DNA, 603 bp, Homo sapiens
gtaaagggaaatcataatcttttcagggcttaagaagactaaagttcttatttcagccccagaatgactaatccaaggccacacagctggttagtgtgaaagccaggactagaaacccacatttcctgatctgtaggaaaaaagcaaaagctgagctgtatcaggatctaaaactgcatcttatacgaaaaggtagagagygatgggggaggcaaagtagctaaactctagcacagagaggcaatttttggcatcctcatccattttcctatccattgctttagccacagcattgaagcacagcctttaccctctgccccactataaaccattctctggaaccagcacagcctctacttctgggatagtaattctgcaactcttccatacagtagcagattagcatcattttcttttttctttttttttttcacatcaaagattttattttttttatgtatatttttattttactttagggtacatgtgcacaatgtgcaggtttgttacatatatatacatgtgccatgttggtgtgctgcactcattaattcatcatttacattaggtatatctcctaatgctatctctcccccctcccct

SEQ ID NO: 669059 - DNA, 963 bp, Homo sapiens
ggttcgggtgattcttgtgcttcagcctctagagtagctgggattacgggkgcacaccaccatggacagctaatttttttaatgtatttttagtagagacagggttttgccatgttggctagactggtctcgaactcctggcctcaagtgatctacctgcctcggcctcccaaagtgccaggattacagtcgcaagccactgcacctggccaaaattttgctgttttttttcattcccgtgatccttacattttgatagcattataaattttttccctaaaaattaaaggggaaagatgaagtagaagtaaaactaaaagtgtttgtttttcagggtgtttgtttgtttgtttagtaattttagcacaagaaccaggtgaaccaggttgtttgacttcattcattcattttctttccaacatgaatattatgattgactatgcattaatcagagtcttttgcagatatgagaggggagggggttggaggtgagaggagagggagttggagctaaaggcaaacttttagtcaccccttccacagttcttcttggaacaatcgtaaatatctgccatgtgttgttcacttaggtaacatttaaagcaccaggccagatgctgtgagagacataaagcattatgtaagtcagagatccctgttgattataatcaggattgaaagataacacatatgtctataggaagttaaataagaactttggagtctgactgaaagaaaatgagtgcacaaaaagcaaatcagactgggcttaagagggtttaagagatggtgattttctcactctgtcattgacataatgttgcctgtggttaagcacgaaatcaatggctgagatggtaagtgttgcatggcttattggtagatcaaagcatgactgttatgaatgattgactgagttgaatacagtcatctgagaaggcttcatggcaggggtagaaactg

SEQ ID NO: 669060 - DNA, 963 bp, Homo sapiens
ggttcgggtgattcttgtgcttcagcctctagagtagctgggattacgggggcacaccaccatggacagctaatttttttaatgtatttttagtagagacagggttttgccatgttggctagactggtctcgaactcctggcctcaagtgatctacctgcctcggcctcccaaagtgccaggattacagtcgcaagccactgcacctggccaaaattttgctgttttttttcattcccgtgatccttacattttgatagcattataaattttttccctaaaaattaaaggggaaagatgaagtagaagtaaaactaaaagtgtttgtttttcagggtgtttgtttgtttgtttagtaattttagcacaagaaccaggtgaaccaggttgtttgacttcattcattcattttctttccaacatgaatattatgattgactatgcattaatcagagtcttttgcagatatgagaggggagggggttggaggtgagaggagagggagttggagctaaaggcaaacttttagtcaccccttccacagttctycttggaacaatcgtaaatatctgccatgtgttgttcacttaggtaacatttaaagcaccaggccagatgctgtgagagacataaagcattatgtaagtcagagatccctgttgattataatcaggattgaaagataacacatatgtctataggaagttaaataagaactttggagtctgactgaaagaaaatgagtgcacaaaaagcaaatcagactgggcttaagagggtttaagagatggtgattttctcactctgtcattgacataatgttgcctgtggttaagcacgaaatcaatggctgagatggtaagtgttgcatggcttattggtagatcaaagcatgactgttatgaatgattgactgagttgaatacagtcatctgagaaggcttcatggcaggggtagaaactg

SEQ ID NO: 669061 - DNA, 1321 bp, Homo sapiens
taaataaataaataaataaaaataaaataaaataggaataataatagtacgtaactcgcaaggttgatgtgagaattaaataagatgatgccattaaatgtctggcacaaagtgaatatacaataaaatattaactaacatcagctaaactccatgaaggtaggagccatatctggactaatcactactgtgtacccacttcctgggagacaagagatactcaataaatgtgttcagtggatgaaacaattaaccacaatctgattttgggatcattgaaacaaaaacaggggaaggcaggacagataggagagtgcrctatattttttaattgattttttaatgtaataaagttgtcattgcatttttgaaacatttgtataagatagtaaacctctgactaagattgtttcatcactgagaaaattattttttctttcacaagttcatgaacacttctctcaaatccacacttgtcagggttgtttttcagaatttatgtttcttattttttattgagaaaaatgaaaacaactgtataccatcccactttgaataatttgaaacctgaaactaattacttctatatccactcctcatactatgcatgccaatgacttgaaggaatttttaggaattttaggaatgccaatgacttgaagaaaaatgaaacaagccatcatggttctcaaccacacctgctcagtccttgtctttgcttcctttctcctacctatctgccaccctggaaaggtgtggtgtggagactaaaatgctaaaaaacaaaaataagaggaagtgggcactgcactggacacagacttgttcccacccacttggaattaaattaggcagcaccacgacaaccgatagagaaaccaaagggaacttccacctctcacttcaccacatactcctagatgcatgtgcagccctatgtgagcaggagctggccatttccaaagaacaggcaacctggagcgctggggaggctgcctggcttgcatacacggaaatcctcccagccaaatccttagggaagggaaagctgatatgcatgacctggagggctgaggatcaaggttcagggcacacatagtgactttcatgggtacgtggatatatggctacaaacaaatgggggcaaattaacaagaataacttcaaaggagtatccttaaggagaaaagttaaatgatacaaaccacatatattgaaagtaacaaatagaggtggagcaagatggctgaatggaagcctccagtgatcatcttccctgcaggaataccaaagtgaacagctatccacataagaaagtacc

SEQ ID NO: 669062 - DNA, 1321 bp, Homo sapiens
taaataaataaataaataaaaataaaataaaataggaataataatagtacgtaactcgcaaggttgatgtgagaattaaataagatgatgccattaaatgtctggcacaaagtgaatatacaataaaatattaactaacatcagctaaactccatgaaggtaggagccatatctggactaatcactactgtgtacccacttcctgggagacaagagatactcaataaatgtgttcagtggatgaaacaattaaccacaatctgattttgggatcattgaaacaaaaacaggggaaggcaggacagataggagagtgcactatattttttaattgattttttaatgtaataaagttgtcattgcatttttgaaacatttgtataagatagtaaacctctgactaagwttgtttcatcactgagaaaattattttttctttcacaagttcatgaacacttctctcaaatccacacttgtcagggttgtttttcagaatttatgtttcttattttttattgagaaaaatgaaaacaactgtataccatcccactttgaataatttgaaacctgaaactaattacttctatatccactcctcatactatgcatgccaatgacttgaaggaatttttaggaattttaggaatgccaatgacttgaagaaaaatgaaacaagccatcatggttctcaaccacacctgctcagtccttgtctttgcttcctttctcctacctatctgccaccctggaaaggtgtggtgtggagactaaaatgctaaaaaacaaaaataagaggaagtgggcactgcactggacacagacttgttcccacccacttggaattaaattaggcagcaccacgacaaccgatagagaaaccaaagggaacttccacctctcacttcaccacatactcctagatgcatgtgcagccctatgtgagcaggagctggccatttccaaagaacaggcaacctggagcgctggggaggctgcctggcttgcatacacggaaatcctcccagccaaatccttagggaagggaaagctgatatgcatgacctggagggctgaggatcaaggttcagggcacacatagtgactttcatgggtacgtggatatatggctacaaacaaatgggggcaaattaacaagaataacttcaaaggagtatccttaaggagaaaagttaaatgatacaaaccacatatattgaaagtaacaaatagaggtggagcaagatggctgaatggaagcctccagtgatcatcttccctgcaggaataccaaagtgaacagctatccacataagaaagtacc

SEQ ID NO: 669063 - DNA, 2948 bp, Homo sapiens
taattctcactccgtgagataggtactaatgcataggtgctaattactaatgtgtgtgtgtgtgtgtgtatgtgtgtgtgtgtgtgtgtgtatgtatgtrtgtgtgcatatatatatatatatatatatatatatatatatatatatatgggttaggacatacgtatatatatgggttaggacagagcttagcctgtggtaggttctctattaacacctaagtattactccattttcatactgctataaagaactgccctagactgggtaatttataaaggaaagaggtttaattgactcacagttcagcatagctggggaggcctcaggaaacttacaatcacggcggaaggcaccgcttcactaggcagcaggaaggagaagtgccaagtgaagggggaagaatcccttataaaaccatcagatctcataagaactcactatcacgaaaacggcacgggggaaaccacccccatgaatcaattacctcgacctggtctctcctttgagacgtgcagattatggggattatggggattacaaatcaagataagatttggtcggggacacaaagtctaaccatatcaacctactagtataatttcttattatggaatcaagtgttgagacacgtcggtttccttgaacacttatttatttaatatttatataaatctttgtgccaggtgttgctacagctggaagatataaattgcattaatttagattggatcaacggttcacgggaatacatccatgctgtaaacaatctccgtgttgttggtgctgaggtggcttattttattgatgttctcatggtaagaagagttgatttttttttaattatattgaattggttttggatattaacactcagaagttgggacaatttaatgtctttttttattagcttagacaggtactgaacatgtgaaataataagcatttgtatatggcagacaaaaaaggaaaagtttcttcgcagtaaagagtctgtggttatttgaagcaccactaggtggcagtgtgtctacacaggctcatcactaaaaactgcccccgcaaggtcactgccttggtcagcatgttagaccacctcaatcagtttcatcaattgtaaatctatccttagaattataaattgttaccatccttcaaatattatttgtttagaatatgacatgtattttcacacaaaaacagggttctgtgcctgtgaattagttaggtctgtaggccagtccagacacaactatttaacacacatattctctaaaggaattaaatagaccttgctatttattaggcctatactctgcgacattcacgaatctccaaatgctttctaaaaagtaatttcccaccctaaaatgcagtgtagtaaaatctaaagatgcataatcctttcagatttttaaggagggttcattcattcattcaacaaatatatatttcactctgcacttactgtgggctaggcatggaagatatgacttgtaagtaagacagtgtttctgctctgacaaaatgtacactctagtaggcaatggaggcacacacagaaacaaatgaacaagaaaatgtcagttggtgacaagtactgggtgaagaaaatgcaaggcagtagaatggagaatggcagaagcagaaacaaattgtatgagcaaccaggttaggtgatatttgaacattgaccactgtcagtaaacatcctgaagaaggaattagggatccaaagactcatttatgccccgacacttctctatcttctctttccactctatcagggaagactaaggtacaagatctttagagaaagtctttgaaaggatgaaatcagattcatcttcatcttctctttataaaaaaaaaaagccagctgtaagcttttgtgagtttctttattgaccttagggcctgagctgtgggctttcctatgtccaataaataaataatagtggttcataggaagctgacaggagatgtttgcagaactgaagggaaaaatgtttgttgaattaaaatgttcattgaattgaataggcagccttgaagtgggaaaagggtttagggtgagtgggctccagggcctctggggataattcaggattcaagcttaaagaaggagcagctaaaggaacagctgagtctcttctccacctctctttctgtcatctcatcacaagttactagcccaccacaattcaccacctggattggtactgaggcaagcaggtgcttgggaatggggtaggaagatggggaagaaggagaagaatgaaggggataagggctgagagtgatctcaaataccaacctatataaggagataggaaagaaaatagtcatttaaaatagcggcaacagtcggccgggagtggtggctaatgcctgtaatcccagcactttgggaggccaaggcgggtagatcacaaggtcaggagatcgagaccatcctggcgaacaaaatgaaaccccgtctttactaaaaatacaaaaaattagctgggtgtgttggcgggcacctgtagtcccagctactcgggaggctgaggcaggagaatggtgtgaacccgggaggcggagcttgcagtaagccgagatggcgccgctgcactccagcttgggccagagtgcgacgctgcgtctcaaaaaaaaaaaaaaaaaaaaaaaaaaatagtggcaacagtagaggaagggatgttctaatgaccatgtagcattcattggcagttattcacatatgtaaatgagagagaaaatattctttgttctgtgacttataaaactgtcataactggtggaaaaaaatggaatatttgatcaaatgaaaaatgtatgcaagtataaatcaattgcttgattttcatgataattatgagagcctgaaacttaggtgaaactaaaaatgcttgctcaggagtgacattattaagataataggaata

SEQ ID NO: 669064 - DNA, 2948 bp, Homo sapiens
taattctcactccgtgagataggtactaatgcataggtgctaattactaatgtgtgtgtgtgtgtgtgtatgtgtgtgtgtgtgtgtgtgtatgtatgtgtgtgtgcatatatatatatatatatatatatatatatatatatatatatgggttaggacatacgtatatatatgggttaggacagagcttagcctgtggtaggttctctattaacacctamgtattactccattttcatactgctataaagaactgccctagactgggtaatttataaaggaaagaggtttaattgactcacagttcagcatagctggggaggcctcaggaaacttacaatcacggcggaaggcaccgcttcactaggcagcaggaaggagaagtgccaagtgaagggggaagaatcccttataaaaccatcagatctcataagaactcactatcacgaaaacggcacgggggaaaccacccccatgaatcaattacctcgacctggtctctcctttgagacgtgcagattatggggattatggggattacaaatcaagataagatttggtcggggacacaaagtctaaccatatcaacctactagtataatttcttattatggaatcaagtgttgagacacgtcggtttccttgaacacttatttatttaatatttatataaatctttgtgccaggtgttgctacagctggaagatataaattgcattaatttagattggatcaacggttcacgggaatacatccatgctgtaaacaatctccgtgttgttggtgctgaggtggcttattttattgatgttctcatggtaagaagagttgatttttttttaattatattgaattggttttggatattaacactcagaagttgggacaatttaatgtctttttttattagcttagacaggtactgaacatgtgaaataataagcatttgtatatggcagacaaaaaaggaaaagtttcttcgcagtaaagagtctgtggttatttgaagcaccactaggtggcagtgtgtctacacaggctcatcactaaaaactgcccccgcaaggtcactgccttggtcagcatgttagaccacctcaatcagtttcatcaattgtaaatctatccttagaattataaattgttaccatccttcaaatattatttgtttagaatatgacatgtattttcacacaaaaacagggttctgtgcctgtgaattagttaggtctgtaggccagtccagacacaactatttaacacacatattctctaaaggaattaaatagaccttgctatttattaggcctatactctgcgacattcacgaatctccaaatgctttctaaaaagtaatttcccaccctaaaatgcagtgtagtaaaatctaaagatgcataatcctttcagatttttaaggagggttcattcattcattcaacaaatatatatttcactctgcacttactgtgggctaggcatggaagatatgacttgtaagtaagacagtgtttctgctctgacaaaatgtacactctagtaggcaatggaggcacacacagaaacaaatgaacaagaaaatgtcagttggtgacaagtactgggtgaagaaaatgcaaggcagtagaatggagaatggcagaagcagaaacaaattgtatgagcaaccaggttaggtgatatttgaacattgaccactgtcagtaaacatcctgaagaaggaattagggatccaaagactcatttatgccccgacacttctctatcttctctttccactctatcagggaagactaaggtacaagatctttagagaaagtctttgaaaggatgaaatcagattcatcttcatcttctctttataaaaaaaaaaagccagctgtaagcttttgtgagtttctttattgaccttagggcctgagctgtgggctttcctatgtccaataaataaataatagtggttcataggaagctgacaggagatgtttgcagaactgaagggaaaaatgtttgttgaattaaaatgttcattgaattgaataggcagccttgaagtgggaaaagggtttagggtgagtgggctccagggcctctggggataattcaggattcaagcttaaagaaggagcagctaaaggaacagctgagtctcttctccacctctctttctgtcatctcatcacaagttactagcccaccacaattcaccacctggattggtactgaggcaagcaggtgcttgggaatggggtaggaagatggggaagaaggagaagaatgaaggggataagggctgagagtgatctcaaataccaacctatataaggagataggaaagaaaatagtcatttaaaatagcggcaacagtcggccgggagtggtggctaatgcctgtaatcccagcactttgggaggccaaggcgggtagatcacaaggtcaggagatcgagaccatcctggcgaacaaaatgaaaccccgtctttactaaaaatacaaaaaattagctgggtgtgttggcgggcacctgtagtcccagctactcgggaggctgaggcaggagaatggtgtgaacccgggaggcggagcttgcagtaagccgagatggcgccgctgcactccagcttgggccagagtgcgacgctgcgtctcaaaaaaaaaaaaaaaaaaaaaaaaaaatagtggcaacagtagaggaagggatgttctaatgaccatgtagcattcattggcagttattcacatatgtaaatgagagagaaaatattctttgttctgtgacttataaaactgtcataactggtggaaaaaaatggaatatttgatcaaatgaaaaatgtatgcaagtataaatcaattgcttgattttcatgataattatgagagcctgaaacttaggtgaaactaaaaatgcttgctcaggagtgacattattaagataataggaata

SEQ ID NO: 669065 - DNA, 2948 bp, Homo sapiens
taattctcactccgtgagataggtactaatgcataggtgctaattactaatgtgtgtgtgtgtgtgtgtatgtgtgtgtgtgtgtgtgtgtatgtatgtgtgtgtgcatatatatatatatatatatatatatatatatatatatatatgggttaggacatacgtatatatatgggttaggacagagcttagcctgtggtaggttctctattaacacctaagtattactccattttcatactgctataaagaactgccctagactgggtaatttataaaggaaagaggtttaattgactcacagttcagcatagctggggaggcctcaggaaacttacaatcacggcggaaggcaccgcttcactaggcagcaggaaggagaagtgccaagtgaagggggaagaatcccttataaaaccatcagatctcataagaactcactatcacgaaaacggcacgggggaaaccacccccatgaatcaattacctcgacctggtctctcctttgagacgtgcagattatggggattatggggattacaawtcaagataagatttggtcggggacacaaagtctaaccatatcaacctactagtataatttcttattatggaatcaagtgttgagacacgtcggtttccttgaacacttatttatttaatatttatataaatctttgtgccaggtgttgctacagctggaagatataaattgcattaatttagattggatcaacggttcacgggaatacatccatgctgtaaacaatctccgtgttgttggtgctgaggtggcttattttattgatgttctcatggtaagaagagttgatttttttttaattatattgaattggttttggatattaacactcagaagttgggacaatttaatgtctttttttattagcttagacaggtactgaacatgtgaaataataagcatttgtatatggcagacaaaaaaggaaaagtttcttcgcagtaaagagtctgtggttatttgaagcaccactaggtggcagtgtgtctacacaggctcatcactaaaaactgcccccgcaaggtcactgccttggtcagcatgttagaccacctcaatcagtttcatcaattgtaaatctatccttagaattataaattgttaccatccttcaaatattatttgtttagaatatgacatgtattttcacacaaaaacagggttctgtgcctgtgaattagttaggtctgtaggccagtccagacacaactatttaacacacatattctctaaaggaattaaatagaccttgctatttattaggcctatactctgcgacattcacgaatctccaaatgctttctaaaaagtaatttcccaccctaaaatgcagtgtagtaaaatctaaagatgcataatcctttcagatttttaaggagggttcattcattcattcaacaaatatatatttcactctgcacttactgtgggctaggcatggaagatatgacttgtaagtaagacagtgtttctgctctgacaaaatgtacactctagtaggcaatggaggcacacacagaaacaaatgaacaagaaaatgtcagttggtgacaagtactgggtgaagaaaatgcaaggcagtagaatggagaatggcagaagcagaaacaaattgtatgagcaaccaggttaggtgatatttgaacattgaccactgtcagtaaacatcctgaagaaggaattagggatccaaagactcatttatgccccgacacttctctatcttctctttccactctatcagggaagactaaggtacaagatctttagagaaagtctttgaaaggatgaaatcagattcatcttcatcttctctttataaaaaaaaaaagccagctgtaagcttttgtgagtttctttattgaccttagggcctgagctgtgggctttcctatgtccaataaataaataatagtggttcataggaagctgacaggagatgtttgcagaactgaagggaaaaatgtttgttgaattaaaatgttcattgaattgaataggcagccttgaagtgggaaaagggtttagggtgagtgggctccagggcctctggggataattcaggattcaagcttaaagaaggagcagctaaaggaacagctgagtctcttctccacctctctttctgtcatctcatcacaagttactagcccaccacaattcaccacctggattggtactgaggcaagcaggtgcttgggaatggggtaggaagatggggaagaaggagaagaatgaaggggataagggctgagagtgatctcaaataccaacctatataaggagataggaaagaaaatagtcatttaaaatagcggcaacagtcggccgggagtggtggctaatgcctgtaatcccagcactttgggaggccaaggcgggtagatcacaaggtcaggagatcgagaccatcctggcgaacaaaatgaaaccccgtctttactaaaaatacaaaaaattagctgggtgtgttggcgggcacctgtagtcccagctactcgggaggctgaggcaggagaatggtgtgaacccgggaggcggagcttgcagtaagccgagatggcgccgctgcactccagcttgggccagagtgcgacgctgcgtctcaaaaaaaaaaaaaaaaaaaaaaaaaaatagtggcaacagtagaggaagggatgttctaatgaccatgtagcattcattggcagttattcacatatgtaaatgagagagaaaatattctttgttctgtgacttataaaactgtcataactggtggaaaaaaatggaatatttgatcaaatgaaaaatgtatgcaagtataaatcaattgcttgattttcatgataattatgagagcctgaaacttaggtgaaactaaaaatgcttgctcaggagtgacattattaagataataggaata

SEQ ID NO: 669066 - DNA, 738 bp, Homo sapiens
tgaaacaaagtttgttttaagtatttgtatgtgaaatattctgcttgtggcatcatgttagtgctyaaaatgtttcagattttggagaagtttagattttagatttttggattcgagatggtcaacttgcatcttatttaattggcacaaccctataattttattttggttactgtcctgtttctacagatcaatcatctgggcttagaaaggttaagtacttgtttaaagttaagcaactaccaagcagcagaacgaggactaaaacccaagaagattcagaattcaaaccggtggttgaactgaatgttagatgtgacgactgtcttcttaccaccatactatctcaaccaactacgtgatactttacaacaaaggggttgatctctttcaacattaaaattatttgattctagtttggttaaaataaatcaactaattttaatgtttgcttataggcacaatattaaacatggatggtaaaagtagccaaaatcactaactccttacattgtaatgtctaaggagtccatagtataaagagcaaacatgtcaatgaatactgagttaatgtttaagaaatgtccacagactaacagccctccagaaaactgtgactgaagtggaaaaaaaatggacattccaactgacattaataattagttaattcattcaattattgagtatctactatgagtcagctacagaatttggaaatttgtatatattttctcattt

SEQ ID NO: 669067 - DNA, 648 bp, Homo sapiens
tgcaaggttaatgagattacataaaatcctttagtactgaagtggaattccagtgggaactcataatccattttttctttttctaaaataaaaagcttttgtacagtctagaaacaataaccagtccagtactgatgaacaccctaacacccaaattgtgaccyccacttgccatttcccaataaaaataaccaaagcttcttagagaaatggctgacttcagattgaagatgaggccagcacatcttgtctgacctgaaagcaaactgtcaaggattacagggtcatgttaaagagactaaggagctgacttaaagaggctcatacttattgcagatgggacgctatgagcatcaataaatcatcaataaacagtagttatatggcaatggccacagatggaaacatttaaaaatttgtttactcataagttcaaaacgatactagaaatcaaaacaaaaagtttattcatcacctttggaggatgataaactcattactttgaaaattggcaaataaatggtaaatcattgatcctgtttttcctatatgaattgtaactcacagtaattagttattaaagaggcaagtaatagtaaatagagaggcaaattcctctttatagaaatattctagctaatacatgaa

SEQ ID NO: 669068 - DNA, 648 bp, Homo sapiens
tgcaaggttaatgagattacataaaatcctttagtactgaagtggaattccagtgggaactcataatccattttttctttttctaaaataaaaagcttttgtacagtctagaaacaataaccagtccagtactgatgaacaccctaacacccaaattgtgacctccacttgccatttcccaataaaaataaccaaagcttcttagagaaatggctgacttcagattgaagatgaggccagcacatcttgtctgacctgaaagcaaactgtcaaggattacagggtcatgttaaagagactaaggagctgacttaaakaggctcatacttattgcagatgggacgctatgagcatcaataaatcatcaataaacagtagttatatggcaatggccacagatggaaacatttaaaaatttgtttactcataagttcaaaacgatactagaaatcaaaacaaaaagtttattcatcacctttggaggatgataaactcattactttgaaaattggcaaataaatggtaaatcattgatcctgtttttcctatatgaattgtaactcacagtaattagttattaaagaggcaagtaatagtaaatagagaggcaaattcctctttatagaaatattctagctaatacatgaa

SEQ ID NO: 669069 - DNA, 1114 bp, Homo sapiens
attaaatcatgcatttaatgtaattcttggccaacagaagaacacaataagaaattattattgggtttaagactagaactttagtaaatgtacacatttgattataataaattttcagacttgagtctgtgaagtcatccatattttcttttgagtttatattcagttatagtattgtatctggtcaaattaacatagaaatgagtttacaagattataataggctaattggtggtgatcaattttccrattttagataattatatttaaagaaaaaataactacaatgagtttggaaatatatttgttattgattgacatttgtaaaattcattgtcatttttcttactgatgatttatgcaggttaattttgtttatcttttatgacaaatagaatatctattagatctataacttaatattattttactaccccactacatttctcccccaaaaaatattttagtgattatgaagtgggtttgttattgcatttaatttctgtcaaattttcccctgtgatatatatataagaattaactttaacattcaaatccttagacaattttatcttgtttttatacattttcatgctatttcttttttcttagtttcaaggtgtgaaatatgtgtttgagcttactattttattttgtgttttttgatagatttatggatattccactactagtcatgggcacaatagtcaaaagtgacataaaaaaacaagaacatttcgtcagttcaaatattttttcttctactttgtctctcccacagcacgtggaattctgggagatacaattcaaattgagatttgggtggggacacagctaaaccatatcattccacccctggtccctccaaatctcatgttctcacatttcaaaaccaatcatgccttcccaacagtcccccgaagttttaactaatttcagcattaacccaaaagtccacagtccaaagtctcatctgaaacaagggaaatcccttccacctatgagcctgtaaaatcaaaagcaagctaattacttcctagatacaatgcgggtacaggtattggggtaaatacagccattccaagtgagagaaattggccaaaaccaaggggtt

SEQ ID NO: 669070 - DNA, 1114 bp, Homo sapiens
attaaatcatgcatttaatgtaattcttggccaacagaagaacacaataagaaattattattgggtttaagactagaactttagtaaatgtacacatttgattataataaattttcagacttgagtctgtgaagtcatccatattttcttttgagtttatattcagttatagtattgtatctggtcaaattaacatagaaatgagtttacaagattataataggctaattggtggtgatcaattttccaattttagataattatatttaaagaaaaaataactacaatgagtttggaaatatatttgttattgattgacatttgtaaaattcattgtcatttttcttactgatgatttatgcaggttaattttgtttatcttttatgacaaatagaatatctattagatctataacttaatattattttactaccccactacatttctcccccaaaaaatattttagtgattatgaagtgggtttgttattgcatttaatttctgtcaaattttcccctgtgatrtatatataagaattaactttaacattcaaatccttagacaattttatcttgtttttatacattttcatgctatttcttttttcttagtttcaaggtgtgaaatatgtgtttgagcttactattttattttgtgttttttgatagatttatggatattccactactagtcatgggcacaatagtcaaaagtgacataaaaaaacaagaacatttcgtcagttcaaatattttttcttctactttgtctctcccacagcacgtggaattctgggagatacaattcaaattgagatttgggtggggacacagctaaaccatatcattccacccctggtccctccaaatctcatgttctcacatttcaaaaccaatcatgccttcccaacagtcccccgaagttttaactaatttcagcattaacccaaaagtccacagtccaaagtctcatctgaaacaagggaaatcccttccacctatgagcctgtaaaatcaaaagcaagctaattacttcctagatacaatgcgggtacaggtattggggtaaatacagccattccaagtgagagaaattggccaaaaccaaggggtt

SEQ ID NO: 669071 - DNA, 656 bp, Homo sapiens
tctgctcactgtatctgcatgataggaatcagctcatcttcctatacatcagtactaaaacaacctcactcctacctgaggccctgtgtgctgtctgtagatggtccatcttctcacttcactcaggactcaaatgtctcctcttcacaggctacgctacttaaaatatttttctatatgttctttcaaaattcttatcaaaaatgttactagtaatttaggtgttctgtttttttttttttggtctagatttcccattaaaatgtaaattcagamagggcaaggacattgttgttatagctcagcatctggaattgcggtggcagctcagtaaatatgtgatgtatgagtgaataaacaaaagttgaaaagtctattaaaatatcttaaaatttgacaataaaagtggtttagaaaaacagccacagattacaaataaatgaccgagtttactagagttaaatagcatctccaggtggatagtgtaaataaaaaataataagaaaaaagttaaacagtactgatatttacaaatacattattaaacatgtttaactattgtaataatcttggtaataagcgtaataatcctgtaataagagttggtaagtgttttctaaccaagtatgaccaaacaagtaccacccttctactat

SEQ ID NO: 669072 - DNA, 656 bp, Homo sapiens
tctgctcactgtatctgcatgataggaatcagctcatcttcctatacatcagtactaaaacaacctcactcctacctgaggccctgtgtgctgtctgtagatggtccatcttctcacttcactcaggactcaaatgtctcctcttcacaggctacgctacttaaaatatttttctatatgttctttcaaaattcttatcaaaaatgttactagtaatttaggtgttctgtttttttttttttggtctagatttcccattaaaatgtaaattcagaaagggcaaggacattgttgttatagctcagcatctggaattgcggtggcagctcagtaaatatgtgatgtatgagtgaataaacaaaagttgaaaagtctattaaaatatcttaaaatttgacaataaaagtggtttagaaaaacagccacagattacaaataaatgaccgagtttactagagttaaatagcatctccaggtggatagtgtaaataaaaaataataagaaaaaagttaaacagtactgatatttacaaatacattattaaacatgtttaactattgtaataatcttggtaataagcgtaataatcctgtaataagagttggtaagtgttttctaaccaagtatgaccaaacaagtaccacmcttctactat

SEQ ID NO: 669073 - DNA, 563 bp, Homo sapiens
tgcagataatttgacccatttagtacacttgattagtatccagctgtctgggatgtttcctagcagaaaattatttgggaaaacaaagaaagaaaataaattaatgtgtattgaacatttgtaatgcatccaacacttagcttactttatttaattgaattctaatacaaccttaaggtaagtattattaacaattgtagctctgaaaaggtaagtgatatttactcattcattaagaatttattgagtgtcattaagaatttattgagtgctaagtatatgccagactttccttattctggaacttggaaaacattgccaaatagaaaaatattcctgcattcatggacgactctatgatgtgatataaaatagacagggtcaagattagaagccaagattaaattaggctattattcagatattttgaacttccactataccatgatacttgttttttctttttttactgtctctcctctckctctctctttgtgtgtgtgtgtacgtgtgtgtgtgtgtatgattgaacaaataatatttaatctttgtgatgaaaaaag

SEQ ID NO: 669074 - DNA, 651 bp, Homo sapiens
aaaaactgtactacttagaatacctttcggttctcaaagaattctattataataggtctcacatatttgtgtgactttaaatatcattaaaacagtcaccatacgtgtttagaatttaaaaaacatgcagtgctattcaagaaggttgaaagaaaaatataagatactatcagtaataatctttttgctaaattcagcaagatttgcagtggagaatttctattattagtcaagatcatttataaaaataataagcattcattacatacactacttaygtagttgggtttacttacaacatacattcattcaacacagtcatcaagcctttatgtcacatactatgctgtgttctgtggaggaacaaatttatgagagacattagtgaggcctgtgctaagggagctaattgcataatacaagagttacataactaactagtttatagtggagaacataatgaatacttatatggtttggatttgtgttctcgcccaaatctcatgtcaaattttaatccccaatgttcgtggaggggcctggtgggaagtgattggatctgggggtggacttttcccttgctgttctcatgacagtgagttctcatgagatctgtttgtttaaaagtgtgtagcatctccttcttccccc

SEQ ID NO: 669075 - DNA, 2762 bp, Homo sapiens
ccacaggcaatctttatgatagattcaggtcattcctggttcactgatagcgtgggtctctgtgttgattattaatggctaaacataagaactattttggccatatctcataaatttcttcatcttcaaaaagcatggcctaggtcaacacaacataagcaaaagatggaatgcaggtcacccaccctgaactgcatagacacacagaaacctgaacagtctagcttcatttcaactatgtccagatagggtaaccatatgatttttttcaaagaaaactggtagtttgtagttttcagattacagaatcactctacaaacactataagactgtaaatgtattattcctgagtaaaagggaaactggataatatatgaaaatctccttgtcacaatatttaggtaatattcatggaaaaagaaaattttcatgaaatacaaggaattaaactatagagtaataagctcatcatgtgggtaccaaaagcaagcaaataaaaacttacctggctcctatggaagcacgtgaataatggcaccaccttttcccaaatgccgagtagctctgctgtatggattggctacaagttttaggtcacaaatgtgctgaactttctccttaaaagcccaactctgctgtgattacactggtacagataagaggcatatatgaagattagattgaaagaaagaaattgtagaagaaaatgcaaataacccagaaatccgttaatcacttaaggccttggggtaagaaaaatctaagtacaaagcagaataaatgattaacagccaaagatggaagaagggggtgatgagggggagaacattattttaatttaattgcatgcaaacttgcaaggagattccagaaatcattcaacagaaaagattttattatactcataaccctaccttcaccataccctattcactaaagaaatctcctgcctctaggctcttccactctacctcctttaattgtcacatctgaaagcacctggtgccaacacgtaaaaatcacaccccaaatgatctcaactctaattctcatgcaagctctacaaccattaatctagacacaaaatgtgttaggagctttctatgcatatttaatcaatacaacaacccaaagaggttaagtattattaccctaatgttaaagaagaggaaactgggaggataaatatttacttagtcagtctagcactgaggttcaaagccaagtttgactaactccaaagtttccagcaagaatcaatgaaaaagagataggtttctgtaaatccatttagatcccactctttgatttctatattattcacggtaggcattccttaaaacttgttttgatctcctttaggatataagcaaatagattgtaatccctgtgtgtatgtatgtgtgtgtacctgttacatatttgatttgtttagcacatatttattgaacacataattctgcactatgtactgtgtgaaggactgtggataaaataataaggatgccctctgctctcatggagattactatttgtctgctttgcttgatgaggcaagattccttaaaaccaaatagtagccaatgtacaaaaaaaaggaagaggtttgattcttagtaatttattaaagaaagaaaatgtgtggctacataacagagcaactgagtatgagatatcaacctcccattactactgttgtcattatcattatactatagttataaagtaacttaatattgtaaaaatgcagaaattagaattctgcagggctgtcaacccctcagagcaggggtcatctggagaaatgagaggaactagatatcggccctgtagttcaggacttggggtgtatcaatcttctcttttctgtaaaggaacagataaatgactacctaatgtacatggcaatcattggaatggtatttctccagtaaatttcagaaactacaactgggtggatacttagttacattcagtaataaaactgttcataatttcattgatttttaaaattttattttttagatatttatttttctccagtttcataataatgttattttttagaacttctgagatttgtttgggttttatttgtttgtttatactgacctaaagaagaaaaaaatatattttgttaatatctagcccaggaagtttccctaaaattagatatagcagtgtcggttgctagttcagctactgggcctagagaagctcaggctcttatgtgataaaacaaaacaagacaaaaccaaaacaaataaacaaaaacccagagaagcagaaaagagaattagagataatcataataattacagactgcttccgactagtgttttccattactgtgaatgccatacttggtaaagaaataaatacggtgtgccatgcacataatctaaaggcagaatctgttctgaaatgagatgaaggaagaaaccagggtatattctaccaattaaagtgtctgggtgcaaattattaaaattactatatatcctaaaaggattagactctagaacctcagtcagaacttatgaaaatataaactaattttttcattgcaaataaccatatctccatttcaagaagatggattccgctttgcattgttatatgtttctgctaataagattttaaaattttatgtgagcatacatgcccaataagatttttttctcttgarttcaggaaacatgatttttttttctaagggttagttttatctttttttttttttctttttgtgacagagtct

SEQ ID NO: 669076 - DNA, 1648 bp, Homo sapiens
cttttatttattattggtgacactcttatttatagttggtgacaaaattaatattcggaaattacctggccaaagctattacttttaaaatatgtattatctttgacaagccaatcctacttttgtaatctgtataatttttaggaaagcagtatcttggttcagactgatggaatttcaatcttggcttagcttctcggcagacctgtgacactgggcaagttacttacgcttccctcagttgtattccactgaatgtggataatatctatatctaatgaataggactattgggaaaattaaatgagttagtggatttaaagtgtttagaaaagttctgcactaaaagcaatcaataacagctattattattatgctttagaaataaaagcaccagcacacaaggataatactgaaagtgtattatattgtttctcaatttaaaaaatgaaaacaactggctatccatcaatattagaataattaagtatgatgtgaagtccatactgtggaatattgtgtatctcaaaatttaaaaaatatattagatatgtgtctattcttcttgctggatttttttaatatgagaagcaaactgtacagttatttacttagtatcatcatactttaaattaaaaaagaaaacagaataatgaccccccccaaaaaaactacacacacacacacacacwctctctctctctctcacacacacacacacacactcacatattccttcataattttttagcatttactgtcaggcactgttatagcattgggttgcagcagtaaacaaaacagacacaaatattgaccctcacaaaatatattctaaggtgtgaggactctctcacacacaaataaatgaataaataaaatatatattatatctggtgctaagtgttacaggaaaaaaataaagcaatgtagtcacacgcctgggatttccaatgaggcaacgatggttaagggaatactagcttcacacagggtggtgaagaaaagtctctctggggaaataaaaaaagaagacgtttgggcataatcctgaaagatatgaagaggtgaagtatatttacatgttttctgaacatgtgcatatgtttgtatattttgtgtgaatatggaaggaaaatatatgcgaatataccaagttgttgaatgtattacatttaattacttcagggaggctacatgttggggatgtaaagctggaagaggttttaagtgtcttctttatacatttttatttgtacatatgttactttggatattaaaataattgattaagaggattagagctaataaataaaagagtaagtggaggatggaaatgagcccacgaatcagaagaattaatttccagtcacagcacatagcaggtactaaataaatgtcagtctaagtaaaatttgactgtattctttcaccatttaagtattctgcagataagggcatctgagccctgcagaggtacaactattggttaaggacacacaaatactaattgctgaaactatgtaccccatatgactgtcctcctttatctgtggtttcactttccatgatttctgttactctcagctgcagttcgaaaatattaaatggaaaattctagaaataagcaattcataagtttcaaatt

SEQ ID NO: 669077 - DNA, 1241 bp, Homo sapiens
caacagcaaaaagggaaacaatatttatacagttcatatgagtgaactcaaaaacttcatgctaggtgaaggactccagatgcaaaactcctatattgtgtgattttaaaaattattttcccataagtttttggggtacagtggtatttggttacatgagtaagtcctttgtgagattttagatatttttaaatatagaatgtccataaaagacaaatcttagaggcagaaagccaatcaattccttcctgaaactgggaaaaagagccaagattgaataaaaatgggcatgagggttctgatttgcrtaataaaaatgttctaaaattggattaatttactaaaatcattaaaaagtacacttacaatgaatgaattaggttgtgtgtaagtgatacactaagaaagctgttaaaaatactgtttttataccaacgtgaataggagggcttctctggatcaagacacattgcatttttctttcaaataataatagtcattacagtattagtaaccattgtatatttagccttcatcatgtaccactctatgagattctttaaatgtacaatcatatttgtaactctatgagagaggaaataataaccagcatggcacagataaataaatagatactgagattaaataatttgcttaaagacttttacccaggtagcttacctcttaagttcatggactcaaccaatgctttctatattctactagcctttttataatctatctctgtgtgtgtgtgtgtgtgtgtgtgtgtgtgtgtgtgtgtatgagatgtgacatgacataaaattagcatgggatgacatacattaaatttaatgtaatgctttattttctatatttttagatttcataatcattggctaaaaatatatataaaatcactattaaaattattcctttaggattaaaattttaataactatttcaactgccatataatattttactctgtgtaagattctaaaagaaatgaaatgaaaagccagccttctgacttattaatcacttgagaatagtagcaggattttttgtagacttttcatagatttttagtaagttataatgattttataaaatgcatctcaaagtaagataaaatttaacgcaatattttcacattttcaataatatggagttttagcttatactctaaaacttgtaagtatattaaatcattctaagcttcattttagtaacacaaataaaccaattacaaagaa

SEQ ID NO: 669078 - DNA, 1241 bp, Homo sapiens
caacagcaaaaagggaaacaatatttatacagttcatatgagtgaactcaaaaacttcatgctaggtgaaggactccagatgcaaaactcctatattgtgtgattttaaaaattattttcccataagtttttggggtacagtggtatttggttacatgagtaagtcctttgtgagattttagatatttttaaatatagaatgtccataaaagacaaatcttagaggcagaaagccaatcaattccttcctgaaactgggaaaaagagccaagattgaataaaaatgggcatgagggttctgatttgcgtaataaaaatgttctaaaattggattaatttactaaaatcattaaaaagtacacttacaatgaatgaattaggttgtgtgtaagtgatacactaagaaagctgttaaaaatactgtttttataccaacgtgaataggagggcttctctggatcaagacacattgcatttttctttcaaataataatagtcattacagtattagtaaccattgtatatttagccttcatcatgtaccactctatgagattctttaaatgtacaatcatatttgtaactctatgagagaggaaataataaccagcatggcacagataaataaatagatactgagattaaataatttgcttaaagacttttacccaggtagcttacctcttaagttcatggactcaaccaatgctttctatattctactagcctttttataatctatctctgtgtgtgtgtgtgtgtgtgtgtgtgtgtgtgtgtgtgtatgagatgtgacatgacataaaattagcatgggatgacatacattaaatttaatgtaatgctttattttctatatttttagatttcataatcattggctaaaaatatatataaaatcactattaaaattattcctttaggattaaaattttaataactatttcaactgccatataatattttactctgtgtaagattctaaaagaaatgaaatgaaaagycagccttctgacttattaatcacttgagaatagtagcaggattttttgtagacttttcatagatttttagtaagttataatgattttataaaatgcatctcaaagtaagataaaatttaacgcaatattttcacattttcaataatatggagttttagcttatactctaaaacttgtaagtatattaaatcattctaagcttcattttagtaacacaaataaaccaattacaaagaa

SEQ ID NO: 669079 - DNA, 1241 bp, Homo sapiens
caacagcaaaaagggaaacaatatttatacagttcatatgagtgaactcaaaaacttcatgctaggtgaaggactccagatgcaaaactcctatattgtgtgattttaaaaattattttcccataagtttttggggtacagtggtatttggttacatgagtaagtcctttgtgagattttagatatttttaaatatagaatgtccataaaagacaaatcttagaggcagaaagccaatcaattccttcctgaaactgggaaaaagagccaagattgaataaaaatgggcatgagggttctgatttgcgtaataaaaatgttctaaaattggattaatttactaaaatcattaaaaagtacacttacaatgaatgaattaggttgtgtgtaagtgatacactaagaaagctgttaaaaatactgtttttataccaacgtgaataggagggcttctctggatcaagacacattgcatttttctttcaaataataatagtcattacagtattagtaaccattgtatatttagccttcatcatgtaccactctatgagattctttaaatgtacaatcatatttgtaactctatgagagaggaaataataaccagcatggcacagataaataaatagatactgagattaaataatttgcttaaagacttttacccaggtagcttacctcttaagttcatggactcaaccaatgctttctatattctactagcctttttataatctatctctgtgtgtgtgtgtgtgtgtgtgtgtgtgtgtgtgtgtgtatgagatgtgacatgacataaaattagcatgggatgacatacattaaatttaatgtaatgctttattttctatatttttagatttcataatcattggctaaaaatatatataaaatcactattaaaattattcctttaggattaaaattttaataactatttcaactgccatataatattttactctgtgtaagattctaaaagaaatgaaatgaaaagccagccttctgacttattaatcacttgagaatagtagcaggattttttgtagacttttcatagatttttagtaagttataatgattttataaaatgcatctcaaagtaagataaaatttaaygcaatattttcacattttcaataatatggagttttagcttatactctaaaacttgtaagtatattaaatcattctaagcttcattttagtaacacaaataaaccaattacaaagaa

SEQ ID NO: 669080 - DNA, 429 bp, Homo sapiens
tcttatatggacctcactgcacaaagatggccaaagtgggttacccttggtggaagaccctgctcrtgcccaccccgtatcttaaagaggtcattgaaagaccccttggtcccctgcagaggactacttaggagccctgacagcaacttgtagcctgttaagtgctaatagttagagaagagaggttacttgtttttcattcataatagtagctgtctttctgccatttatgaccccttctttagccaattgaggaagagtaaagatctgcccagtgggtttagtgttaaataaggtaactacactgaggtgtattacggcaactatttctctgaagaacaaaaatgtggtctaaggtccagactttatagcaatggaatgagtatccaactttcctctaatggacccttttatataccacacctgcca

SEQ ID NO: 669081 - DNA, 648 bp, Homo sapiens
taaaaaggcagagggagatttggcacagaagagaaagcagtgatcctggaggtactgattggagtgatgtggccacaagccaaggaatgcctgcagcctgcagaagctggaagaggccaggaatggattatcccctagagcccccggcaagaacacggcccttccaaccccttgactttatcacagtgaaactgatgtcagacttctggcctccagaactgcaggagaataaatctggattgttttaagccactaagtttgtgataattggttacaccagccaaagaaaaccaaggcagtccttcattctgcttctaacttgtctaaatattaaaacawccccagtaagatgatctctagcataaaggaataacatctctctacttctgtgcataagttgagggttgaggtgttgaagtggttaggtgatggtaactccttgatgaactgagtctgatgcagctggagtgagaaccacgccaacgtggtgctgcagacattaacgtttaatgtggcaagcttaaaaaaggcaagaatttcacctttccaaaaaagcatttttatctgatcgcaagtcataaatatttactacaggaaagcttagttataaatctcacaaaaacaggaagaaaataaaagtcatctgca

SEQ ID NO: 669082 - DNA, 1837 bp, Homo sapiens
  misc_feature 308, 388, 390, 391, 392, 393, 394, 395, 396, 397, 398, 399,400, 401, 402, 403, 404, 405, 406, 407, 408, 409, 410, 411,412, 413, 414, 415, 416, 417, 418, 419, 420, 421, 422, 423,424, 425, 426, 427, 428, 429, 430, 431, 432, 433, 434: n = A,T,C or G
  misc_feature 435, 436, 437, 438, 439, 440, 441, 442, 443, 444, 445, 446,447, 448, 449, 450, 451, 452, 453, 454, 455, 456, 457, 458,459, 460, 461, 462, 463, 464, 465, 466, 467, 468, 469, 470,471, 472, 473, 474, 475, 476, 477, 478, 479, 480, 481: n = A,T,C or G
  misc_feature 482, 483, 484, 485, 486, 487, 488, 489: n = A,T,C or G
ccctcttctctggacctttaaaataatttcaaacacaaaaggcagcaagagtctgccaatgtatcatcaggacccacatgagtcaatgtcctcccttggcccacctggacaatgtagaaagaaaattaggcggctgggagtggtggctcacacctgtaatcccagcactctgggaagccaaggtgggcggatcacctgaggtcaggagtttgagaccagcctggccaacatggcaaaaccccgcctctactaaaagtacaaaaattagatgggcgtggtggtgggtgcctgtaatcccagctactcangaggctgaggcaggagaagcttgaacctaggaggcggaggttgcagtgagctgagatcgcgccactgcactctaccctgngnnnnnnnnnnnnnnnnnnnnnnnnnnnnnnnnnnnnnnnnnnnnnnnnnnnnnnnnnnnnnnnnnnnnnnnnnnnnnnnnnnnnnnnnnnnnnnnnnnnngcagtatgcgctgaacccaatctgtagtcttttatccctcacccccttcccaccctttcccaagtccccgaagtccattgtgtcactcgtatgcctgtgcatcctcatagcttagctcccacttatgagtgagaacatatgatgtttggttttccattcctgagttacttcacttagaataatagtctccaatcgcaaccaggttgctgcaaatgccattaattcattcctttttatggctgagtagtattccactgtgtgtgtgtgtgtgtgtgtgtgtgtgtgtgtgtgtgtgtgtgtgtgtgtatgtgtgtatatatatatatatatacatatatacatatcacagtttctttatccacttgttgattgatgggcatttgggctgtttccacatttttgcagttgtgaattgtgctgctataaacgtgtgtgcaggtttttttttttttttttttttttttgtataatgacttttcctatgggtagatatccagtagtgggatcgctggatccagggggagttctacttatagttctttaaggaaatactttgaagtgaaatttcagagttgtcagggaggcctgttagggaaacagacttgtacaaccctggagaatgccctttccaactatcgtcaatgtcaacccgcctccctgaatgtgctctgaaggtaacagatccccagacacctgagaaaaacccaaagaatgaaaaaaagggactgaagtaagtaggacaacctactctggagaaaacagggagcccaggagacagaagaacataaaaattcaaagcagtatgttcagctggagattcaagagcatatttatcatgctcataaagcaagaactgactgtgataaaaatgaataatcagagaataagaaagagttcttgaaaattaatcatatcgtataattgccagaattcttttagaragttaaatggatagattcattagaatattctgaatgaaaggccaagcaggttatctggaaggttaagtagaagacaattctccagttcccaaacacaaagtcaaagatgtaaggtatgtgtgcaggcatgtggggaaatttttcctgagctgaaaaaaagcacaaccttgtagatttaaaagaccacctaatgctgaatagtgggaatggagaaaataccccactcagacatatcttgatgaatctcaaaactctgaaaacaagcagtggctcatgcctgtaatcccagcactttgggagaccgaggttggagggtcacttgagtccaggagttcgagaccagcctggccaacatatgaagacatggtctctacaaaaactaaaaataaattagctgggcatggtgg

SEQ ID NO: 669083 - DNA, 1837 bp, Homo sapiens
  misc_feature 308, 388, 390, 391, 392, 393, 394, 395, 396, 397, 398, 399,400, 401, 402, 403, 404, 405, 406, 407, 408, 409, 410, 411,412, 413, 414, 415, 416, 417, 418, 419, 420, 421, 422, 423,424, 425, 426, 427, 428, 429, 430, 431, 432, 433, 434: n = A,T,C or G
  misc_feature 435, 436, 437, 438, 439, 440, 441, 442, 443, 444, 445, 446,447, 448, 449, 450, 451, 452, 453, 454, 455, 456, 457, 458,459, 460, 461, 462, 463, 464, 465, 466, 467, 468, 469, 470,471, 472, 473, 474, 475, 476, 477, 478, 479, 480, 481: n = A,T,C or G
  misc_feature 482, 483, 484, 485, 486, 487, 488, 489: n = A,T,C or G
ccctcttctctggacctttaaaataatttcaaacacaaaaggcagcaagagtctgccaatgtatcatcaggacccacatgagtcaatgtcctcccttggcccacctggacaatgtagaaagaaaattaggcggctgggagtggtggctcacacctgtaatcccagcactctgggaagccaaggtgggcggatcacctgaggtcaggagtttgagaccagcctggccaacatggcaaaaccccgcctctactaaaagtacaaaaattagatgggcgtggtggtgggtgcctgtaatcccagctactcangaggctgaggcaggagaagcttgaacctaggaggcggaggttgcagtgagctgagatcgcgccactgcactctaccctgngnnnnnnnnnnnnnnnnnnnnnnnnnnnnnnnnnnnnnnnnnnnnnnnnnnnnnnnnnnnnnnnnnnnnnnnnnnnnnnnnnnnnnnnnnnnnnnnnnnnngcagtatgcgctgaacccaatctgtagtcttttatccctcacccccttcccaccctttcccaagtccccgaagtccattgtgtcactcgtatgcctgtgcatcctcatagcttagctcccacttatgagtgagaacatatgatgtttggttttccattcctgagttacttcacttagaataatagtctccaatcgcaaccaggttgctgcaaatgccattaattcattcctttttatggctgagtagtattccactgtgtgtgtgtgtgtgtgtgtgtgtgtgtgtgtgtgtgtgtgtgtgtgtgtatgtgtgtatatatatatatatatacatatatacatatcacagtttctttatccacttgttgattgatgggcatttgggctgtttccacatttttgcagttgtgaattgtgctgctataaacgtgtgtgcaggtttttttttttttttttttttttttgtataatgacttttcctatgggtagatatccagtagtgggatcgctggatccagggggagttctacttatagttctttaaggaaatactttgaagtgaaatttcagagttgtcagggaggcctgttagggaaacagacttgtacaaccctggagaatgccctttccaactatcgtcaatgtcaacccgcctccctgaatgtgctctgaaggtaacagatccccagacacctgagaaaaacccaaagaatgaaaaaaagggactgaagtaagtaggacaacctactctggagaaaacagggagcccaggagacagaagaacataaaaattcaaagcagtatgttcagctggagattcaagagcatatttatcatgctcataaagcaagaactgactgtgataaaaatgaataatcagagaataagaaagagttcttgaaaattaatcatatcgtataattgccagaattcttttagaaagttaaatggatagattcattagaatattctgaatgaaaggccaagcaggttatctggaaggttaagtagaagacaattctccagttcccaaacwcaaagtcaaagatgtaaggtatgtgtgcaggcatgtggggaaatttttcctgagctgaaaaaaagcacaaccttgtagatttaaaagaccacctaatgctgaatagtgggaatggagaaaataccccactcagacatatcttgatgaatctcaaaactctgaaaacaagcagtggctcatgcctgtaatcccagcactttgggagaccgaggttggagggtcacttgagtccaggagttcgagaccagcctggccaacatatgaagacatggtctctacaaaaactaaaaataaattagctgggcatggtgg

SEQ ID NO: 669084 - DNA, 625 bp, Homo sapiens
caaagtgagtctgttcctctgtataacttgatattgttttgcttgcacaatgaagacttttttttgtcgtctttaaagtgtgaaaattctaatacatattatatattctagtatatattaaatctgccgaaagcactatgtgtttaattactttttaagctcagatatttctctagataagaagcacattcctctgttatttctatcctaatcttaggaatgtctatcatacgatcataggtaggccagttttcccaacattttcatcagtttatgtgtctccctcattcccctcttgacccttttctttgagttatgaataagctttttttagttggttttccaattttttttttttttttttwtatgagacagagtctcgctctgtcgcccaggctggagtgcagtggtgcagtctcagctcacttcaatctccacttcccggttcaagcaattctcctgtctcggcctcccgagtagctgggattaaagatgtgtgccatcatgcccagctaatttttgtatttttcgaagagacggggtttcaccatgttggccaggctggtcttaaactcccggcctcaagtgattagcccacctcagcctctcaaagtgctgggattac

SEQ ID NO: 669085 - DNA, 625 bp, Homo sapiens
caaagtgagtctgttcctctgtataacttgatattgttttgcttgcacaatgaagacttttttttgtcgtctttaaagtgtgaaaattctaatacatattatatattctagtatatattaaatctgccgaaagcactatgtgtttaattactttttaagctcagatatttctctagataagaagcacattcctctgttatttctatcctaatcttaggaatgtctatcatacgatcataggtaggccagttttcccaacattttcatcagtttatgtgtctccctcattcccctcttgacccttttctttgagttatgaataagctttttttagttggttttccaattttttttttttttttttttatgagacagagtctcgctctgtcgcccaggctggagtgcagtggtgcagtctcagctcacttcaatctccacttcccggttcaagcaattctcctgyctcggcctcccgagtagctgggattaaagatgtgtgccatcatgcccagctaatttttgtatttttcgaagagacggggtttcaccatgttggccaggctggtcttaaactcccggcctcaagtgattagcccacctcagcctctcaaagtgctgggattac

SEQ ID NO: 669086 - DNA, 639 bp, Homo sapiens
aagacatctttcttctaattaaatatgtcttttgatagagaaaatttagcccaacatggaagcagagactttcatgaacatctcggatattggcaagagaaaattctagaaaaatctagaaaaatgtgtcaatctgctgctaattcagtattttcactggtatatggttttaagtgcaagtggaatatttgaccagaattgggataatattttcagggcaaaaataaagaaagaacaaagctgggagaagaaaaggcaaacccaggcacacatgaatgactaaatctggagaagattttgtatatttagtttgtcttctcaaaaaatcctaacagaattttcaaacgcagcctccagtaggctgagtaatgactcgacactttattaacgataccaaaagcaggtctcataaaagttaggttgccatttcccttctagaagccttatggcagaggtcacattacaatctataatttttgtggtctaatggccatatcagtaattcctaatatattttgggccacatttaaacaattttaccttttaaatcatatacatatatataattatatatatrtgtgtatatatatatatatatatatacacacacacacacatatatgttggtaatgtctattt

SEQ ID NO: 669087 - DNA, 653 bp, Homo sapiens
atgtaaaaatgctcccaggagtcatcttaggaatatgacaagcatgaacattatacaaagatttctatgagagacttccctggccttaaaataacaattttttaaaaaattacatggactaataatactggtaatagaatagcctttaatttttcaaaactgtwtttctagctaacctgtaatctctttaccgatttggatttatggctttttagcatagatacaaggtctgcaaatagtgttcataatatatacttttatgatccataaacatttgggatagtgagaaaatgagtgaatgaattaagaaatgaatgtattcttaattattatggctactaattctgctcatatataaattctaccatcaaactaatctctttgttttcaaagatctcagaaacaggtcaaacatgttctcagtctttattccttggaatctacaatatcagaggtgacttcacttctcctagtcctttcactgagggccacagcaaacgacttcagagtatctgagatgacctgatttcagtagcattatcccgacactaaactcagaagactctaaatgtggatgccagtttaaagtggttaactcttaaagcccatatagggcaaagaaggaactattttaaaaatctaccccatttgta

SEQ ID NO: 669088 - DNA, 601 bp, Homo sapiens
aaatcaagacatttaagcatattacctaacttctctctcagaataagtattttcaaaataaagaactggtgagaataaatgcccttatataatactggtgcattatcaaattggcaccttaaaattctagactgtaacagcattacgtaaaacttcattaaagagacaacaaaataaaaacgtctgtagttggaacacagtctttcacctagtgttcttgccttggagaatacagtcctaggaagtaactcaggagagaaaattccaccagtacargggcatttggaattccaacagctggaccaacaaagatactagaaataagctcaaatacccaataataagacagtgatgaagtaaattatgatgccacccctgaacaggatggtattttattattgcaaatgataaacatgtgtttaatattttttcacatagaaaaaatatatgaagtaacgtcaagcaaagaaaacaaagaaatacatatttctgcaatggtacactgaagaatttgataaggcagagtcttatttgtgacatttattttagcatcacacaaactaaatgttaataaatgagtattatgtaagtcagatgaatc

SEQ ID NO: 669089 - DNA, 601 bp, Homo sapiens
aaatcaagacatttaagcatattacctaacttctctctcagaataagtattttcaaaataaagaactggtgagaataaatgcccttatataatactggtgcattatcaaattggcaccttaaaattctagactgtaacagcattacgtaaaacttcattaaagagacaacaaaataaaaacgtctgtagttggaacacagtctttcacctagtgttcttgccttggagaatacagtcctaggaagtaactcaggagagaaaattccaccagtacaggggcatttggaattccaacagctggaccaacaaagawactagaaataagctcaaatacccaataataagacagtgatgaagtaaattatgatgccacccctgaacaggatggtattttattattgcaaatgataaacatgtgtttaatattttttcacatagaaaaaatatatgaagtaacgtcaagcaaagaaaacaaagaaatacatatttctgcaatggtacactgaagaatttgataaggcagagtcttatttgtgacatttattttagcatcacacaaactaaatgttaataaatgagtattatgtaagtcagatgaatc

SEQ ID NO: 669090 - DNA, 601 bp, Homo sapiens
aaatcaagacatttaagcatattacctaacttctctctcagaataagtattttcaaaataaagaactggtgagaataaatgcccttatataatactggtgcattatcaaattggcaccttaaaattctagactgtaacagcattacgtaaaacttcattaaagagacaacaaaataaaaacgtctgtagttggaacacagtctttcacctagtgttcttgccttggagaatacagtcctaggaagtaactcaggagagaaaattccaccagtacaggggcatttggaattccaacagctggaccaacaaagatactagaaataagctcaaatacccaataataagacagtgatgaagtaaattatgatgccacccctgaacaggatggtattttattattgcaaatgataaacatgtgtttaatattttttcacatagaaaaaatatatgaagtaacgtcaagcaaagaaaacaaagaaatacatatttctgcaatggtacactgaagaatttgataaggcagagtcttatttgtgacatttattttagcatcayacaaactaaatgttaataaatgagtattatgtaagtcagatgaatc

SEQ ID NO: 669091 - DNA, 1103 bp, Homo sapiens
agtcaaggagtcccaagaagcttagctgggtgattctagttcagggtctctcatgaggttgcagtcatgtgaaggctagactgaggccagaggattcrcttcttccaagatggctcactcatgtggctcttggcaggaggcctcagttcctgctgtgtgagcctctccatagattgctccagtgtgcttatgacgtggcatatagagatccaagaaagacagcaaggcagaatctgcagtaccttttataacctcctcttagatgtcagcttcacttttgccatattctgttcattttgtatcagagaatttgtggacatatttttaaacctctgcaaagagataggctaattgatctgtgaggaaggtataaaggtcaaggaagcaaagaagaggccaacactttaagatctaaagagagttgggaagagcataccctgctccccaattactcaatcatgagccagcatttccagctgaccttagttggagccagtttgactttattacgaaactgatttaggtaactctttgaagtaggcaagtttgcttttgagacccaatgcttcctttcccttctgcagcagaattcccctaatttttctcagagcccctgatataatgaggcttatctggtcagagcatgctctcaaaaaatgtatgagcatgacatgtagcagtaattttcaccttcttacaaatcattgcctctccagtggacatttgaaatttaaacatgtgatagttgaacagatggcctcccccaaccctaataaaagggatttcatttagagaaactgtgagaaatagaaatgtttttgaagagaggttggggtatttgacctcctgaaatctaccatggactttggggttctaggcctccatgtaagatggaccctgcttattactcgagtgccttgatgccgctgtgtactgagcatatgctgatatgctgaaggctttactactgtagttcaaccacaaatatcacttcaagtagctttttctattgcactcactacctggggttagtgttcactgagtaaagcaaccagtttaaggaggaaaaaatgattctccaaactctatgtctacgtgactcc

SEQ ID NO: 669092 - DNA, 603 bp, Homo sapiens
attaatttaacaattcacttcttttctttctttcttttttttttttgagatggagtcttgctctgtcacccaggctggaatgcagtggcacaatctcggctcactgcaacctccaccgcccaggttcatgccattctcctgcctcagcctcccgagtagctgggattacaggcacccgccaccacacgcagctaattttttttgtatttttttagtagagatggggtttcaccgtgatagccaggatggtctcgatctcctgaccttgtgacctgcccgtctyggcctcccaaagtgctgggattacaggtgtgagctactgcgcccggcctaacaatgcacttctaattatattttagttttttctcttccacaataaaaagaaatacatgggacccaaaacttagtgcatggtgtcagcatctcgcacagagtgataaaatggccatgatggtaatcctcatttggaaacgtagctgacttttgagggtcagaattatagttcagccccagtttgggaggggggtacaactttctcctcatcccagacagaaaactcttttttctctctcctctcccccttctctcttcctccttctcttt

SEQ ID NO: 669093 - DNA, 603 bp, Homo sapiens
attaatttaacaattcacttcttttctttctttcttttttttttttgagatggagtcttgctctgtcacccaggctggaatgcagtggcacaatctcggctcactgcaacctccaccgcccaggttcatgccattctcctgcctcagcctcccgagtagctgggattacaggcacccgccaccacacgcagctaattttttttgtatttttttagtagagatggggtttcaccgtgatagccaggatggtctcgatctcctgaccttgtgacctgcccgtctcggcctcccaaagtgctgggattacaggtgtgagctactgcgcccggcctaacaatgcacttctaattatattttagttttttctcttccacaataaaaagaaatacatgggacccaaaacttagtgcatggtgtcagcatctygcacagagtgataaaatggccatgatggtaatcctcatttggaaacgtagctgacttttgagggtcagaattatagttcagccccagtttgggaggggggtacaactttctcctcatcccagacagaaaactcttttttctctctcctctcccccttctctcttcctccttctcttt

SEQ ID NO: 669094 - DNA, 1571 bp, Homo sapiens
ttttttttttttaagacagagtctcactctgtcggcaggctggagtgcagtggcacaatctcagctcactgtgacctctgtctcctgggttcaagtgattcccctgcctcaccttcctgagtagctgggactacaggcgcgcaccaccacgcctggctaatttgttgtattttagtagagacggggtttcatcatgttggccaggacagtctcgatctcctgaccccgtgatctgcctgcctcagcctcccaaagtgccgggattacaggcatgagtcatcacgcctggcccctgggtaatttttatgttttctgtacagacagggtttcgccgtgttgcccaggctggtctcaaactcctgggttcaagtgatctgcccaccttgcgctctcaaagtgctggggttacagctgtgagccactgtgcctggcccatagaagatttcaacagacgtaattccaccagagcagtaagttaaaattcgtctcctgaagtaacttactcatcaccaagactccaggtctgtgctgagtgcagcccattgacaaagtgtaaccagatgaacacacacactgatctcataattagcatctcacagggtgcggctcccacatcaccaccacctggagcacatgccgaaaaatgcggaggcccagatccaagccaagctagagcgtcagagccttcgggggtcggagcaaggagccagtgtgatctcggctcaccgcaatctctgcctcccgggttcaagtgattctcctgcctcagcctcccaagtagctgggactacaggtgcccaccaccacgcccggctaatttttgtattcttagtggagacgggttttcaccgtgttagccaggatggtctccatctcctgacctggtgatccgcccgcctcggcctcccaaagtgctgggattacaggcgtgcgccactgcgcccacctataatcttgataccaacagaaattgtatattcctgtcacattacagctaccgcaggtatctcaaaatataatgtaagctcatcaccactttggaagtagggtagttattagacctgctgctttaaggcattaataaagatatacaaacatctctatataaatttttaaaaacattctgattgttagatttcaatgtaattgatttttataaacttttattgtttaaaaataagctgatagacggttgggaaaacggggcawaacaagcagaggaaaatgctaacagcagaaactaggtggtgggcagaccggtgttcactgtagaattcgacttttctgtatgtgtgaacattttcgtaatgcaacgtttgggaaaatacctgacaaggggttgctggaccaccaaaaggatctacagcccaccgaacagtcagaaacccctaacctagaggtactggtgtccttaaccagctagccaatccagtcagttcttcatccgggagccaaaagaccccaggcctgggtatcccaattccacttaggctggcagccttttgccagactaagaaatcaaaaaggtttgcagcaccaaagtgagccagtggtgttttctctcattcatc

SEQ ID NO: 669095 - DNA, 626 bp, Homo sapiens
ttcttttatcacttccctctgttcaaactactgtaaaatattaggcttttccttaacacggaaataaaatttatatatcaagtccagatacaatgcattcctttctttttttttttttttttaagacagcgtctctctctgtgacccaggctggaatgcaatggcgcaatcatggctcactgcagcatcgaccttccagacccaagttatcctcccacctyagcctcttgagtaactgggaccacaggcacatgccaccatgcctggctaatgtaaaaaaaaatttttttttgtagagatggggtctccaaatgttgcctatgctggtctcaaactcctgaacccaggtgatcctcctgcctcggcatcctaaagtggtgggattacaggcgcgagtcactgttatctggcagcatttatttcttaattcacaaattaagttatatattatactctggcaccaacatgaacataaagataaatttgaaatatggcactgaaatgatattgtggtattcagttcctggtgatcttgagtaactgctcatattaatatttttagatcagcattgaaatgaaaacacaggtttaaaaattctcattgaaaactcagacacccaagaaaa

SEQ ID NO: 669096 - DNA, 675 bp, Homo sapiens
gggagaaattaaaagggaattcattcacagttgaacaggatttgtagaaaattcaagcgaatttgtggccatttaggatagtgctgaagaattttggaactcagagagatagaaatgactacaggaaagcttcgtcagagggatttgagtttgcacctatggattttatattcggggaaagggatgaagttaaggtgaaaaacacgttagtaatggggaagggagaactgagagatcttgtaaattgactgacccccgcgttgccagrgaagtctagatggagtgttaagggcgcagtgcctcctcagctccttttccaggtgtcgtttgctgatggtatacctcatgtacctcagatcatagcaatgggaggtcacctaaggaaaggggatggagagtgatcatccagtttttcattatgtataaagaggcaaagtattaaattagggatatttttaagaaagcacagtataccataatctaagtacttgtacagaattccatgtttcaagtaacttgctagaatgcagcatcgtatagtgcaaaggacatgaattctggagtcagacaaatgggtaaaatactcatttttttcattaccagttgtgtgagtttgaaaaattattcattctttctgaacctcagtttcctcagtggcaaaatgaacattataat

SEQ ID NO: 669097 - DNA, 1479 bp, Homo sapiens
cagccagcacttcaacggactcactgcctctacctttctccttgcttggatgaagaatctgaatctagaagcccaccaaattcatctaacagtagtgcaagcagatattgctttggaaaatatctcagcagagaacactcctgggatgtatttcatcagtctgatacttccaactctgccagggaacaagctcaccaaaggcttctcatcaaacagctctgccctaaacaccctggggattccccaacagtgtcttgcgggcctaatgacactcatgttccttctcatgcttacctttctttgcctgacgtgagtgcaaaaacctatcttaagcaagataattgtaaaaatacaaaaattaaatgataacaaatatctccagagtacttacaaaaactactgtcacatttaggaggccactctgagccaggctgtcatcaagggcatgagctccagagcaggccacctgtcatttgtcaaaggttataaaccaggaagaaagatgctgttcaaggagtcagaactactctagctgtggtttccgccatgtaaccatgagcaagtcacttaatacctttgtgtctcagttttcccatcagtaaaatggagatgagcataacagtgcctcatatacaggatttttgtgaagatcaaaataagcaaaaacatttaaagcacttacaaaagtgtctcatgcaaacaagtgctcaagtaatacgagatcttcttatcatggttttctagtccctttaaacagtataaaatttcgtattacatttatttagtagaggagatcctacacttaaatacttccttcactaataggattctatctttgggaacttttccttttctttccttttttttttttgagatggagtctcactctgttgcccaggctggagtgcaatggcacaatctcagctcactgcaacctccacctcctgggttcaagcaattctcctgcctcagcttcccgagtagctgagattacaggcgactgccaccacgcccggttaattttttttttttttttgagacatagttttgctcttgttgcccaggctggagtgcaatggcatgatcttgactcaatgtaasctccacctctcaggttcaagcgattctcctgcctcagcctcctgactagctgggattacaggcatgcaccaccatggccagcaatattgtatttttagtagagatggggtttctccatgttggtcaggctggtctccaattcccgacctcaggtgatccgcccaccttggcctcccgaactgccgggattacagacatgagccaccacgcctggccttctttccctttatttccttttaaagtaaatagacaatatcaacacttggattgcttttcttttaggaaaatggcaatggctccatggaaaagcagtatattgagagaaaagtgctaaaacaagagctggaagacctgaattctagcagggggctgtcacca

SEQ ID NO: 669098 - DNA, 656 bp, Homo sapiens
tgaatatagttgggactacaggcacctaccaccacgcccagctaattttttatttttgtagagactggtttcgctgtgttgtccaagctggtatcaaactcctgggctcaagcaatgcacccatctctgcctcccaaagtgctgggattacaggtgtgaaccaccatgcctggcagatttttttttttttttttaattgagatgggatttcactctttcacccaggctggagtgaagggacattttctcatctcaccgatttcagcttactgcagcttccacctcctgggctcaagcaatcctcccacctcagcctcccgagtagctggtaccacaaccatgcaccaccacgcccggctaattttttgtgtttttggtggacatggggtttcaccatgttkcccaggctagattttttgttttaacatatgcctactcttattacatgttggctatcatcttcatcatcatttgagtgtagattgttgagtgtagataccagatacctggttgctaattctgactctgtgaccaaaaagcactgtcaacctgggcaatccttgacctgtctgagcctgagtttccttatctgtaaaatgggtattaaaatgtctgcctactctacaggactgcattgacgctcacacgacacaacc

SEQ ID NO: 669099 - DNA, 585 bp, Homo sapiens
accctacctccttctcaattacagaatactccccaccctgccccaacatgaattcacaaactccccattcccaaagagattccaattttgtcagagcccaaaggcygtgttcaaaagaggtgctcttgcaatcactggaagatggaaggggaaaagacatttttcagtagccacaggcaggtttgtaggcattggcagaaggcacatggaataaaatatagaggctctttgactaactctacgcaatcaacttcacgatgcagtttaaaacaaaaaagacatgactgaaggtctctatggacccaataaaccaaccatcaccaaatcttttttatttgtctgtacaaacaggatccagagtaagctcaaggtcacctgttgggcaagcagcccttcatggtcactctgagcaggctagggagcaaaatagcttaagctggggcagaatctagggcagtcattaaggagaattatcagatttgatggacaaagttcttgaaatctagcttcaacacatgggaaagtcttattttctattgaatctattatcattttattcaaatcaattcaaaatgatttattgtc

SEQ ID NO: 669100 - DNA, 667 bp, Homo sapiens
tgtttcaagtgggactgcaaagtcaaagtcatttatccccctaaaattcagtataaatattgacaagcctaaatccaattgagactagttataaaccagttcataataggccaagataagcaacaacaaaaaccatatcctgatatgccaggaggtgtagtttaggtagcaggagggacattgttagatgttatggatgcagytctcatctctcatataggagtactcaatgctgaattatcaataaagcatctgaatactactcaaattgaagaaaattgccgagatgcagaaatagcctgcttgtcaagccgagttcctgatgggaaatgagttttactctgaccgcccagggtcccagcagtgcagccactcatgagtgatgaagcatattgtaggaaaatagcatctcggtgtttgctctcctctcactgaatggaccgaaatgaggggcatttgttttcttctatttcagcgcagcaaacagactctcttaatcagattagaatgaagaactcttttatactgagtctctctctctctctgtgtttctctctctgtgtcttcccctctttctatgtcaaaaaaattatggatgccttgaaaaaagatgctaaataatgacaaaaggatcaaaagtacaaataggaggagaaagaaacacaga

SEQ ID NO: 669101 - DNA, 604 bp, Homo sapiens
gcaccctccgcagctgttggcccaggtgccaagcccctcactgcccggggctggcgagttggccggctgctccaagtgcggggcctgccaagcccacacccatccggaactctagctggcccacaagcgctgcccacagcctggttcctgcccrcgcctctccctccacacctcccggcaagttgagggagccggctccaacctcaaccagcccagagaggggcccccacagtgcagtggcaggctgaagggctccccaagcttggccagagcagatgccgaggccaaagaggcaccaagagccagcgagggctgcaagggctgccagcatgctgtcacctctcagttggtttctcaaacatatttagtaatccaccaactttaattttttcttgacaacatcactcctggagccccggatgcttacactggctgttgctgtgttcttggtctctctgtcttcactgccctgggaaccccctggccttagctctgggctccagcctcaaggttgttaccgagcgaaggggctcactgccttgtgtgctagaggccaacatcgtgatacttatgagaaaataaaagcttgactcccaagaatttc

SEQ ID NO: 669102 - DNA, 604 bp, Homo sapiens
gcaccctccgcagctgttggcccaggtgccaagcccctcactgcccggggctggcgagttggccggctgctccaagtgcggggcctgccaagcccacacccatccggaactctagctggcccacaagcgctgcccacagcctggttcctgcccgcgcctctccctccacacctcccggcaagttgagggagccggctccaacctcaaccarcccagagaggggcccccacagtgcagtggcaggctgaagggctccccaagcttggccagagcagatgccgaggccaaagaggcaccaagagccagcgagggctgcaagggctgccagcatgctgtcacctctcagttggtttctcaaacatatttagtaatccaccaactttaattttttcttgacaacatcactcctggagccccggatgcttacactggctgttgctgtgttcttggtctctctgtcttcactgccctgggaaccccctggccttagctctgggctccagcctcaaggttgttaccgagcgaaggggctcactgccttgtgtgctagaggccaacatcgtgatacttatgagaaaataaaagcttgactcccaagaatttc

SEQ ID NO: 669103 - DNA, 657 bp, Homo sapiens
gggtcagcatgacaaggagagacgaggagaagtgaagttctgctgcccccsggccaggccaagtagaggcctgtgtggccagcggggagcaagcatccttcacagtggagcaaggccagaggcctcgcactggagtctgcaggacataacagagccaaggcaagcagagtaggactcgaacccaggccccagaacaagtgagggtagatctcctcctcctggcccctcaccccaaacccagggcaccctctgcccatgtggcctgtggtgggaagttaggctttgaaggtcccacggtaactagggaacaagggaggcagagcggatggaacaggcagccaccccaaaatgcacccacagcagcagcactcccagccaggtcggagggcaggagctagccagacagccagggtcttggactgtaacacaggtgggagtgggtggcaaggggctcctcagagagggggtcactgaggaaggggcctagctctcaaggctagcagagaactctgcccagcctcctccaaggaaccgcagaaagggagggaagagccagcagccctgagcacctgccttgagcactcagtttccccacctgtcaaacagatgacaggctgctatgaggcctctgtagggtgcaggcgcatggtcaacact

SEQ ID NO: 669104 - DNA, 651 bp, Homo sapiens
ttttttcaagagatgaggtctctatgttacccaagctggtctcaaactcctgggttcaagtgatgctcccaccacagcctctcaaagtgttgtgattaaaggcatgagacayggcacccagcctcattgagtcttactgtgtcgcccaggctggagtgcagtggctcgatctcagctcactgcaacctccacctcctgggttccagtgatcctcccacctcagcttcccgagtagctggcattacaggcgtgtgccaccatgcccagctaatttttgttttgccatgttggcaaggccggtctcaaactcctgacctcaagtgatctgcccgcctcggcctcccaaagtgctgggattacaggtgtgagccaccatgcccagcctcattgtggttttaacttacatgtccctgaatgaggcagaacatcttcctcaaaagttatatttattattttatttcccaagcactaatacagtgctggctctgctaccttctacagatgggtgggctgaggctggagacgtgctcaagttccccagtggataggaggccgggctgggaggctaatcccaggagtctggcttctccagtctgtggtcttgacccagccactgggctgtacttcccctcccttccctggcaaacaaga

SEQ ID NO: 669105 - DNA, 651 bp, Homo sapiens
ttttttcaagagatgaggtctctatgttacccaagctggtctcaaactcctgggttcaagtgatgctcccaccacagcctctcaaagtgttgtgattaaaggcatgagacacggcacccagcctcattgagtcttactstgtcgcccaggctggagtgcagtggctcgatctcagctcactgcaacctccacctcctgggttccagtgatcctcccacctcagcttcccgagtagctggcattacaggcgtgtgccaccatgcccagctaatttttgttttgccatgttggcaaggccggtctcaaactcctgacctcaagtgatctgcccgcctcggcctcccaaagtgctgggattacaggtgtgagccaccatgcccagcctcattgtggttttaacttacatgtccctgaatgaggcagaacatcttcctcaaaagttatatttattattttatttcccaagcactaatacagtgctggctctgctaccttctacagatgggtgggctgaggctggagacgtgctcaagttccccagtggataggaggccgggctgggaggctaatcccaggagtctggcttctccagtctgtggtcttgacccagccactgggctgtacttcccctcccttccctggcaaacaaga

SEQ ID NO: 669106 - DNA, 651 bp, Homo sapiens
ttttttcaagagatgaggtctctatgttacccaagctggtctcaaactcctgggttcaagtgatgctcccaccacagcctctcaaagtgttgtgattaaaggcatgagacacggcacccagcctcattgagtcttactgtgtcgcccaggytggagtgcagtggctcgatctcagctcactgcaacctccacctcctgggttccagtgatcctcccacctcagcttcccgagtagctggcattacaggcgtgtgccaccatgcccagctaatttttgttttgccatgttggcaaggccggtctcaaactcctgacctcaagtgatctgcccgcctcggcctcccaaagtgctgggattacaggtgtgagccaccatgcccagcctcattgtggttttaacttacatgtccctgaatgaggcagaacatcttcctcaaaagttatatttattattttatttcccaagcactaatacagtgctggctctgctaccttctacagatgggtgggctgaggctggagacgtgctcaagttccccagtggataggaggccgggctgggaggctaatcccaggagtctggcttctccagtctgtggtcttgacccagccactgggctgtacttcccctcccttccctggcaaacaaga

SEQ ID NO: 669107 - DNA, 659 bp, Homo sapiens
tcacctcaaaggtctgcagcttcagtcctgaagtcagcaagaccacgaacccaccagaacagaaggaagaaactccaaacacatctgaacatcagaaggaacaaactccggacacgccscatttaagaagtgtgacactcactgcaagcgtccgcggcttcattcttgaagtcagtgagaccaagaacccatgaattccagacccacaacaataataaaaaccaagcaaacccctaaaatggggcaaatccagagggaaaattgcataagaaaatcaatgtaatcatggtgcactatgggactcatctatgaacaatatttacacaaccagaggaataccagtgctagaaatgcatttcaccaaaaatcgtgatatgactacgagaataggacagggaggggggacgtgtgtaaaaacaggggaagataaaaagctgcgtcctggtcttaggacaatgatagcagatagtgcctaatattggaatgtctggaattgatggtgcagtcctgttctcaggcctggggtgggacataacagaaaagccattgaagagggccgaagacagttgcctcaaggactaagtggagttggagtgttcaagggaaggagaggggtcagaagatttttgttttaagcttgataatgctacgatttgaat

SEQ ID NO: 669108 - DNA, 659 bp, Homo sapiens
tcacctcaaaggtctgcagcttcagtcctgaagtcagcaagaccacgaacccaccagaacagaaggaagaaactccaaacacatctgaacatcagaaggaacaaactccggacacgccgcatttaagaagtgtgacactcactgcaagsgtccgcggcttcattcttgaagtcagtgagaccaagaacccatgaattccagacccacaacaataataaaaaccaagcaaacccctaaaatggggcaaatccagagggaaaattgcataagaaaatcaatgtaatcatggtgcactatgggactcatctatgaacaatatttacacaaccagaggaataccagtgctagaaatgcatttcaccaaaaatcgtgatatgactacgagaataggacagggaggggggacgtgtgtaaaaacaggggaagataaaaagctgcgtcctggtcttaggacaatgatagcagatagtgcctaatattggaatgtctggaattgatggtgcagtcctgttctcaggcctggggtgggacataacagaaaagccattgaagagggccgaagacagttgcctcaaggactaagtggagttggagtgttcaagggaaggagaggggtcagaagatttttgttttaagcttgataatgctacgatttgaat

SEQ ID NO: 669109 - DNA, 713 bp, Homo sapiens
tggtatttctaaagtaaatgtcaactttagctcctattgggaatgaacataaattccaaattaatccattttccctgttcaaataccgtcccatacatatgatgttgccatcatggctgctttgcagtggtgccttactaacaggctcccctgagaacaaagtcagccaggacacttagaggatggggatgttgaggatgctggggtggggagcttgtagcagctgcaatgaggcagaggaggcgctcatttatgcctaaagttttgtcaattctttttaacctatgtttttctattatttttactattattaacctttttttaaatcttttttttttaatctattttcttctatattyttttctctgtccctattcttggatacatctgtaggggcagagcccagcctacctggacactgagctgctcccatgggataggtatacttggggtccccttggcaaagggctacctgcaaaaggagagaatggcctttgccaatctcccacctaaacagagccttagctcaccttgcctagaagagggtgaaatatgggctctaatttctgggtcccacctatgtgtcttgtattacttcaggcaataataaatctctgtcaatgaaagatgctattgaaatgttgccaaccaaatctccccctccacaggacctcattactctccatctggcattcactggcctttccctctga

SEQ ID NO: 669110 - DNA, 713 bp, Homo sapiens
tggtatttctaaagtaaatgtcaactttagctcctattgggaatgaacataaattccaaattaatccattttccctgttcaaataccgtcccatacatatgatgttgccatcatggctgctttgcagtggtgccttactaacaggctcccctgagaacaaagtcagccaggacacttagaggatggggatgttgaggatgctggggtggggagcttgtagcagctgcaatgaggcagaggaggcgctcatttatgcctaaagttttgtcaattctttttaacctatgtttttctattatttttactattattaacctttttttaaatcttttttttttaatctattttcttctatatttttttctctgtccctattcttggatacatctgtaggggcagagcccagcctacctggacactgagctgctcccatgggataggtatacttggggtccccttggcaaagggctacctgcaaaaggagagaatggcctttgccartctcccacctaaacagagccttagctcaccttgcctagaagagggtgaaatatgggctctaatttctgggtcccacctatgtgtcttgtattacttcaggcaataataaatctctgtcaatgaaagatgctattgaaatgttgccaaccaaatctccccctccacaggacctcattactctccatctggcattcactggcctttccctctga

SEQ ID NO: 669111 - DNA, 633 bp, Homo sapiens
agcatggactatgagaaagggcttatgtttggaatcccaattatgctgtgtatcagttgtgtaacttcaagaactaccctccctaagcctcagcttcctcatctgtaaacagggataatgtcatctaccttgctgtggtggtgtgcagatttaatgaaatacagtagactttttttttcttaattgccctttgccctttgcccaaccctctcccactcccctcctccagatgggctcatgtaacacagggccagcaggagacggtacaaatgcacttgcacagctacagtgatggatggctgtcaagtggctgtctcagctaaggaaactcaaacatgaaaagggaagaaaaggaagcagattcaaaggctggtgatgagatgatcaagtgcttgcttcagaacacaaatctcaacatgagaccagtgaaattcaattgaagcagagcacacttatatcctcgggtgctttgatatatttaggaggaaatgagggaatatcaaggtcaggtctaaaaggagatcaatgaaaagtgataatttctgctgtsgcaggagataggcactgggtgtacaaatatttcacgtagatggaatgatccaatttcatccagcaaataccacctgtgaacac

SEQ ID NO: 669112 - DNA, 613 bp, Homo sapiens
gaagtgggcagatcacgaggtcaggagattgagaccatcctggctaacatggtgaaaccccatctctactaaaaatacaaaaaaattagccaggcatagtggcaggtgcctgtagtcccagctacttggaaggctgaggcaggagaatggsgtgaacccgggaggcggagcttgcagtgagccgagatcgtgtcagtgcactccagcctgggtgacagagcgagactccgtctcaaaataaataaataaataaataaataaaaataaaaatgggagtaatggattaaacccatcaaaataaataagaatttgtgaatccatactgctataaacaaagaaagatgacatgtagtaaatgtagaaggaatgatggagttagaaaaatccctatttggcaaatactgtagtaataattgtttcaggcaagagccaccaataattagtaaaactagtaggtgaatgtttgatgagtaacaggagatatacagtctcgaagtattttgctttagtatcacatatggatattacactaaatgaaaaaatttggaatatttagcttgagaagagatcgggcgatgtaatagttgttttcaaatgtgtctttacaatgctg

SEQ ID NO: 669113 - DNA, 591 bp, Homo sapiens
attcttaattctctaggattaattaggtcatttttgattatatggtcttaagargattgtaaaaccttgattttatgggcttctcctcttttcaactgaatagtgcacccttcctaggaattcagtaataacgcatttgacgataagttaattgtacccaatagaatgtaagttcctccactagtttacaaatttatgaaaaaggggactgtaaattcaacgaaaactttattcacatcagtatatccagttcttagccaagttctttgtaacagtttgccttaaataaatgtttcattatcttaagactttcccagtaccttgatttcttattccaccaagccacacctgacccattcttccttgtccctataaattgtttgaccatgtgtcttacaacaaaacacctgaaccttgtaaatacctaacccaaggtgtggtggttgagaccagaaattcagaaatgtgtctgtctatggttgaatccatttcagtcgtatccagtagtataactttgaagaagtttcttaatatccttgtgcttctgtttccttatctataaaacagggatgaaaaattcagttattttga

SEQ ID NO: 669114 - DNA, 591 bp, Homo sapiens
attcttaattctctaggattaattaggtcatttttgattatatggtcttaagaggattgtaaaaccttgattttatgggcttctcctcttttcaactgaatagtgcacccttcctaggaattcagtaataacgcatttgacgataagttaattgtacccaatagaatgtaagttcctccactagtttacaaatttatgaaaaaggggactgtaaattcaacgaaaactttattcacatcagtatatccagttcttagcyaagttctttgtaacagtttgccttaaataaatgtttcattatcttaagactttcccagtaccttgatttcttattccaccaagccacacctgacccattcttccttgtccctataaattgtttgaccatgtgtcttacaacaaaacacctgaaccttgtaaatacctaacccaaggtgtggtggttgagaccagaaattcagaaatgtgtctgtctatggttgaatccatttcagtcgtatccagtagtataactttgaagaagtttcttaatatccttgtgcttctgtttccttatctataaaacagggatgaaaaattcagttattttga

SEQ ID NO: 669115 - DNA, 517 bp, Homo sapiens
actctatttggacatgagaaataattcctctcaaaaattaatgaaatagtaaaaaaaaaaaaattagagcttctacaaatcctggttcaagtgaggattcaagaatcagaatgtactattaatgtgacccaatttatgcccacagtttgtgagtatccccggtaatatgtatgcactgaaatatacttttcctcacatttatttggctttagaatacataaaaatcaaaattccaacaattgtttctaaacatttttaagttacataatgttttgagatgctgacaaaaacaagactgtctcctcagaaatatgtacatttgcatctccatgctaaatttcwtaatttttcaagggacgcatggtcctcttgcatttcttctgcagagccgttgggctttgatatggtttggctgtgtcctcacccaaatctcatcttgcattgtagctcccacaattcccacgtgtcattggacgaacctggtgggaggtaactgaatcatgggagcaggtctttc

SEQ ID NO: 669116 - DNA, 632 bp, Homo sapiens
ttatttaaggtctagaaggtgatttgatagattcatttgaattttaattgatgcagccaatatatttcctcagtatgagtggaggaatttaactacaattgatcaggtactatttttaacagctcttataattcttaattatttaacgatttaatttccctctatgacaatatgaattgcaatctgtaaactaaaaggaacatattttgaaaacattttgtatgtactgaacctagcttttttttwtaaaaaaaaaaaggataaaaaagaaaaacattttggacctaatgattctattttatcttcaaattctaaaaatatttccctcttttgagagaaaggaatgtaattcttatatagtactagaaggtctttcactatcaaataaatgggggcaatctggagaggatgctggagaggatacggagaaatagaaatgttttcatactgttcgtgggagtgtaaattaattcaaccattatagaagacattgtggcaattcctcaaggatctggaaccagaaataccatttggcccagcaatcccattactgggtatatacccgaaggattataaatcatgctactataaagacacatgcacacgtatgtttattgcagcactgttcacaa

SEQ ID NO: 669117 - DNA, 632 bp, Homo sapiens
ttatttaaggtctagaaggtgatttgatagattcatttgaattttaattgatgcagccaatatatttcctcagtatgagtggaggaatttaactacaattgatcaggtactatttttaacagctcttataattcttaattatttaacgatttaatttccctctatgacaatatgaattgcaatctgtaaactaaaaggaacatattttgaaaacattttgtatgtactgaacctagctttttttttwaaaaaaaaaaaggataaaaaagaaaaacattttggacctaatgattctattttatcttcaaattctaaaaatatttccctcttttgagagaaaggaatgtaattcttatatagtactagaaggtctttcactatcaaataaatgggggcaatctggagaggatgctggagaggatacggagaaatagaaatgttttcatactgttcgtgggagtgtaaattaattcaaccattatagaagacattgtggcaattcctcaaggatctggaaccagaaataccatttggcccagcaatcccattactgggtatatacccgaaggattataaatcatgctactataaagacacatgcacacgtatgtttattgcagcactgttcacaa

SEQ ID NO: 669118 - DNA, 962 bp, Homo sapiens
caatctcgtaagatattggaggctcttggatatccatttatttttattttatggcaacataaaagctggactcaattactgtgtattgaggcatgacttgtggacttttttaagagaattcttcagtcgagttactgattgatttattgattattgtttgatgataaagtgccaatctatctgcccagagtggtgcttgagcaagagaaacttgcagctggtctatatggacattcaatctattcattgtttcagctagccttctgacttgaacttgcttgtctgggggtcttgccttcatcagggttctggaagtcaaagactttctcattgcagattttattttgtcactttgtcttcgattcatcaggctccacttctcacctgatttatatcatctaaacactttttattgctgcragttggtcttttaactctttactgaacttttatgatatcataggaaaggagatgaatgaatgtgctcagatcataaccctggagtagattgtcattagaaggtggatggtctttaccatattttcatctcttaaaaagtgtaattttattcaggcactttagtgaagaggaactagaaataaaattcagttattctagcccttatgattaagaaaaattttgttgaaatgtgataattcattccctatttcattttagttattttgtcattgtccatggtcaagttttcaaaataatacactgttctttaatcacatctttaaagtaatagtaaagttgcaagcttaaagacatccttgaaaaatgtctaagagcaagggagaggtttgggctaaagacaatgtagttcaaaatttagaagatctatcatactaacattccaccaaacgaaataaaaactaataaccttgcaaatgagtgaagatatctttttctattagatatacattaagcaaggaaaagttgagtgaaatttaaatgca

SEQ ID NO: 669119 - DNA, 661 bp, Homo sapiens
tccatgggctttcattagtagaaataattttacaggttaaatgtgtgacaatggagcctcttacctctccttcactggtagaagattaagtaatcttttcaaggtcactcaagtgagttgcaaagccaagcatataatgcaggtctggtaaccaataccccctcccccagttaactaaaaccacattatacatataaaactactgattttttccatgtgtttttccttgaaatatgaacaaattacatggagactcaggattcacaggattttagcttgaagaaaatttttgaaatcaagtccaasgcctctcttcaggcagggatggataattcttacatcagataaaagggtaatgaacacttactttaatgtgtccaggacaggaagcctggagggttcacaatattagaaatgttgctagttaaacccttgttcctagaacatcaacctatcagacctcacttttctctttaacataataataaattcaaaccattttccacctagtagctgttggctgtttgaacgtagactctccctatataattttcttctccaagttgaaaattccttattcttccaactattcattaggttgtctgaccaggaaagaatatatgagattgtttctttctgttttctgtgcaatatatattca

SEQ ID NO: 669120 - DNA, 3038 bp, Homo sapiens
ggttgaatcatcttcaaaagattttacatggcacaatatgttagctgatactcacattcaagtgtgaattatatctaacattctatccatgagcaccgcattttattttacttcctttgcagttctcatccttgagagcttctcttatccttccccagaatctctcctttttttttttttttttgagacaaagtctcgctctgtcactgaggctggaatgcagtggcgcaatctcggctcactgcaagctctgcctcctgggttcacgccattctcctgcctcagcctcccgagtagctgggaaaacaggcgcctgccaccacacctggcttttttttttttttttctgtatttttagtagagacggggtttcactgtgttagccaggatggtctcgatctcctgacctcgtgatccgcctgcctgggcctcccagagttctgggattataggcgtgagccaccacggccggcccccttcccctgaatctcttatgcacagagatctgccaggattctcctcctcctcatccctccctgcacacccaacatcatttccccccagaacagaaatgtcatgtctttaggccagttacaccttggacatttctgactgttttgtattctagaagatcatgcatgagctcctatgcctcacttgtgaacaaaccaaggagatgtctccttgaaaacctttatagttaaaaaattcatcacccttctaaactttctttagaactcagaagactataaacacaaattatgaaaactctgtcatcaagctgcttccaattcctatacctttgtgtgatggatcctctctgccatctgtgtaatcatgtttgacacttggtgatgaatctttcagtgctctccaccactctttactcaatttcaactatggaatcacaccctatcatttgtaatttacattagactttatttcttttctggggttttgtgattggtagcattttctagctcgatgtttataataaataggaaagctgtgattcaagatgtgtgagaatgatattttttgaccttcttgatttcattttctttggagcatacgaatcacataggaatgatatttcaagatgcaagacatttattcatgtcagagtaagttaactaaattgtatgcaatgcattggatcttgctggagacaaaacagctgctgccacccgcccacatattcatggcctttccaatatcaaatcgtttcttttccatttagaccaagatgtgaaggaaacaagagggaaaataaaatgttgctttacatgttttagacaagattggaaatttattttctaattttcatgttattattatgagtgttatcttgtgacatttcagagattcctttgaataataacaggatttatgaacactactatattcttggatggacttaagcacttcacatatattacctggtttaagttttgaaataaacccttgaaatgtttactttcatcagtgaaacacaaaagagattaaatcccttgccaaaggttacacagctagtaattattagagacaactcaaatactccaggaatccaaatttaaagcctcaccaataaccctatgctatttagatattgtaagagtgatttgaaattatcttgatctaatacaaaatagaaacttttgacgagacctaaatatttataaaattattaaaccatttacttacttatttytaacttctctgtctccctactggaataaaaggaacaataggtcatggatatgtccatcttataccctcttctattcccattacttaaaatagtgccatacatatagcaggggcttgatgaatatttgtggactgaatgaatgagcaaatgaaagagacacatttcaaattcaggtaggtgtctatgaggctgatcatcctcagtcaatttcagtaatagcctctgttgaaatgaaagatccagaacagacaagacaactttcatcaagagtgaaatgtttatatttcacttttgtatataaaaaacttgaaatactttagaaaattagaagacatcttctccctgcttattctataaatgttgattcatatacatctgatgttgaatgggggagaatttcgtagcaaacctgatataaatttgtctgaaaagatattcaaggagcccctttttatccttgaaattaaatatatatatatgaatcttttttattaagtttgcctgaaaatatttctttgtttttgaaaccaatttctttattcaattctacaaagtactcttcaaatatgtatttgattatacttctttttctttcaaaacatatactatttaaaagtttttacattataaatattgattctcttttctactttcctaacatatctgaatttctgctagagtaattttttatattgcagctttgttcttctttttcttctaaatgtctgataagccatttaattctaaaaaattaaaaacaaatttcaaataagacaaataattcaatcctacttacataaaaaacaagagcatcaaaacaataaggaaaatacattagcaatatagactaaaatgacataaaaatagtaaaaactacatgaggacaatgataaagtacatcaattattataaagtaagctttggaaaagtgcaatataattttgtttagaattaaaataacaaaaaaccctgagtttctttttctaggtaaaaaccatcactaatattttgaagtattttatcatctatctctcactctctctctctatcttcacacccatatatacaattttgaacctgcaataccgataaatcttgttcctgcattatttgacattatgaaatgaggtattcttcaaaatctctaaaaattatttgagagctgaatcttagtggtgtttcgtatgcgaatgtgtgaatgtatcattttgcatagcctggcttctcttgttagatatttatgtagctttacagtgtactatcataaatgatgatacatatccttgatgtaattttgacatagattattcctcaggataaattttga

SEQ ID NO: 669121 - DNA, 3038 bp, Homo sapiens
ggttgaatcatcttcaaaagattttacatggcacaatatgttagctgatactcacattcaagtgtgaattatatctaacattctatccatgagcaccgcattttattttacttcctttgcagttctcatccttgagagcttctcttatccttccccagaatctctcctttttttttttttttttgagacaaagtctcgctctgtcactgaggctggaatgcagtggcgcaatctcggctcactgcaagctctgcctcctgggttcacgccattctcctgcctcagcctcccgagtagctgggaaaacaggcgcctgccaccacacctggcttttttttttttttttctgtatttttagtagagacggggtttcactgtgttagccaggatggtctcgatctcctgacctcgtgatccgcctgcctgggcctcccagagttctgggattataggcgtgagccaccacggccggcccccttcccctgaatctcttatgcacagagatctgccaggattctcctcctcctcatccctccctgcacacccaacatcatttccccccagaacagaaatgtcatgtctttaggccagttacaccttggacatttctgactgttttgtattctagaagatcatgcatgagctcctatgcctcacttgtgaacaaaccaaggagatgtctccttgaaaacctttatagttaaaaaattcatcacccttctaaactttctttagaactcagaagactataaacacaaattatgaaaactctgtcatcaagctgcttccaattcctatacctttgtgtgatggatcctctctgccatctgtgtaatcatgtttgacacttggtgatgaatctttcagtgctctccaccactctttactcaatttcaactatggaatcacaccctatcatttgtaatttacattagactttatttcttttctggggttttgtgattggtagcattttctagctcgatgtttataataaataggaaagctgtgattcaagatgtgtgagaatgatattttttgaccttcttgatttcattttctttggagcatacgaatcacataggaatgatatttcaagatgcaagacatttattcatgtcagagtaagttaactaaattgtatgcaatgcattggatcttgctggagacaaaacagctgctgccacccgcccacatattcatggcctttccaatatcaaatcgtttcttttccatttagaccaagatgtgaaggaaacaagagggaaaataaaatgttgctttacatgttttagacaagattggaaatttattttctaattttcatgttattattatgagtgttatcttgtgacatttcagagattcctttgaataataacaggatttatgaacactactatattcttggatggacttaagcacttcacatatattacctggtttaagttttgaaataaacccttgaaatgtttactttcatcagtgaaacacaaaagagattaaatcccttgccaaaggttacacagctagtaattattagagacaactcaaatactccaggaatccaaatttaaagcctcaccaataaccctatgctatttagatattgtaagagtgatttgaaattatcttgatctaatacaaaatagaaacttttgacgagacctaaatatttataaaattattaaaccatttacttacttatttctaacttctctgtctccctactggaataaaaggaacaataggtcatggatatgtccatcttataccctcttctattcccattacttaaaatagtgcsatacatatagcaggggcttgatgaatatttgtggactgaatgaatgagcaaatgaaagagacacatttcaaattcaggtaggtgtctatgaggctgatcatcctcagtcaatttcagtaatagcctctgttgaaatgaaagatccagaacagacaagacaactttcatcaagagtgaaatgtttatatttcacttttgtatataaaaaacttgaaatactttagaaaattagaagacatcttctccctgcttattctataaatgttgattcatatacatctgatgttgaatgggggagaatttcgtagcaaacctgatataaatttgtctgaaaagatattcaaggagcccctttttatccttgaaattaaatatatatatatgaatcttttttattaagtttgcctgaaaatatttctttgtttttgaaaccaatttctttattcaattctacaaagtactcttcaaatatgtatttgattatacttctttttctttcaaaacatatactatttaaaagtttttacattataaatattgattctcttttctactttcctaacatatctgaatttctgctagagtaattttttatattgcagctttgttcttctttttcttctaaatgtctgataagccatttaattctaaaaaattaaaaacaaatttcaaataagacaaataattcaatcctacttacataaaaaacaagagcatcaaaacaataaggaaaatacattagcaatatagactaaaatgacataaaaatagtaaaaactacatgaggacaatgataaagtacatcaattattataaagtaagctttggaaaagtgcaatataattttgtttagaattaaaataacaaaaaaccctgagtttctttttctaggtaaaaaccatcactaatattttgaagtattttatcatctatctctcactctctctctctatcttcacacccatatatacaattttgaacctgcaataccgataaatcttgttcctgcattatttgacattatgaaatgaggtattcttcaaaatctctaaaaattatttgagagctgaatcttagtggtgtttcgtatgcgaatgtgtgaatgtatcattttgcatagcctggcttctcttgttagatatttatgtagctttacagtgtactatcataaatgatgatacatatccttgatgtaattttgacatagattattcctcaggataaattttga

SEQ ID NO: 669122 - DNA, 3038 bp, Homo sapiens
ggttgaatcatcttcaaaagattttacatggcacaatatgttagctgatactcacattcaagtgtgaattatatctaacattctatccatgagcaccgcattttattttacttcctttgcagttctcatccttgagagcttctcttatccttccccagaatctctcctttttttttttttttttgagacaaagtctcgctctgtcactgaggctggaatgcagtggcgcaatctcggctcactgcaagctctgcctcctgggttcacgccattctcctgcctcagcctcccgagtagctgggaaaacaggcgcctgccaccacacctggcttttttttttttttttctgtatttttagtagagacggggtttcactgtgttagccaggatggtctcgatctcctgacctcgtgatccgcctgcctgggcctcccagagttctgggattataggcgtgagccaccacggccggcccccttcccctgaatctcttatgcacagagatctgccaggattctcctcctcctcatccctccctgcacacccaacatcatttccccccagaacagaaatgtcatgtctttaggccagttacaccttggacatttctgactgttttgtattctagaagatcatgcatgagctcctatgcctcacttgtgaacaaaccaaggagatgtctccttgaaaacctttatagttaaaaaattcatcacccttctaaactttctttagaactcagaagactataaacacaaattatgaaaactctgtcatcaagctgcttccaattcctatacctttgtgtgatggatcctctctgccatctgtgtaatcatgtttgacacttggtgatgaatctttcagtgctctccaccactctttactcaatttcaactatggaatcacaccctatcatttgtaatttacattagactttatttcttttctggggttttgtgattggtagcattttctagctcgatgtttataataaataggaaagctgtgattcaagatgtgtgagaatgatattttttgaccttcttgatttcattttctttggagcatacgaatcacataggaatgatatttcaagatgcaagacatttattcatgtcagagtaagttaactaaattgtatgcaatgcattggatcttgctggagacaaaacagctgctgccacccgcccacatattcatggcctttccaatatcaaatcgtttcttttccatttagaccaagatgtgaaggaaacaagagggaaaataaaatgttgctttacatgttttagacaagattggaaatttattttctaattttcatgttattattatgagtgttatcttgtgacatttcagagattcctttgaataataacaggatttatgaacactactatattcttggatggacttaagcacttcacatatattacctggtttaagttttgaaataaacccttgaaatgtttactttcatcagtgaaacacaaaagagattaaatcccttgccaaaggttacacagctagtaattattagagacaactcaaatactccaggaatccaaatttaaagcctcaccaataaccctatgctatttagatattgtaagagtgatttgaaattatcttgatctaatacaaaatagaaacttttgacgagacctaaatatttataaaattattaaaccatttacttacttatttctaacttctctgtctccctactggaataaaaggaacaataggtcatggatatgtccatcttataccctcttctattcccattacttaaaatagtgccatacatatagcaggggcttgatgaatatttgtggactgaatgaatgagcaaatgaaagagacacatttcaaattcaggtaggtgtctatgaggctgatcatcctcagtcaatttcagtaatagcctctgttgaaatgaaagatccagaacagacaagacaactttcatcaagagtgaaatgtttatatttcacttttgtatataaaaaacttgaaatactttagaaaattagaagacatcttctccctgcttattctataaatgttgattcatatacatctgatgttgaatgggggagaatttcgtagcaaacctgatataaatttgtctgaaaagatattcaaggagcccctttttatccttgaaattaaatatatatatatgaatcttttttattaagtttgcctgaaaatatttctttgtttttgaaaccaatttctttattcaattctacaaagtactcttcaaatatgtatttgattatacttctttttctttcaaaacatatactatttaaaagtttttacattataaatattgattctcttttctactttcctaacatatctgaatttctgctagagtaattttttatattgcagctttgttcttctttttcttctaaatgtctgataagccatttaattctaaaaaattaaaaacaaatttcaaataagacaaataattcaatcctacttacataaaaaacaagagcatcaaaacaataaggaaaatacattagcaatatagactaaaatgacataaaaatagtaaaaactacatgaggacaatgataaagtacatcaattattataaagtaagctttggaaaagtgcaatataattttgtttagaattaaaataacaaaaaaccctgagtttctttttctaggtaaaaaccatcactaatattttgaagtattttatcatctatctctcactctctctctctatcttcacacccatatatacaattttgaacctgcaataccgataaatcttgttcctgcattatttgacattatgaaatgaggtattcttcaaaatctctaaaaattatttgagagctgaatcttagtggtgtttcrtatgcgaatgtgtgaatgtatcattttgcatagcctggcttctcttgttagatatttatgtagctttacagtgtactatcataaatgatgatacatatccttgatgtaattttgacatagattattcctcaggataaattttga

SEQ ID NO: 669123 - DNA, 640 bp, Homo sapiens
gtattatttatttcaaaattcatattaacttgagaagggcaataaacaggtccctgtgtgggagggtctatggaatctgtagcactggttttgggaatataaatctggtgaatgaatataagctctcctggtatcaattagatgttaatcttcgataactttttattgatgccataccatgaatgactacatttaaactttatcttcattaatagttatgaaagccaatccaaagacctaagaattaatgttgaaatgttcccaagactcctcctctgggattcccgtttatgtgattttctctaaaataaacaatgctttggggattatgcattcgtcattcattcctacttttccttattaaatcaggggcagaaaaygtgcaatccatatttagtgaagcacagatgactagaaccgtctgtcaaatctactgtgagcattaattgctctctcaagtcggtaaaaaaggaatttcagaaaaccttcaggaaagaggacattgccttttcttagggataaaaatcttttattgcatgtctgttgacttaattctttataatgccaggttctctatgaacataaaagttggggaccattatatcaaggattaaagtatgaaggcaaatgttagtttcta

SEQ ID NO: 669124 - DNA, 359 bp, Homo sapiens
tctggtctggaaaagggtggtgaaaaaagtgtacataccttgaggaaggagcattaggagttctcgggtagtgaggacccaaatgttctttttctttttctttttttttttttttttggagatggagtctctccctgtcgcccaggctggagtgcagtggtgygatcacagctcacagcaacctccacctcccgggttcaagcgattctcctgcctcagcctcctgagtagctgggactacaggcgcacgccgccacgcttggccaattttttagtagagataggatttcacggtgttgcccaggctggtctcgaactcctgagctcaggcaatcagcccgccttggcctcccaaggca

SEQ ID NO: 669125 - DNA, 643 bp, Homo sapiens
cattagtctgttctcacgctgctttgaagaaatacgtgagactgggcaatttataaagaaaaaagttttaattgactcacagttctgcatggctgggcaggcttcaggaaacttacaatcatggcagaaggtgcatcttcacagggtggcaggagagagaatgagtgcaagcrggggaaatgccagatgctttatgaaaccatcagatctcatgagactcactcattatcatgagaacagcatgggggaaaccacccccatgatacaattacctccacctggtcccacccttgatgcatggggattattacaattcaaggtgagatttgggtggggacacagagccaaaccatatcacctgagtactaagtagtggagatattaatatatcaatacgtattaatagaatcactcattgctgctgttcatttctgctgcatttaacctgtatcccccacccaatagcaaccatggtaaaacataaaattagtattcctcctattttgcatagcatccccttcctacaagatgccatgctctcctttatctatttgatgcaggtgtcatgattctgatttttgcaggtgaagaaactgaggctcagagaagtaaggaccttgctcagggtcacaagatggtaaga

SEQ ID NO: 669126 - DNA, 1218 bp, Homo sapiens
tgacttgcttgtaaccacaaccatggaggtaatgcattcgtgctttgaaaccatggggacggacgcaggctggtccacgggttcagaaaaaggtttcactgccatttcccagtatgagagtttacaaaggtgttcatcaggtcacctagctggggatctaatgctccattgttggactgtagcattgctctgatgcttcaaccagctcctcagcatcccmcctgtcattctgttcccatgcatttaaaataagaaggacaatctaaatagtatattccccagcacaacaaaaaaaatttttcaataattttgtttttgcttccttttatttaagaccttgaaaaatttatagttatagcactctgtgtaagacagtgcaaggaagtaaattttaaaatacctcatcttctgcacatgtattgcacagtcattatgacagggttcaaagcaagaaaaattaaaaactgtctgacttttgtctcaaaaatttatctggcttgattgaagaaggccaaattgtggagggaaaaaaatggcagaagcactggccaaaaactctgataaaaacttgagtgtatttatttggccagagttactagctcaaaatttatgttcttcttaattccttgtataggagtcaattaaaatggcccaatccaattctatgttgaaagaagagccatagctttgtggaaagttgagaatttaggatgttttcatgctgatttcattgtcctgaaataaaatccaaatgaaaatatggatcagagaagaaagagtgggaagtggttgggcgcatgctagtcaaagagtacaaaattccagttagataggaggaatcagttcaagggtctactgtaaaacatggttactgtagttaaaaaccaatggatcatattcttgaaaactgctgctaagagagattttaaatgttctccccacaaaaagagatgagcatgtgaagtaatgaatatgttaatcagcttgatttagccattccacaatttcaaaaaaaaacatgttgcacaccatttttatttgtgaatttaaaaataaataaataaaaagaaaagaaaacatagaaactgaaggtcatcacttagtcatacacaggtatcaattactgtgtggcaattcacattgcactttacataccttgtcaaaaataagggctttctttttttaaaaaattttaattaattaatttattttatttta

SEQ ID NO: 669127 - DNA, 1218 bp, Homo sapiens
tgacttgcttgtaaccacaaccatggaggtaatgcattcgtgctttgaaaccatggggacggacgcaggctggtccacgggttcagaaaaaggtttcactgccatttcccagtatgagagtttacaaaggtgttcatcaggtcacctagctggggatctaatgctccattgttggactgtagcattgctctgatgcttcaaccagctcctcagcatcccacctgtcattctgttcccatgcatttaaaataagaaggacaatctaaatagtatattccccagcacaacaaaaaaaatttttcaataattttgtttttgcttccttttatttaagaccttgaaaaatttatagttatagcactctgtgtaagacagtgcaaggaagtaaattttaaaatacctcatcttctgcacatgtattgcacagtcattatgacagggttcaaagcaagaaaaattaaaaactgtctgrcttttgtctcaaaaatttatctggcttgattgaagaaggccaaattgtggagggaaaaaaatggcagaagcactggccaaaaactctgataaaaacttgagtgtatttatttggccagagttactagctcaaaatttatgttcttcttaattccttgtataggagtcaattaaaatggcccaatccaattctatgttgaaagaagagccatagctttgtggaaagttgagaatttaggatgttttcatgctgatttcattgtcctgaaataaaatccaaatgaaaatatggatcagagaagaaagagtgggaagtggttgggcgcatgctagtcaaagagtacaaaattccagttagataggaggaatcagttcaagggtctactgtaaaacatggttactgtagttaaaaaccaatggatcatattcttgaaaactgctgctaagagagattttaaatgttctccccacaaaaagagatgagcatgtgaagtaatgaatatgttaatcagcttgatttagccattccacaatttcaaaaaaaaacatgttgcacaccatttttatttgtgaatttaaaaataaataaataaaaagaaaagaaaacatagaaactgaaggtcatcacttagtcatacacaggtatcaattactgtgtggcaattcacattgcactttacataccttgtcaaaaataagggctttctttttttaaaaaattttaattaattaatttattttatttta

SEQ ID NO: 669128 - DNA, 693 bp, Homo sapiens
agaatgaagactattctcagcaatcagactgtcgacattccagaaaatgtcgacattactctgaagggacgcacagttatcgtgaagggccccagaggaaccctgcggagggacttcaatcacatcaatgtagaactcagccttcttggaaagaaaaaaaagaggctccgggttgacaaatggtggggtaacagaaaggaactggctaccgttcggactatttgtagtcatgtacagaacatgatcaagggtgttacactgggcttccgttacaagatgaggtctgtgtatgctcacttccccatcaacgttgttrtccaggagaatgggtctcttgttgaaatccgaaatttcttgggtgaaaaatacatccgcagggttcggatgagaccaggtgttgcttgttcagtatctcaagcccagaaagatgaattaatccttgaaggaaatgacattgagcttgtttcaaattcagcggctttgattcagcaagccacaacagttaaaaacaaggatatcaggaaatttttggatggtatctatgtctctgaaaaaggaactgttcagcaggctgatgaataagatctaagagttacctggctacagaaagaagatgccagatgacacttaagacctacttgtgatatttaaatgatgcaataaaagacctattgatttggaaaaaaaaaaaaa

SEQ ID NO: 669129 - DNA, 660 bp, Homo sapiens
acatagggagacaccgtctctccaaaaaaaaaaaaaaaaaaaaaattagccaccatgatggtgagtgctacttgtgaggctgaggtagaaggatcacttgagcctgggaggtcaaggctgcactaagctgtgattgtgccactgcacttcagcctggacaaaagagtgagactctatctcaaaacaaaaaaaaaaaaaaaaaagaaaggtggaacatattataactgtcagaccatttgttgcaacctgggctgcaatctttttctttaaacccaaaagaacttctgaccaggtaaatgtagtctttttttcttttttaatgacaaatctactttataaagtaccttcccttatcagtgagaaagaaaatataaaagagctgagtcaaatctggagtcaayaaaggtttgtagttcttcaaacaagaacccttgctctgaattctaaaagtaaataacagacatgctgaaaaaatatttcattttatgaaaggttctgcaccaaagccttttacaaaaacagtctacaaaacctactaaacatcctgttccatcttccactttgaaatcactgcttggtctaaattcagtttcattaataaaaatgaacacaataaaacagtactctatgcccccattccaccccaacaattatcttcaa

SEQ ID NO: 669130 - DNA, 579 bp, Homo sapiens
aaaactggtttgtccctcccatccccgattccagcttcagttccaccagtcctagaggtgtgcactgaaccggctttttaggacactctcccgctcccaccgccgccatagacacatatcttaaacacacacatgtcaytgggaaaatgattaaaaacaaaatctgtcaacccagaaaacctctccacaaaggtaacaggaagttagttttgctacaactagacagcagtgtgcatcacagacagtcggctaaagagattgcaaagaaaaagagctttcatagcctggcagacaccacccactccatacgtgctaatttcccaaatgcctcctgtcttttgacaagaagtttacttcctgaagcgagcacctgggcctcacactcctgaggatgggggagatccggcgccacctcctggctgtttccaaggcggagagaaggagcccggggctgcaaaacctgtcagaggatcccagactgaggcggactcagggaggtttcccacgcctaagatttcatccctaaccaatcagcgatcaccactccaaaacccttgaaagccccccccaactcctcag

SEQ ID NO: 669131 - DNA, 1896 bp, Homo sapiens
  misc_feature 981, 983, 984, 985, 988, 989, 990, 992, 993, 994, 995, 998,999, 1000, 1001, 1002, 1036: n = A,T,C or G
cttgaagccagaagttcgagaccagcctgggcaatacagagagattccccgtctctacagaaagaaaaaaaaaaattagccggcagtggtggcacgcacttgcggccccagctattcaaggaggctgaggtgggagaatcgcttgaacccgagaggcggagaataccgtgagcagagactgcgccactgcattccagcctgggccacagagagagactctgtctaaaaaacaaaacaaaacaaaataaaaacaaacaagcacacacaaaaacagataaactgataaaatggtaactttctttttctgaacacaataggtggccgggcagcgcactcaggggcagctggaagcagtggaggggcgacctggtggggaggcataggtcccacagccccaagccccgacaagagtgcctggggctcgtccctcgaggctgcctcgggcgccagcgaaggccttggcgaaggctgaccccaacgagacacgggcgggacagagaacagtcattctggcctgagccggggaactgtgtgtggagaccattgcaaaagatgcctactgctgtgctcaacagggaaacaggaaaaccctccagaggagagatttggataatgcgatagaagctgtggatgaatctgcttttttggaaggtacttcgggtcgattgctcagcagtgcaggttcccggccttcatctgcatccttcagctcgcccctctccgcaggcttcagcgttgagaagaacagtcttggcacttgcatacatactcttcctgttctaccctcgctcacaccggtataagcctccatctcaaccgttggcttttccctacaagatcttccacaacgtgtgtccgtcttccagtcaggcctggatgcagccgctgctgcttggagcagagatgaagaaagtgttctgcttaagtggcttactgcacgatgaggaccagaataaaggtctttgatcagaaaaggaaggnannnaannnannnnagnnnnntcttctttttttgttttatatgagaggttccggnttgttacgggaggtttggcttagttaaatggtaacatatgaacacaaagaaggaaacaagagacactgaggtctacttgattggggggcatggagggagaaaatataactattgggtactgggcttaatacctgaatgacgaaatgatctgcacaacaaacaccgatgacacatgtttacctrtgtaacaaaccttcgcatgtaccctcaaacaaaagttaaaaaaaaaaaaaaagaaaaaagaaaatctggaaggaactagggctttgtggggccctaagaatagggcctccaggattgtcccagtttatgcctgtcatcctggtgtagctattaataacctcctctttcactctcaaaagtgccttggtttggaataaattatgtggtcactcaaccagtttaaggaggcaattgacttgcttagcaccgtctttatgtctccctatggggtagctttaactgtccattgtttgcccaactctgagcacatccatctatcactcaaccttctattcctggtgtcttgcaaatgatgggtatataaatgttttggttgaaggaatgaaagaatgggaagaggcattacttgttgatggtaacagggacctggaatcatagagttaatttgggaagagatcttcaaactcatctgtttgtaggtgtggaaactcagtctcagaaatgtgaagtagcttgctcaaggccatatcgttagtggcaaatccagggcttaatgtttcaaaactattactactcaaaaagtggtccctggatgagcagtaccagaagtacctggtggtttgttagaaaggtggaatctcaggtcccaccccaagaactatgtcagtgtctatgaa

SEQ ID NO: 669132 - DNA, 1743 bp, Homo sapiens
cgggccccatgggctcttcagggcctctctttcttcttcctcccattgctggcgctgaagttcttttctcatatcttcagataatagggttttttcattagcaggactaataaaactagcaggaaaacagagcaaaaactatcttcagataaggattgagatatcagtgtttaagtacagtcagttgcatcatgcataagtaacactatttgataaagaaaacagggaactacagaggcttctgacccacaagactgctggaaaatcaataaaacagccttcgccttttttttttttggagactagtcttgctctgtcgcccaggctggagtgcagtggcacgatctcggctcactgcaacctcggcttcccaggttaaagagattctcctgcctcagcctcccgagtagctgggattacaggcacccaccacsacatctggctaatttttgtatttttagtagagacagggtttcaccatgttggctaggctggttttgaactcctgatctcaggagatccgcctgccttggcctcccaaagtgctgggattacaggcatgagccactgcgcccggccagccttcacccttcttactcaagcaccagacttgttaccttagcctgacggaatcttgcctgagcactcaagacaaaaaactttccttccacccaggtcctgggctgaccagatgggaggtggcccaggcagggaggaggaactctgggtctcctcctgtggatggtctctcatctggggacatgaaaactgcttagcactgtggcctgagtggtgtctcctgtccttgcagatggctgggccctgagaggctcaaaggtttccattctccctttctttctttttttttttttttttttttttgagacggagtctcgctctgtagcccagactggagtgcagtggcgtcatcttggctcactgcaggctctgcctcctggttcacgccattctcctgcctcagcctcctgagtagctgggactcccacgcggccgcaaccacacctggctaattttttttttttttgtattttcagtagagacggggttttactgtgctagccaggatgatctcgaactcctaaccttgtgatccgcccgcctcggcctcccaaagtgctgggattacaggcgtgagccaccgcgcccagcttccattctccctttcttatgccaagccaaaggctatgtgctggatgcctgaacctgcaggacttggacaaggtggagtttctcccaacacttttcacataaaagttcctatggtaagaggaatttattcccctggatgtttcagagttatctcttaggtcttacgttttagagttatgtcttaggtcttaggccctgctgaaaaatctagttataaggcccttacttcaaaaatgcaatgatacataaagaaaaagtgagtaagttctctccctagagccacttgtttgtgggataatcaagtgtatattctcaaaccacttgtctccacaaagcctggtttgctggtttcgtttgggtttattctgttactctgttgtcagacatccttccaagtaaaagagacagctctactcatccaccagtcaggttgttccccaagtgtggattatgtgtgtatgtgcatgctaaccactaaaaagtgcttcaatcaatcaatcaatcaatcaatatctccttactggagcaacagagatcattaattataaaacagcctcccctcacaaaacaatc

SEQ ID NO: 669133 - DNA, 1743 bp, Homo sapiens
cgggccccatgggctcttcagggcctctctttcttcttcctcccattgctggcgctgaagttcttttctcatatcttcagataatagggttttttcattagcaggactaataaaactagcaggaaaacagagcaaaaactatcttcagataaggattgagatatcagtgtttaagtacagtcagttgcatcatgcataagtaacactatttgataaagaaaacagggaactacagaggcttctgacccacaagactgctggaaaatcaataaaacagccttcgccttttttttttttggagactagtcttgctctgtcgcccaggctggagtgcagtggcacgatctcggctcactgcaacctcggcttcccaggttaaagagattctcctgcctcagcctcccgagtagctgggattacaggcacccaccaccacatctggctaatttttgtatttttagtagagacagggtttcaccatgttggctaggctggttttgaactcctgatctcaggagatccgcctgccttggcctcccaaagtgctgggattacaggcatgagccactgcgcccggccagccttcacccttcttactcaagcaccagacttgttaccttagcctgacggaatcttgcctgagcactcaagacaaaaaactttccttccacccaggtcctgggctgaccagatgggaggtggcccaggcagggaggaggaactctgggtctcctcctgtggatggtctctcatctggggacatgaaaactgcttagcactgtggcctgagtggtgtctcctgtccttgcagatggctgggccctgagaggctcaaaggtttccattctccctttctttctttttttttttttttttttttttgagacggagtctcgctctgtagcccagactggagtgcagtggcgtcatcttggctcactgcaggctctgcctcctggttcacgccattctcctgcctcagcctcctgagtagctgggactcccacgcggccgcaaccacacctggctaattttttttttttttgtattttcagtagagacggggttttactgtgctagccaggatgatctcgaactcctaaccttgtgatccgcccgcctcggcctcccaaagtgctgggattacaggcgtgagccaccgcgcccagcttccattctccctttcttatgccaagccaaaggctatgtgctggatgcctgaacctgcaggacttggacaaggtggagtttctcccaacacttttcacataaaagttcctatggtaagaggaatktattcccctggatgtttcagagttatctcttaggtcttacgttttagagttatgtcttaggtcttaggccctgctgaaaaatctagttataaggcccttacttcaaaaatgcaatgatacataaagaaaaagtgagtaagttctctccctagagccacttgtttgtgggataatcaagtgtatattctcaaaccacttgtctccacaaagcctggtttgctggtttcgtttgggtttattctgttactctgttgtcagacatccttccaagtaaaagagacagctctactcatccaccagtcaggttgttccccaagtgtggattatgtgtgtatgtgcatgctaaccactaaaaagtgcttcaatcaatcaatcaatcaatcaatatctccttactggagcaacagagatcattaattataaaacagcctcccctcacaaaacaatc

SEQ ID NO: 669134 - DNA, 654 bp, Homo sapiens
tacccctaaattattctttattagaccattctgtttattgttttccaaatttaaattatcatctgtcccttgtgtgagacactaaattccatgaggaactttgtcatgttcactgytgtatctctagcacccggcatagggcctgaaacttagtaggtgttcaacaaacatatgcttaaggatgaatgattggtgaataaggttgtcagaagagacttgcccatcaaactagggaataatagaagacggtatgtaaccaaatgcaagttctggtaggctctcccttttgcaaggtgactttgtcacttctccccttaggaggtgaagtttatttcttcatccatagaatccaagcttagtcacgcaatttgtttggccaaggggatattagcaaatgtgatacaagcagagggtgagaagtgtttgtttgagctggttcactggataagtggcgttggcttgctatgattgtatggtgattgtcttctcttactgatgggaacccatccaccacgtgaagaagcctaggctaggctaatggtgagcaacaacagggggagaggatctggtcatcctgccaaggccccagacatgtgagtgagaccgtcctagaccacctggcccaagccaagtcagccaagacaagaagaccta

SEQ ID NO: 669135 - DNA, 1032 bp, Homo sapiens
taggcagtttgactccaaagcccacatccattaaactatattctttacatgttatatatatatcgtgggatcattgaccattctggttatattcttattatcatcaccagattcattcaaaattacaactgaagccagcataatcatttcactagaaatgccaacactttcactagattatagccaattataaattttaatattttttgagtttgctcccaaccactctcaccctatttgtgatccctcaaatgcattttaaccataatgaaagaccagtgggtgatctggtaacagaaccaacccaaatatggagaacagtggccaaaacaaaaccaatgtaatctgggtctcttgggaagwgtcaatgaacatcaccataaggattaaattatactatatgtaattatgatagtcaccagtcactacttttgtgtgtgtttcatgcagacagaaagccaggggttgaaaatgaaaggctgttaatatctccttgttcagtacatatgtgtttagcattttaaagcagattcatttagaatctcacgttagaatttcacttttcccttctaaggactcagagggtttcgatattaacttcccctgtggaggtgacagatgtcagagagagatcaagaagttcaagtccacagtaactgaggcatacagttctgcctggatgctcaacttatgattcaagacttcaaaaagtacaaatgttcgttgtcacacattcattcacttactcaaccaacagacctttccagagagtccaatatgtagtgatgcttctcattcaataccaattttactaagagcaccatgattttggttcaagtttttctccaaaagaaaagtaaaaaagaagacaactctttacattcaaattcccaggaaaacttttgactcttaggatgatagagtattcaagtaattgccaaggaagattgaatacttttaaaatattaatcagttgtggctgttctggcaggggctagatcagtgaatctttcaaagtccctaataatgcca

SEQ ID NO: 669136 - DNA, 1931 bp, Homo sapiens
actacttaggcataaaaaatgaaatcatgtattttgcagcaacaggagctggagaccattatcttaagtgaaatcattcaggaacagaaagtcaaatactgcaagttctcatgttctcaattataagtgagagctaaataatatgtacacacggatatagggagtggaataatagacattgaagtctcagaaaagtgggagggtgagagagaggtaaagtataagaagttaactaatggatacaatgtacagtattggggtggtggttacattgaaagcccagactttatcactatgcaaaaactcacataacaaaaatgcaggtgtaccccctatatctatttttaaaagtgaatagtctcctttaacatatttttgctttacacaatctacttactaaactacacatttctgttcctctcagtgtatttctactgtgtcatatttctcatctaagcacaatagtacaactgcttcctacaaaccatatatgtacattgcttattagcaagttgaagtgagtttctttccagattctaggattttagaaacaaaaagctagtgtccttagaggggtgggaaggaattcatacacagtgatgtgtttatgagattcttatgtgtttatgaatataaaacagtaagaaagttttcagtaagtcccagaaatcaacctataattagttatgacacatataggaggggctggatacatctttaaaaactcagtaagcaagtatttaatgacgttggcttaagcctataaaactttccaaagcattgctcatctaacaagatcagtgccacagaatgagttagattttattgggtgagctaacagtttcccgtgaaatgagaacttaaggactgtgcttattaagtcaaactattcatataataaagtaatttaggtaattgccattgttactctgaactgagatttgtgagattctctctactactaccattttcgttgctcagcaaatgacctcatatacttttgtagcaacaaagttgagagttaattttctttatttctcactactagttttttggcatccactcctgtacccttactccattcctgaatatcagcacatctctgactgctatgtatttcctattcacatttcatccttttagagatttttagattaaaatgtcgtcttggttgtattctttttttaacaatttaattcacaaattatatttccccaagtgtttaaaattgtttatatatccacatatatatatccacatatacatatacacatatatatayacatatatacatatatatatacatatataatttttaatattagaacatgccttcccctagtggaaaagcatgagtttctaaagcagcagagatacatggactgaacctagttcacatgttttctgttctatctttgctgctatggtttttgtcttaatggggcacttagtttacaggtcaccacatttcttataatttctaatatcctatcaccaggtactttacaccagactggactccagacatctgatttttgaaaaaactttactatagaggctaaagttgttaaccattaaatataacaaatctccaataacattccaatgtaaatttggctataatttaagttcttgatcccacatcccatttattagcactaaatatgtgtcactcattgccttacagattgaggatacaaaaaataaaagactaagaatactcctactctaaagatacccctacccaaaagagataaagaaaaaataaaaggtaaaagttattagttctttgggaaaaatagaactatttataaaatgtttgtcactagccaagcattcataacaagattggtagttatgaaatatctatgttggtacattaaaaaaaaaagatgaactcaaatcaattaccaagctgtataacttaaatg

SEQ ID NO: 669137 - DNA, 1931 bp, Homo sapiens
actacttaggcataaaaaatgaaatcatgtattttgcagcaacaggagctggagaccattatcttaagtgaaatcattcaggaacagaaagtcaaatactgcaagttctcatgttctcaattataagtgagagctaaataatatgtacacacggatatagggagtggaataatagacattgaagtctcagaaaagtgggagggtgagagagaggtaaagtataagaagttaactaatggatacaatgtacagtattggggtggtggttacattgaaagcccagactttatcactatgcaaaaactcacataacaaaaatgcaggtgtaccccctatatctatttttaaaagtgaatagtctcctttaacatatttttgctttacacaatctacttactaaactacacatttctgttcctctcagtgtatttctactgtgtcatatttctcatctaagcacaatagtacaactgcttcctacaaaccatatatgtacattgcttattagcaagttgaagtgagtttctttccagattctaggattttagaaacaaaaagctagtgtccttagaggggtgggaaggaattcatacacagtgatgtgtttatgagattcttatgtgtttatgaatataaaacagtaagaaagttttcagtaagtcccagaaatcaacctataattagttatgacacatataggaggggctggatacatctttaaaaactcagtaagcaagtatttaatgacgttggcttaagcctataaaactttccaaagcattgctcatctaacaagatcagtgccacagaatgagttagattttattgggtgagctaacagtttcccgtgaaatgagaacttaaggactgtgcttattaagtcaaactattcatataataaagtaatttaggtaattgccattgttactctgaactgagatttgtgagattctctctactactaccattttcgttgctcagcaaatgacctcatatacttttgtagcaacaaagttgagagttaattttctttatttctcactactagttttttggcatccactcctgtacccttactccattcctgaatatcagcacatctctgactgctatgtatttcctattcacatttcatccttttagagatttttagattaaaatgtcgtcttggttgtattctttttttaacaatttaattcacaaattatatttccccaagtgtttaaaattgtttatatatccacatatatatatccacatatacatatacacatatatatatayatatatacatatatatatacatatataatttttaatattagaacatgccttcccctagtggaaaagcatgagtttctaaagcagcagagatacatggactgaacctagttcacatgttttctgttctatctttgctgctatggtttttgtcttaatggggcacttagtttacaggtcaccacatttcttataatttctaatatcctatcaccaggtactttacaccagactggactccagacatctgatttttgaaaaaactttactatagaggctaaagttgttaaccattaaatataacaaatctccaataacattccaatgtaaatttggctataatttaagttcttgatcccacatcccatttattagcactaaatatgtgtcactcattgccttacagattgaggatacaaaaaataaaagactaagaatactcctactctaaagatacccctacccaaaagagataaagaaaaaataaaaggtaaaagttattagttctttgggaaaaatagaactatttataaaatgtttgtcactagccaagcattcataacaagattggtagttatgaaatatctatgttggtacattaaaaaaaaaagatgaactcaaatcaattaccaagctgtataacttaaatg

SEQ ID NO: 669138 - DNA, 1931 bp, Homo sapiens
actacttaggcataaaaaatgaaatcatgtattttgcagcaacaggagctggagaccattatcttaagtgaaatcattcaggaacagaaagtcaaatactgcaagttctcatgttctcaattataagtgagagctaaataatatgtacacacggatatagggagtggaataatagacattgaagtctcagaaaagtgggagggtgagagagaggtaaagtataagaagttaactaatggatacaatgtacagtattggggtggtggttacattgaaagcccagactttatcactatgcaaaaactcacataacaaaaatgcaggtgtaccccctatatctatttttaaaagtgaatagtctcctttaacatatttttgctttacacaatctacttactaaactacacatttctgttcctctcagtgtatttctactgtgtcatatttctcatctaagcacaatagtacaactgcttcctacaaaccatatatgtacattgcttattagcaagttgaagtgagtttctttccagattctaggattttagaaacaaaaagctagtgtccttagaggggtgggaaggaattcatacacagtgatgtgtttatgagattcttatgtgtttatgaatataaaacagtaagaaagttttcagtaagtcccagaaatcaacctataattagttatgacacatataggaggggctggatacatctttaaaaactcagtaagcaagtatttaatgacgttggcttaagcctataaaactttccaaagcattgctcatctaacaagatcagtgccacagaatgagttagattttattgggtgagctaacagtttcccgtgaaatgagaacttaaggactgtgcttattaagtcaaactattcatataataaagtaatttaggtaattgccattgttactctgaactgagatttgtgagattctctctactactaccattttcgttgctcagcaaatgacctcatatacttttgtagcaacaaagttgagagttaattttctttatttctcactactagttttttggcatccactcctgtacccttactccattcctgaatatcagcacatctctgactgctatgtatttcctattcacatttcatccttttagagatttttagattaaaatgtcgtcttggttgtattctttttttaacaatttaattcacaaattatatttccccaagtgtttaaaattgtttatatatccacatatatatatccacatatacatatacacatatatatatacatatayacatatatatatacatatataatttttaatattagaacatgccttcccctagtggaaaagcatgagtttctaaagcagcagagatacatggactgaacctagttcacatgttttctgttctatctttgctgctatggtttttgtcttaatggggcacttagtttacaggtcaccacatttcttataatttctaatatcctatcaccaggtactttacaccagactggactccagacatctgatttttgaaaaaactttactatagaggctaaagttgttaaccattaaatataacaaatctccaataacattccaatgtaaatttggctataatttaagttcttgatcccacatcccatttattagcactaaatatgtgtcactcattgccttacagattgaggatacaaaaaataaaagactaagaatactcctactctaaagatacccctacccaaaagagataaagaaaaaataaaaggtaaaagttattagttctttgggaaaaatagaactatttataaaatgtttgtcactagccaagcattcataacaagattggtagttatgaaatatctatgttggtacattaaaaaaaaaagatgaactcaaatcaattaccaagctgtataacttaaatg

SEQ ID NO: 669139 - DNA, 1931 bp, Homo sapiens
actacttaggcataaaaaatgaaatcatgtattttgcagcaacaggagctggagaccattatcttaagtgaaatcattcaggaacagaaagtcaaatactgcaagttctcatgttctcaattataagtgagagctaaataatatgtacacacggatatagggagtggaataatagacattgaagtctcagaaaagtgggagggtgagagagaggtaaagtataagaagttaactaatggatacaatgtacagtattggggtggtggttacattgaaagcccagactttatcactatgcaaaaactcacataacaaaaatgcaggtgtaccccctatatctatttttaaaagtgaatagtctcctttaacatatttttgctttacacaatctacttactaaactacacatttctgttcctctcagtgtatttctactgtgtcatatttctcatctaagcacaatagtacaactgcttcctacaaaccatatatgtacattgcttattagcaagttgaagtgagtttctttccagattctaggattttagaaacaaaaagctagtgtccttagaggggtgggaaggaattcatacacagtgatgtgtttatgagattcttatgtgtttatgaatataaaacagtaagaaagttttcagtaagtcccagaaatcaacctataattagttatgacacatataggaggggctggatacatctttaaaaactcagtaagcaagtatttaatgacgttggcttaagcctataaaactttccaaagcattgctcatctaacaagatcagtgccacagaatgagttagattttattgggtgagctaacagtttcccgtgaaatgagaacttaaggactgtgcttattaagtcaaactattcatataataaagtaatttaggtaattgccattgttactctgaactgagatttgtgagattctctctactactaccattttcgttgctcagcaaatgacctcatatacttttgtagcaacaaagttgagagttaattttctttatttctcactactagttttttggcatccactcctgtacccttactccattcctgaatatcagcacatctctgactgctatgtatttcctattcacatttcatccttttagagatttttagattaaaatgtcgtcttggttgtattctttttttaacaatttaattcacaaattatatttccccaagtgtttaaaattgtttatatatccacatatatatatccacatatacatatacacatatatatatacatatatayatatatatatacatatataatttttaatattagaacatgccttcccctagtggaaaagcatgagtttctaaagcagcagagatacatggactgaacctagttcacatgttttctgttctatctttgctgctatggtttttgtcttaatggggcacttagtttacaggtcaccacatttcttataatttctaatatcctatcaccaggtactttacaccagactggactccagacatctgatttttgaaaaaactttactatagaggctaaagttgttaaccattaaatataacaaatctccaataacattccaatgtaaatttggctataatttaagttcttgatcccacatcccatttattagcactaaatatgtgtcactcattgccttacagattgaggatacaaaaaataaaagactaagaatactcctactctaaagatacccctacccaaaagagataaagaaaaaataaaaggtaaaagttattagttctttgggaaaaatagaactatttataaaatgtttgtcactagccaagcattcataacaagattggtagttatgaaatatctatgttggtacattaaaaaaaaaagatgaactcaaatcaattaccaagctgtataacttaaatg

SEQ ID NO: 669140 - DNA, 1931 bp, Homo sapiens
actacttaggcataaaaaatgaaatcatgtattttgcagcaacaggagctggagaccattatcttaagtgaaatcattcaggaacagaaagtcaaatactgcaagttctcatgttctcaattataagtgagagctaaataatatgtacacacggatatagggagtggaataatagacattgaagtctcagaaaagtgggagggtgagagagaggtaaagtataagaagttaactaatggatacaatgtacagtattggggtggtggttacattgaaagcccagactttatcactatgcaaaaactcacataacaaaaatgcaggtgtaccccctatatctatttttaaaagtgaatagtctcctttaacatatttttgctttacacaatctacttactaaactacacatttctgttcctctcagtgtatttctactgtgtcatatttctcatctaagcacaatagtacaactgcttcctacaaaccatatatgtacattgcttattagcaagttgaagtgagtttctttccagattctaggattttagaaacaaaaagctagtgtccttagaggggtgggaaggaattcatacacagtgatgtgtttatgagattcttatgtgtttatgaatataaaacagtaagaaagttttcagtaagtcccagaaatcaacctataattagttatgacacatataggaggggctggatacatctttaaaaactcagtaagcaagtatttaatgacgttggcttaagcctataaaactttccaaagcattgctcatctaacaagatcagtgccacagaatgagttagattttattgggtgagctaacagtttcccgtgaaatgagaacttaaggactgtgcttattaagtcaaactattcatataataaagtaatttaggtaattgccattgttactctgaactgagatttgtgagattctctctactactaccattttcgttgctcagcaaatgacctcatatacttttgtagcaacaaagttgagagttaattttctttatttctcactactagttttttggcatccactcctgtacccttactccattcctgaatatcagcacatctctgactgctatgtatttcctattcacatttcatccttttagagatttttagattaaaatgtcgtcttggttgtattctttttttaacaatttaattcacaaattatatttccccaagtgtttaaaattgtttatatatccacatatatatatccacatatacatatacacatatatatatacatatatacatatatatatacatatataatttttaatattagaacatgccttcccctagtggaaaagcatgagtttctaaagcagcagagatacatggactgaacctagttcacatgttttctgttctatctttgctgctatggtttttgtcttaatggggcacttagtttacaggtcaccacatttcttataatttctaatatcctatcaccaggtactttacaccagactggactccagacatctgatttttgaaaaaactttactatagaggcyaaagttgttaaccattaaatataacaaatctccaataacattccaatgtaaatttggctataatttaagttcttgatcccacatcccatttattagcactaaatatgtgtcactcattgccttacagattgaggatacaaaaaataaaagactaagaatactcctactctaaagatacccctacccaaaagagataaagaaaaaataaaaggtaaaagttattagttctttgggaaaaatagaactatttataaaatgtttgtcactagccaagcattcataacaagattggtagttatgaaatatctatgttggtacattaaaaaaaaaagatgaactcaaatcaattaccaagctgtataacttaaatg

SEQ ID NO: 669141 - DNA, 1519 bp, Homo sapiens
gacatctatgagtaaatcaaaggggcaataacgattcattaggggagaacttctcttgttaaggcaaaggtatatttctagattctgggtgtcacttcaatgttaaacaatattctctgcaccagactcacagctttccttagcttcttagtttcctagttgactcaggacataccagtgaggtaaggaacctacaagaaatatgacatttcactgcatgtacccaaataggtttcaatctgtgtgccttaaattgattagctggagatgaagcttcgccaggccagcccactgtctgctcttgcactttattttcaggaaggcagttagtgttcagtgcttttcctctgtcacartcaaactacagaataccatagattgggtgatgtaaacaacagaattttatatctcatggttctgaagtctggaagaccaagatcagggtgctagtataattgagttttggcaattgccctcattctggcttctcactgtatccttaggtagcagagacagagatcatctttctcatgtctcttcttataggtgcacaaatcccattcatgagggctccactctccaggcctaataacatcccagagtccccacctccaaataccatcatattagggggatttaggctttgacaaataaacatgtaaatgtggggagggcacacaagcatttggttctcagcagcatccaaaatcaaggtacggtaggtagatcatgctagtctttgccttaactgctagtgtatacaccactttgaaatatcaaaggtattcaaataaaatttaaaaatgcatgtattacaaatcaatagagttcatctttatatcttccttcacccattacaggttgcccaattagtatttgtcaaaaaatgatttaccaattgctaatttgtctattttaaaacctggaattctgatctaacatgcatgaataaagaaaaacactactgcaatagggaaaagtgatgctgagtaatttgacattgcaatgataatcatttctggatttcttataacgaaaggaagagctcctataagaaataaagatgtctagtgccacccaccatatgctaaaaaatgaaaacacaaaacacatgcatacacatacatgcaatgcactagagacatctactgatgagttcaacatattcctcatctcatgtccaattaaagttttggacattcccaggattcccaggagatactactctgataaagtataaaacaccatatgcctttagatggtttttttttttgtttgcttgttttaagccaatcctagtttttgtcagcttcttgagggtattaaacagaatgaatgttttttggctccaaattcatggagctaacacataccaccatttaacataacagcactcacatgaacaactctgaacaaacaattgttttagattaccaccaccagcctcatatttttgtcgttactttgcagtagtatgtcactatatcatttgaagactgttctgcctcaataggggtct

SEQ ID NO: 669142 - DNA, 1519 bp, Homo sapiens
gacatctatgagtaaatcaaaggggcaataacgattcattaggggagaacttctcttgttaaggcaaaggtatatttctagattctgggtgtcacttcaatgttaaacaatattctctgcaccagactcacagctttccttagcttcttagtttcctagttgactcaggacataccagtgaggtaaggaacctacaagaaatatgacatttcactgcatgtacccaaataggtttcaatctgtgtgccttaaattgattagctggagatgaagcttcgccaggccagcccactgtctgctcttgcactttattttcaggaaggcagttagtgttcagtgcttttcctctgtcacagtcaaactacagaataccatagattgggtgatgtaaacaacagaattttatatctcatggttctgaagtctggaagaccaagatcagggtgctagtataattgagttttggcaattgccctcattctggcttctcactgtatccttaggtagcagagacagagatcatctttctcatgtctcttcttatagrtgcacaaatcccattcatgagggctccactctccaggcctaataacatcccagagtccccacctccaaataccatcatattagggggatttaggctttgacaaataaacatgtaaatgtggggagggcacacaagcatttggttctcagcagcatccaaaatcaaggtacggtaggtagatcatgctagtctttgccttaactgctagtgtatacaccactttgaaatatcaaaggtattcaaataaaatttaaaaatgcatgtattacaaatcaatagagttcatctttatatcttccttcacccattacaggttgcccaattagtatttgtcaaaaaatgatttaccaattgctaatttgtctattttaaaacctggaattctgatctaacatgcatgaataaagaaaaacactactgcaatagggaaaagtgatgctgagtaatttgacattgcaatgataatcatttctggatttcttataacgaaaggaagagctcctataagaaataaagatgtctagtgccacccaccatatgctaaaaaatgaaaacacaaaacacatgcatacacatacatgcaatgcactagagacatctactgatgagttcaacatattcctcatctcatgtccaattaaagttttggacattcccaggattcccaggagatactactctgataaagtataaaacaccatatgcctttagatggtttttttttttgtttgcttgttttaagccaatcctagtttttgtcagcttcttgagggtattaaacagaatgaatgttttttggctccaaattcatggagctaacacataccaccatttaacataacagcactcacatgaacaactctgaacaaacaattgttttagattaccaccaccagcctcatatttttgtcgttactttgcagtagtatgtcactatatcatttgaagactgttctgcctcaataggggtct

SEQ ID NO: 669143 - DNA, 1712 bp, Homo sapiens
actcccagctagagaggtaggtctgggaggcgggattcaggagcaccaggaaacagaggctcttcctgctgcctcgaagctggaagagcatcagcctggggttgctgggggcaaccacacctcagcactacgtaaaggaagaagccaaccaaggggaaagcactacccagatgagcaggggctcaggactgcacaggacaccactgaagtgtctggatctagctggaacttaatccagtgctacccctagacgtttctgttacacaaaccagtaatatcccttttgtcttttaggccagtttgatttggatttctatcttgtgcaaccaaaacatatctaatatatccaatattaagaaaatctggctcaaacagattagttgtaataataatatggttttaaaagcagttcatcttgtaatgtcaggaaattctttaataaaaagatagcagaagacttatttcaagatttatatatactttgacacaaaagtgtgagatacattaatatatatgttagactcaaagcattaaaaattgatatgtggcacatttgaaggtatgtttgtttattgcagattttaaagtggtttatatgtatttaaacatgaaatttgaagaatatttttaaggatccctcagatgtcctttagatcttttgggtcctcaggatgtggttgaaaaactattgatagaacaaaacaggaagcagtctaaaagaatattctaggtctctaatacatgtcttttatcaccagaacaaaacatgacatacacagtgactcttggacacattatagggacctaattagcatcctcagatgagatccatcagattattcttttctcctggaaaaggatggaaagggaggggccgagagagagagaagctaacatcttctcctttcttcctcctccaacatcagagttctaaaaagtyttgaatatttttccaaaagataactggtgagaggtgttcagcaaaatcctaaaactccttgttgtatttaagttttatttttttataaatgggaaaactcattgacaagccattaatgcttatgatcatataagaattttccttcttgtgccaaatattatttcatggttccttaaaagtatgagtaaaacaaatataaaaactggcaatttatactgttgagtcagaccatgagttcataaaaagcaggaacaatgcttacttctttggatagtgtctaattcagttaagtaaaaatgggaacttcttttataaaaccacttacatacctatgatgatgaaaatgggagaagaggattccagtcttgttctggtgacctttggaaatctcatattcaaaggcttagaggtctaatccccagagacttttactattttctcaggataagattaattagaggaagctggggatgtttggtgggtccttcctgaactgtcagagactccaagatactagagatggaagggatcttaaatttccagtccagctgcctcctactacaagatctttgatctcttctctgcctggcagcttctttcatggctaaattgagttgaaaatctgttgtgaaggaatatgaacctgtctcgctagaacacaatgtttccatcatcagtgatagaaagcagagttcagtggatcatgaagcaagtccttgtagggtaactttggtggtcttgcatgcacacaaggagaagcaagatctgaaca

SEQ ID NO: 669144 - DNA, 629 bp, Homo sapiens
tggtggggcacatctgtaatcccagctacttgggtggctgacgcacaagaattgcttgaaccagggaggcggaggttgcagtgagctgagatcataccactgcactccggcctgggcgacagagtgagattgtgtctcaagaaaggaagggagggagggagggaggggagagagagaaagagagaaagagaagagaaagaaagaaagggaaaagaaagaaagaactgggggaggggttgaggtggggatggatgcctgtaaattaagagacatacaagacatataccaaagaataaactatagtgtctagggacacacactgggtgatgaaatgaaagggaagtccaacaaagttattcccacaaaagtcaagactgtggttacttttgattgatggctgtgatttgatggggcccatggtgggctttcggatagcttggaaagttctatttcttgacctggtggtggctaaaatggtgtgtgtcatataacaactcattgagccagacagcagttttgtaaggttttctatatctgtgttttattttactgtaagcaaataataaaaggagtgaaggttaaggggrcctcagatcccaactaacactgaatactaacactaaagccca

SEQ ID NO: 669145 - DNA, 634 bp, Homo sapiens
ttttgagaggccattagtcaggaatgaaaaatcagttttggtttatgtgtcactattgattgactggaattagattcttggaattccatgttgagaaatgactctgaggacatatcctccatcagtgggaaaaagcatggtgattgattagtgatgtctgctgtgaacacagtaaagaggtatggtggaattcccagagtgctagatggggtgccagagtgccagagtgctgcgcactgggaatatagcagtgaacaagacagagtcagttgatgaactcataaatcttacagagtcagaatgattactagggtcatttcttgctttgttatcctaaaatttagtcgttcttgttctgcccaccaatcactattaatggattattgtaaaatatcagcaatgtccattaggaccactcagtccagttctctagcagaaaaacccataagtcttctgtgcagacacctttcrtgtctatgtagacaaaaggtgtctacatagtaagacttgtctttcagtcattgtaattttttctcttaaagagcaaactggccaagaaaaacttcaccttgcacatttctccatagttatagacagtggtaatcttggccagggtcaactcttgtttacagag

SEQ ID NO: 669146 - DNA, 1144 bp, Homo sapiens
ttagtgccatttgaatgtgaaatcccaaatatacccttgactagtaataaagataggggctctgggaggaatggctcagaactatttccagaagtaaatatgaacttcagagtttctgacagacacctgatagaatgatttcctaagctcggtaaggcatcataggcttatagtgagtaaaacctgatgattaagaaagaaaataagctcttaatcagacagatttgggttcaaattctgactctgccccctgactgctatgtaactatgcatagatcatacaacctcttgaagcctcaggtttctcatctgtaatatagggaatttaatattcctaccccattagatgttgcaatgattaaattcaataaagcatttgatgcgtagcactcaacaattatttgtagttatcattagtataattaattagaaagtcttcagaccgtaattatttgcttaatcccctttatcaacctgcatgaatttttcatcatatgtacttaccaaatatctaygcagaaagcttttttccataccaagtactattctgttttcatgcattttttaaaaattacttttctcaatgaaaatatgcattactctgtaaaggcttggattaaagtaaggatttaaaaagtgattccgtagcaaaccaaaaagtaaaaaaagaaaaaaaaaattcacatttggtttcataaataccttactttcctacttactgaagtggctgataactctggctcttaattgctgtccaatggagattaagccttgccatgtgatggtaggacggcaacacacagcatggctaattggatttttaatcttcactagtcttcagcaatgaaaacacactatgtttgtttgttggctgaaatgttaaactgccgaccaattaaatgccaaagggagcaactggttacctggatatttacaatgattcatacttcattttcatgagacatttaaaattatttcccatctaaaatataaaaattgaagctacagttgaattaaaatgagaaatgtaaatactcatcagccaaggaagattatttttaaagactaatttaaatgtaattgctcaaaaattaaaataaaatatacagaataatacaatctaaaactaacataagttttaaag

SEQ ID NO: 669147 - DNA, 1663 bp, Homo sapiens
cctggaagccagagcaagccttctgtctcaaaaaataaattacaatctattataataaaaataacctggtcagaatggatgcatctctgaaaagaccagaatgtggcatagcccatgtgtatttggggttccaattatgaatttacttgtcaagactatttgttccaaaattttattttacataatcatcacattgtgcttgctaaaaatgcagattccagagcatctttagaaaatcattctgaatcaggagatctggaccagggcccaaggatcacagtacctgtggttggagtgggacagggtgggagggaaaagaataaaaggaaaaatattttgaaaacacctggcttattacaaccttgtgaaggaatgaaaacacaggccatagtgaaagtctcaatgatagtgtggcaactgtgtcaatggattgcctttaggcaggaaagattatgcagtgttattacaccaatgagatgtgttaactaatctgcagggcctggtggcttttgcttttaagtcacacatgacaaagattaatgttgactttgtttcccttgtctagacttagtcctcgccagatataaatatcaactgtggcctttcatgctgccaccttcttaattaagctctaaaacaatagaaactgttagtcttcaaacctataaatatactcatttttgttatttttacgaaagtaaccttcaggagcagggccatttcttccaaaagaatgcagggggaggggggatattggagttattttaaaaaaaaaaagagttaaggtggaaaattgtagagctattaagctgccctacaaatacagtgtatttatagcaagaaaatcactacttaaagatctggttttaaaaaactgtcctctcagatgaccaattaggtcataaagttggacggtcctggtcctgatttcattagcatgtagcacagagtgtctccttggggacttgtattttcttagtcatgcagcacttcacagctgggcagaaaatgctgccacattatttttgaatgcaagaaacttgtgattccagactctcccaggattttaactgtcttgcctgaacagattggcacaacaacagatggtccacgttggatcattgcaactaccttgaatattaaggatcaaactccttggaataacgagtgcattagcctttgtagatgagtgtttaatgtacatatacctaaagaaagactgaactctgtatcagagatataaggtgcttaggggaacacagtgcctggcacatagcagtgctcagtaaatgcctacgatataaggtgaactcatggggataatctgtacaactgttcttctagttcttggttgacagagatctattttcccaggaagtgggctctgagatggagattagcatgcaagacttctattaagaagagctgctgagatcaatacatgtggaagggaagggaaaraaggactgaacagagagagaggttgggctgggatgcagtttcaaaggctcctctgtcaacaccatggggagtgatgaagctgggctggctctccacaattatgcctagtggaggtgaggaaatggcttttgaactgctgctggcccagttgttgggtgtaggctggcccacaaggttgattctcagagaaggttgacagctg

SEQ ID NO: 669148 - DNA, 663 bp, Homo sapiens
acactggagctgactccctgggaagagaggtaaagagatatttgtaatttcttatttctcagactggaacagtttgatccaacaaaaatgcagccttgctgtcacctttcagtttagcctgaagttaagaggagtatgaatgctagggagggttaacgtgagaaatgcaaatggtagtagtagttccaacccacaggcgtatattgaaggacaatttcactgatgtataagcaagttccatatagtcctacagtgcttgctgtgaaggggtttttatatagactagtgatagctgtagacaagtatttggggtggaagccttctcaacttcactccaagtagcccttcctccttacagccagtttgaccatgttggcatgcagctctcccaatcaccaaggtgtggctctaatttataatgaatgacagaaaataataaactaggttctccttctagaaaaatattctaactctaaccttttcatatttttttgtttaaraggtaatttcagtaaatttggagaccagaggaagaagtgtccctgttctcagtacatttatatctagtcagagacagctgatagaccaaaagttcatgaatgaatgcaatattacatttgtgataagtgttatgaaaaagttctgctgccgttaggaacttag

SEQ ID NO: 669149 - DNA, 1476 bp, Homo sapiens
gtgtgttgggagatggagaagccagattattttgacaaacatgtaggtggcacataatgggtgccatgttctgtgctaggtattaggattaaacaacatttaagcagcatgccatattctttcatatatcaggacctacatgcgtattccatatcacctgcttccatttcaccccacaatctctccagtaatatcttccctgggattccaaactacattatacttttcttttatctgctgtcagagctgcctgattttctctattgtagtgctcaacataatttattttaagtaattatgtaatctctctttcctcttagactataagctccatgaggggagttctcatgctacctgactcacagctacatctctggtacctagtaacagcacacaatagaaactagcaataaacatttcttagattaagtaacattaaatgaatggatgaactttaaccttgacctcaaaggcttgcactaaaataagaaagacaaaggaaagaatatttaccattcaccgtgttaagtgtagttaggatgtgtcacagtacaatgctaaccctggtatcagtgaagatcccctgaaggagttgatggatacattttaaaggttgaagaattgaggcaacaaaggaacctcaagaggaaatggactgagcaaacacagaagtgtctacttgttatgcaaggagtcatctgtaagatcattggccataagagtgtagagttcatagcagagttcttctaatatatttgcttactgatactattgataaaggacatacagtgaggtcagaatgagatcctttattcttagcaaactcaagaagacccttactgcttacatttaatgttctctgtaaatgtattactatattaatataaatgtatactatattaataatcctttataaaggaggcaggggataaacaacagtcacttatgaatgcctttgtttttgccccctttttgggggaaatcaggcttttgactaagtgtgacataagcgtctccagaattcctcattatctgttgacagctggtctgcagccattaacagcaagcttgtagaataaccccaagtgatctgagtgctttggaaacatccagaaaaatgtgctaggcataaccatagttaataaaattgtgtttataaccatattgatatgacttgtcatttattacgtgccaggtactccttaacattttgcacacaaaaacttcaaaaacgactcaatgggaccaaagacttccaacaaccctaggagtgagtttggactcacttaactcagycaagccttcatatgagatggcaaccacagccaactgttaaactacaacctcatgagaggctttgagccagaagctctgagctaagccactcccagatttctgccccacaaacactatgagataataaatgatgtttcaaggtgcaaacaaatccctcagaacaataattcagtggggtag

SEQ ID NO: 669150 - DNA, 1518 bp, Homo sapiens
ttggccgctgccttgcattgtctgcaaagtggctcagaggatccgagacgcccagagggattcaggggccagaggccgagcgtccgtgagggctcggcacgtgccaggagccctccccttccccctagatgccccgccatggacacagccctgggactcaggcagtaggactccaaacaggttcttgcctcctcagtttccccatctgaaaaaatgagtggacccagccgagggatctctgatacaccttcccagttacattctttcactgaacatatatttattgggcaactataaggcagccaccatgataggagataggaatttagctataaacaagacagacaacccctcactccactcacttcactcccacctcccactcacctcagcccctcatacccccatggagctgaggcttctgcagaaggtaaggaataaaaaagatagccttggatagtgataattgctacagagaagataaaccagagcgctggaatcgagaatatatgagtagaaaaggaaggagtgacctttgagccaaggcctgaaggataaaatggaagacataatgaacaacacaggcaaaagccctgaggtgggagccagctcaggaagttcaaggaagagcaagaaggctcgaatggctggagtgtagtgagtgaactgggagctttctgatggctgtgcaggaattgggttgtcaagatccagagtggaagaaaaaggttcccaacttttctggatttattctaccgcttcatggagaatcaggatcaattgtttggatctgaggtgccgttgctgaggagactatttctaatcatttcctacattcagtgcttggctgttttattctcccccctccacccataggtctggctgtgtgttcatctttgagctctagacttgagaatatctgtgtcatcagcagcttggctagctctgtgctatctggactcaatgagtccatcctggaagatgagaactggttttgctctcctcttctgcaattcagagacatcttaaagttcaaagccgtaaggtcaattccccatgtgacctagtgggttttcatctcttccatggccaaagaattaagccatttctcttacccagccggcttgaatgttaagaggtggtggacagagcactggaggtgtggattcaaatatgggtacatggctaacctgctgggtgaccctagacaagtcactcatgggctctgagtctcagtttccttatcactacaagagggttagggagacaggctccatcgtcccctctggtggaggtaastcaacattctaagtgtggatctgggaaagaggatggaagccaaacccatcatcataaatggaaatcaagttctgatggttctgcaaggtcttctacaagtaaagctctcttgcctcatgtattcatcaaatactcactgacctcctctatgtctagcacattctaggtctggacatacagtgatgaatgagttccacatgattcttgctgaaagaagtg

SEQ ID NO: 669151 - DNA, 1301 bp, Homo sapiens
ttttwaaagttgttcttctaaacaatattcctaaaaattatacagctagcatcagatttcatcttcgccatgagcgagactcatattcatcttcatcttcatcgtcatcatcaggcaaaaacaaatctgaggtttctgtttcctgaagaaagagaggttaaaatctgcttagtggcacaagaatggtaagtaaaatactttttaggccaaaggacaaacaggctagtatacaaagcccaggctagatttcataagggatgcatgcaagagtatctttcagggcaaaaaaaaaaaaaagcccaaaatatttttgtaaatgaatatgaattcttctcccctgctaattttgctacttttaataggagatttctactctaatatcatcaggaaaataatgtggacatttagtacagaaaatttaaaaaagactatgagatacatttctgataaattaaaattaattttattctataaaaaattaggaaaataaatgaccaaacacctaaatctttgtttttatatccatccaattgtttgtgagaggtgaatatactagcttccccatgacactgatattccaaatcttatataaaaatctaaaatcttagacaaagtagatgtatctgcaaacactacccaaataccatgacttctgtttttcttttaatctagggaacatttctgcttttgctgtgtaaaattacctatatagtgagaagacacttgatcaaactataaatgctagctaggtatcttttaaaaccaagattgtcatataaatcaggaaaacctcgcaatatagcctaagtgttcactaaataaactaatgataaacaacaggagtaaaaaagcaaaataaattctcatatattttaagaagctgattattcagtacttttattatttaggtctttagttttccaattctctcctctatgttcaacttctgcacactctgattttaaccaattgtacacagaaggaaaataagaaactcaaatctattactatggaacttgaataaacaaaaagtgaaaccaaccaattaaagtttaattcatttatgtaatctctgactttattcatcagaataaaaatttctagagctcaaataaatccaatataaatgtaaacaaaaaagaacagtctttcctatatcagaagaaaataacccctaacacagcttcttatatctctagacctgttttaattctctaataaacatctaaacgggtcttaatttgcatgcatgaaagaaaaacccagcattttttaatttatactatttaatatcataaaaa

SEQ ID NO: 669152 - DNA, 655 bp, Homo sapiens
agtgccagtgtggtatcagtggatgtggtaaaaagtggtcagacaatggatatattgtgaagctagaaccacaagctctatttaccgtcctttgaactcaggaatattgctatgacccctcgtatgcaaaacatacatacttgagttctttgcctattactggagacaagtttgcaccaaaacatccacttcctgatttgtgaactataagtatttgccagtgggttgggcagggttaggaataagtttaaacaaggttaaccaactggtactccactaagactacaagaatcccttcagagctagaaacaaacacgaaggttaaaaaatatcatcataatgatgctgtgattaaaataatactatatccttagaaagctcaaaaaagtttttaataaatacgtcttaaaaatgtaacatccattcatttattcattgaataattttttgttagatttctrctatgttctggacattcgtactaggtcctcagaagacaaagatgaaaaaggatttagtatttatcgttaatgaaattacagtcttgggcctctagttcacatagtaactgaatttcggcccacagtttggggaggacactatagctaccctttgctacttactctagtaactttcatttgtctgcttgaggtca

SEQ ID NO: 669153 - DNA, 582 bp, Homo sapiens
tataattgaattattattgactatagtcaccgttgtrctatcacatactaggtcttaatcattctattttgttttgttttttttttttttttttggtacccattaaccatccccatctccccccaaccctcacttttattttctatgaataataggggcagtcaccccagatttgtttccctgtgccattttggaaatacatttgattatttaaacattttgttgtttatttatatatttagggtgggaactccttcactaagagtgccattgtaacagtcaaacacctcgtggtctctctgctgactcaggggataatatttttccttcttcaaagtagccctgggaaaacctgttaaatatccaagtataaggctacttacaggcattggaatggtccatactctctgtgagaaaagaatctcatagagtgaaggagagactggttttcttttttctttttgagagagtgctttaaagtgttcttaaatattatagcaaaattgtcccaaggaacaaagaatgtatcactcattctgtcttgtcttccttttttttctcccttctttggcttctgtgtcc

SEQ ID NO: 669154 - DNA, 582 bp, Homo sapiens
tataattgaattattattgactatagtcaccgttgtactatcacatactaggtcttaatcattctattttgttttgttttktttttttttttttggtacccattaaccatccccatctccccccaaccctcacttttattttctatgaataataggggcagtcaccccagatttgtttccctgtgccattttggaaatacatttgattatttaaacattttgttgtttatttatatatttagggtgggaactccttcactaagagtgccattgtaacagtcaaacacctcgtggtctctctgctgactcaggggataatatttttccttcttcaaagtagccctgggaaaacctgttaaatatccaagtataaggctacttacaggcattggaatggtccatactctctgtgagaaaagaatctcatagagtgaaggagagactggttttcttttttctttttgagagagtgctttaaagtgttcttaaatattatagcaaaattgtcccaaggaacaaagaatgtatcactcattctgtcttgtcttccttttttttctcccttctttggcttctgtgtcc

SEQ ID NO: 669155 - DNA, 582 bp, Homo sapiens
tataattgaattattattgactatagtcaccgttgtactatcacatactaggtcttaatcattctattttgttttgttttttttttttttttytggtacccattaaccatccccatctccccccaaccctcacttttattttctatgaataataggggcagtcaccccagatttgtttccctgtgccattttggaaatacatttgattatttaaacattttgttgtttatttatatatttagggtgggaactccttcactaagagtgccattgtaacagtcaaacacctcgtggtctctctgctgactcaggggataatatttttccttcttcaaagtagccctgggaaaacctgttaaatatccaagtataaggctacttacaggcattggaatggtccatactctctgtgagaaaagaatctcatagagtgaaggagagactggttttcttttttctttttgagagagtgctttaaagtgttcttaaatattatagcaaaattgtcccaaggaacaaagaatgtatcactcattctgtcttgtcttccttttttttctcccttctttggcttctgtgtcc

SEQ ID NO: 669156 - DNA, 665 bp, Homo sapiens
aaattagagaaaagtagagactggccttagtgtcacagtgacacataggcctcagggcaccaaaagactcaatgggtcaaagatttgtggactgttggtttgttttaatatttatttatttatttatttatttatgacagagtctcgctttgtcgcccaggctggagtgcagtggctctgagtcagctcactgcaatctccgccccccaggttcaagcaattctcccacctcagcctccctagtagccgggattacaggcgcctgccaccacgcctcgctaatttttgtatttttagtagagatggggtttcaccatgttggccaggctggtcttaaactcctgacctcaggtgatctgcccacctcagcctcccacagtgctgggattacaggcatgagccaccgtgcccagccctctttattctcatctgaaacaatactgagcaactttctaatgtgagtcacacttcttctgactcttccactacagtgggatcccccaaatctaggaccccctaagctggtrttgctggacagtgatctggctttttaaggtaggaaccctggtctcttgatgacagccaatcacaactttcttgctccatttgagatgctgaagggactctctggttattataaaactcattaaattgcaagcaaataa

SEQ ID NO: 669157 - DNA, 3439 bp, Homo sapiens
tcattatgctttataggtgcaccatcttctttcttttcaactttctgctatcaaagtttcctcctccccagccctagcctgtgtcttgatcttctttcttcttctttttactccacttctaccgttgtgaagacagtaacttttcagagttgggaagaaagacaggcctgacaggaccctatttaaggggcagacaggacagctggggacaattatacatttcagggccattataaccacaccccaattgtctccctaatgatgccaatgtctgtctccactccagcccttccattatctgcccctattgaaccttaagccttgctgtagtcagatctgtgatgacctgtgtaggctcaatgtatattgagcaccttcagtgttctaagccatgagacktagttcgatatgtgaatggggatctgctttttaataagatgggcatacccaggctgctgctggattgagatggcatgtatgacagttctttgataacagcttagataattacaaggcaatggtgataacaattagaattcttccatgccactaatcctggaaaaaatttgtcacttgaccaaaactacagccttgcttataacttgctttcaacttccttacactcttaagatgaccttttatttcatcttctccaggtaaagaaactccttccaaggatccaactgtatcgagtgagtgtatagcctcatctgaatacaaggaaaaatgttttctgccacagaacattaatccaggtatccaaatgccaaagacaagccctattcttccatgttgagtattgcgataacctctttatctttcccatctaaagagcccctccctctttccctcttgatgaaaagattttgactatgctatttgcttgctcacaaatcttctgttgcactccactgcctacaaaattaattttaactttctcaagctgtcactcaaagctcttcacaatctggcacttattaggagctccatacttatttgctttgttgaagaaagtatatcataaattagatttgaaggtgttgagagatggggtaattaaaaatatttatattcaacatggtacctcaaagagttgttcatacgttgttgctgctcagaaaatctttgatgaataaatacatgggctgcacgtgatggctctcacctgtaatcccagcactttgggaagctgagatgggaggatcacttgagcccaggagttggggcccagcctgggcaacagagtgagacctgatccctaaacaaaaaatcaaaaaattagtcagacacagtggcatatgcttgcagtcccagctacttgagaggttgagatgggaggactgcctgagcctgggacgtcgaggctgcagtaagctgtaattgcaccattgcactccagcctgggtaacagagtgagaccctgcctcaaaataaataaataaatgaatacatgaatggttgaatgaatatgtggaggtcacttttacatactatatgatacccaacatagtactttatatgtagtaggttctgcgtaaatatttgttaaataagtgaataactaaatgaatatgtgaagtgagattggcttgagcagaagggcatctgtacgaatctttcagaagcagaaaaagttttgaaattaatgtgaaacaaatcttattcttaatacacatctctcacaaaatcctttttaaaagacatcgatgaagcccgcaaagagaaaattgttatcagaggaaaggtgcacctgggcagaactctgtaacagaaactctgaggacaaacctgtagaagacttgatttctgttgtacggtagatgggaccattttagagggcaatttgtgtgccaaatgatcctcacatgtttttctcatttttgcttgcccatcgctaggtggaagcacccaaatctccatttagctgatgagaaacagaatgtcagcgagggaaacgacttcaccacgacacagttaacacgtgatgaggaagggccttgttcaaaactacaatgctccttcaccctccaaaaatatagctctccctgtaatacaaaatatagacttgtgaaaaagattataaatatttaaaggatctagactacgtaaatagatattgtatacatgtcataccaggttctttcttttcccaatttcagatgagatcgggcatgttcagggtggtatagccataagcccaatttcaaattctgtcaaacttcttggttgacaatgagaaaaactttgccctttgtttcttgatattgtgtcaatctgcttatctgtctgtcagcttggaccacccctgaaaaaacctgaattaccatctgttgtttcatgaatgcagtagagtcagcattttgccttatcaatgcatgaaggccagtgaacaaagggtatctgtaggtgaaactgaactgacctcgggctgaacttgtccatctttcagcattttccaccctgatgctgtttccaggaaggtcatggagtgagaaggggagatggctgtagctgccaacctctccttaatgagtacagttgcagacagaatcagtcagacatattatcacaattacagaactgactttgagaaggattaatctgtgacacaatacacttcatgaaaatgatattgagcttgacttcttccctgctctagtgatgcagagggtactgtaggatcccactgtgggcacaggggttctgctctaagtatcagttctcacggttgagatctcaagagcagtctgcttatttaagtccaggtcttttgagttccatatacatagattcatgtgcatggtaaggagattcacaccaaatgccctgtttgtcagtcagcaggggctacgaatgggggattttggatcagatgttggaaggatggatgagatgggtttggtagaaaggaatcatagaatcagttattgccaaggttaatagtcatgatcacctgagggcagccagccatgagcagtacttgctggtagtggggaggtgaggaggggaacagctaatgcttaatgtgtttactgaatctttgatacataccaggcactgagtaaaaagttttatatccacgatgttatttaggaagcttttttttttttccttgagacagggtcttgctccgttgcccaggctggagtgcagtggtgtgatgttgactcactgtgacctcagcctcctgtgctcaagccatcctcctatctcagcctctgagtaactgggctacaggcatgcaccaccatgcccaggccaccatgtctggctaatttttttttcttttttgtcagaagacagggttttggcatgttgcccaggctggtcttgaactcctgagcttaagtgctcctcctcccttgacctcccaaaccgctaggattacaggcatgagccactgcgcccagtctagtaaacatcttaaaacccctgtggg

SEQ ID NO: 669158 - DNA, 666 bp, Homo sapiens
tttgtttttctgttgactttattatagcatctttgaccacatcatttttaatttttataaccaaatttgtctatttttctttgcagctcttaagttcattttatgcatagaaaggccttctccactcccaagtcattaaaacacatttcctgtattttttctattatgtatatatatatttgcaattaaatatctaatctataaatttttttctatctgtttaaggtacataaacaatttaattttttccatatgaagactatactatttattgagtgakctacctctttaccaccaatgtgcaatgcaatctttattatattctaggcagaatagatgtataatatacgtgtgtttcagcgtgtggtagggtgtatctctatttttcctgtttaaaacttttttccccctattctcatgcaaggacatttccaggtaaatgtggtttcaatttgtcaactctctgttgaatcagtcagtcattccccacagagtgagtaagccagttaagcaggacactggatgaggaaaaattatctttcaatctggctttgttcgttagctttaagttgcacagcttaaaaagattcataatcttacctgtctgacctgcttcacagagtcattgtgagattcgagagcgcaaattgatctgcgtatttaaag

SEQ ID NO: 669159 - DNA, 641 bp, Homo sapiens
tcctcaagtgaaatcttatatagaaccctgtatataaaaagacgaaagtgatagttttgttaccatagagtttacagttcaaatccatgtttagtattatcatgttaatctctgtatatgtatgtttgtgtattaataaatcacatgtataaatatatatgtgtggatatatatccagagggagagagagagactaaacccatgagagtggtcacctctaggaayagtcaagaagaataggactgggaattaggttttaggagtacttacttttatcgaaaaaaacatactaaaggaaaggcaagtcccccatcccccaatctccaacatacacacacacagactggatataattccacaaaatcttaacatttattcatttgagtggttgtaatatgggtatcttttatacttctcttaatttctgtaatctctgtgtgtttgtgtgtgtgtgtgtgtgtgtgtgtgtaataagtgaatctgtaacaatgttgagtctattttcagtaaaacaaagagaggatacagatgacacctgtaattccaatcactttctcaagattccgtttatatactttgtgtttttgtgcaattttgagaggcacgtcccttgccttagatataaaaaaaggggatttgca

SEQ ID NO: 669160 - DNA, 1097 bp, Homo sapiens
tttcctctatacttctaccaactcttcccctatcagattatcttgaagcaaaaatcccagatayatgattgcacctgaaaatatttccatatatctctttaaaacagaaagaattcagaaagtatttttaggagcatggcttttattttataaacattggaggactgttaaaggagtttaagttagagtgctttggctaggtagacctacctgcccgtgaggtagaacaccaatttaaggaaaggagtcagattagaaggctaagatatcctgttttctcccccttggccgaccacagtgcctgatattccaccactacccattgattaacaaattatcttctgaaatccatctcttcctgaaaggggcgatgtcataagcattttccagtgtaggtctgcaaaagacagaaatcttcccttgcccctttttctgttcctgggcggcccctgcaagaccacctgaggcaacaggaaaatgccatctatccttccgctggctgggggcagggagctcacagaggagaattctctggttcccatttggctccagtgcccgcagcagttggcctgggcacaagccaagcaggatgaaacacgccagtggtacagtaacgtcagcatgtgtgcacgtgttggcctgcatgtgctcacgtgtccagtgtcagagctgctgcctgtccctgcagcatcctctcccctcagggtcttcccatcaaatgcaaggctcaatggtgccaaacgtatcattttggacccttggaagcttagcctgaggaagcggtagagatggctatcagtatggcacgtgagctctggagtcggggtgcttgagttccagtcctggccttaacactttccatctctgttaccttaacacatgattccacctttctgagagttgtataatgctacctatcacacagagctgctgagagttgatgtgtgtagagtgtttagcatagtcggcacaagctaagagctctctaaatgttagttactattatagatttgggggctcctgaagtcttgggaattgactcagagaattatagcatcttgaaaaattcctagaagctcaaactcttggaagcatat

SEQ ID NO: 669161 - DNA, 1097 bp, Homo sapiens
tttcctctatacttctaccaactcttcccctatcagattatcttgaagcaaaaatcccagatatatgattgcacctgaaaatatttccatatatctctttaaaacagaaagaattcagaaagtatttttaggagcatggcttttattttataaacattggaggactgttaaaggagtttaagttagagtgctttggctaggtagacctacctgcccgtgaggtagaacaccaatttaaggaaaggagtcagattagaaggctaagatatcctgttttctcccccttggccgaccacagtgcctgatattccaccactacccattgattaacaaattatcttctgaaatccatctcttcctgaaaggggcgatgtcataagcattttccagtgtaggtctgcaaaagacagaaatcytcccttgcccctttttctgttcctgggcggcccctgcaagaccacctgaggcaacaggaaaatgccatctatccttccgctggctgggggcagggagctcacagaggagaattctctggttcccatttggctccagtgcccgcagcagttggcctgggcacaagccaagcaggatgaaacacgccagtggtacagtaacgtcagcatgtgtgcacgtgttggcctgcatgtgctcacgtgtccagtgtcagagctgctgcctgtccctgcagcatcctctcccctcagggtcttcccatcaaatgcaaggctcaatggtgccaaacgtatcattttggacccttggaagcttagcctgaggaagcggtagagatggctatcagtatggcacgtgagctctggagtcggggtgcttgagttccagtcctggccttaacactttccatctctgttaccttaacacatgattccacctttctgagagttgtataatgctacctatcacacagagctgctgagagttgatgtgtgtagagtgtttagcatagtcggcacaagctaagagctctctaaatgttagttactattatagatttgggggctcctgaagtcttgggaattgactcagagaattatagcatcttgaaaaattcctagaagctcaaactcttggaagcatat

SEQ ID NO: 669162 - DNA, 811 bp, Homo sapiens
tggtgcgatcatggctcactgcagccttgacttctcaggctcaagtgatcctccttcctcagcctccagagtagctgggactacagatgcacaccactaggcccagctatttttttactattatagagatgcgggggagggggtctcactatgttgcgtaggctgctcttgaactcctgggctcaagcaatcctcctatctccgtcccccaaagtgctgggattacaggtgtgagccaccatgcccagcccattttacatttttaaaatagtcatagagggaaaggcaaagagagactgtgaaagaagcaaaaccactagagagagaaaacatcaagaaagcaaggacaggtacactggctggcacctgtaatccaagcgctrtgggagtcagtaaaattcttgaaaattaactgtaacattatttcttaaactttctaatttttgtaactattaaggctgatttttaaaattatggtaaaacaaatataaaattcctatggtgagttattgataatggaaacatcatcactgtgaaacaaatgtaggtattgtgtgaggcacaagagctacagtggagacaaagacagacgaggtccctgctttcatggcacttacattctggggagaaggcaatagagaacaggcccataaataaacacacaagacaattttttttttctcagatggagtctcgctctgttgcccaggctggagtccagtggcatgatcttggctcactgcaacctccacctcccgggttcaagcgattctcctgcctcagcctcccgagtagccaggactacaggtga

SEQ ID NO: 669163 - DNA, 1510 bp, Homo sapiens
cttgagggagtatcttccgcgtctctgaacctctgaacctgtttccccatctgggaaatgagagggctggactagatggcctctgtgggtcatgacagcttagaggttaagatgcattgcgcaggtctaggagattttcttctcagccccagcagggggagccctaacccgcctcagccgcttcaccagctaatggctcagccaggaggcagccgggtcccgctggctctggggggccgtctggaaaccaggttgtaagacctgggagagtccaggtttgctcatccctaggacagcctattcagaaggagagaaagggagatcaaagtctctgaagataggaccatctcagccagcgccccatctgccaagatttagaagagaagactgaacccctagaggggtaggcacttttccaggttcacacatctgtcctgaaaattagattcctatcaccctgtccaggactcctttgcatctttagagtacctatgtttttctgtttccagctggaagtgtttaaccattgcagtcctgtagccaaaaccaatgcagaccccaaccagcccagtagagcctaacaggagtgagacagccccgcgtcccttcacagagggagtgtggtctggaagaaggaaacattatgactcatggataaagtacccgtctaggcagtgaggaaagagcagacccctcacatttaagttgggagtggtagttgatgatgatgatgataattattatggtgactataatgattatttattggctttctctatgctgggacacaacaacctatgagacaaggatcattatcgtcaggatttttactgatgaggaaacaagttcagagtgttgggtcattggactaatgagattccatccagttctgcagcaggagtgggagggagggctgcttccattctctggcccctttgacctgggtgcctccaatttcatcaagagcctggccaactcctcctcaatgaaaggtacagggggccaggattatctccaaaggacccacaccttcccatgaagagtcagtgcctaaaggaagggatgctcaccacttcagtttaggagatgattttaggagagttaygaatttggcattaagattgaattaattacagttcaattatcctttggtctttctatcaaggagaacatctctaagatttcttcttgaaacaagaaacagcattctttaagaagcatgaggcaaggccaggcagggtggctcatgcctgtaatcccagcactttgagaggccgaggcgggcagatcatgaggtcaagagatcgagaccatcctggccaacatggtgaaaccccgtctctactaaaaatacaaatcttagctgggcctggtggcacacacctgaggcaggagaatcgcttgaacccaggaggcggaggttgcagtgagccaagatcacgccactgcactccagcctggtgacagagtgagacaccgtctaaaaaaaaagaagcataaggcacattta

SEQ ID NO: 669164 - DNA, 1510 bp, Homo sapiens
cttgagggagtatcttccgcgtctctgaacctctgaacctgtttccccatctgggaaatgagagggctggactagatggcctctgtgggtcatgacagcttagaggttaagatgcattgcgcaggtctaggagattttcttctcagccccagcagggggagccctaacccgcctcagccgcttcaccagctaatggctcagccaggaggcagccgggtcccgctggctctggggggccgtctggaaaccaggttgtaagacctgggagagtccaggtttgctcatccctaggacagcctattcagaaggagagaaagggagatcaaagtctctgaagataggaccatctcagccagcgccccatctgccaagatttagaagagaagactgaacccctagaggggtaggcacttttccaggttcacacatctgtcctgaaaattagattcctatcaccctgtccaggactcctttgcatctttagagtacctatgtttttctgtttccagctggaagtgtttaaccattgcagtcctgtagccaaaaccaatgcagaccccaaccagcccagtagagcctaacaggagtgagacagccccgcgtcccttcacagagggagtgtggtctggaagaaggaaacattatgactcatggataaagtacccgtctaggcagtgaggaaagagcagacccctcacatttaagttgggagtggtagttgatgatgatgatgataattattatggtgactataatgattatttattggctttctctatgctgggacacaacaacctatgagacaaggatcattatcgtcaggatttttactgatgaggaaacaagttcagagtgttgggtcattggactaatgagattccatccagttctgcagcaggagtgggagggagggctgcttccattctctggcccctttgacctgggtgcctccaatttcatcaagagcctggccaactcctcctcaatgaaaggtacagggggccaggattatctccaaaggacccacaccttcccatgaagagtcagtgcctaaaggaagggatgctcaccacttcagtttaggagatgattttaggagagttacgaatttggcattaagattgaattaattacagttcaattatcctttggtctttctatcaaggagaacatctctaagwtttcttcttgaaacaagaaacagcattctttaagaagcatgaggcaaggccaggcagggtggctcatgcctgtaatcccagcactttgagaggccgaggcgggcagatcatgaggtcaagagatcgagaccatcctggccaacatggtgaaaccccgtctctactaaaaatacaaatcttagctgggcctggtggcacacacctgaggcaggagaatcgcttgaacccaggaggcggaggttgcagtgagccaagatcacgccactgcactccagcctggtgacagagtgagacaccgtctaaaaaaaaagaagcataaggcacattta

SEQ ID NO: 669165 - DNA, 615 bp, Homo sapiens
tggatttattagggaacattcttttgcattttagaaagtatctttctaaagctttaaaaaaatccaaatggctttattaatagtctagacactgttgcacaactgatttgaatagagctttaatttgcaaatgaatttgccctgttgcaaatattttataccgtarcctcttggattggaagttgcttgcagagcatactgtacagatctttattttagcatttctcatgaaattaggtgtgtatgtggcctctttgatggcagaagttggggcttaatttttgcattatatttgtaacctgaatgtacttcatggtgtgtctgtcataaccgcctggcaaatgagatgttctgtagttatgttgtaaataaatgaagataggagatttaaagatacttcacttattgggccgacatttattgtgtgctacatgacagttgctgacctaggtgctggtaatagtgccctgaaccagaccgaaaaaagaggtttgtcctgcaggagcttccagcttaagtaagagccatctaaattgtaaatgaaatcaaccacatcaaatgattaaatctgcctgtaagtgtgaagtgacttacacaaggtcactgggtagttgg

SEQ ID NO: 669166 - DNA, 1212 bp, Homo sapiens
tgggaatagggaaaggatcaggaaaaataattaatgggtactaggcttaatacctgggtgatgaaataatctgaacaacaaacccccatgacacaagtttacctatgtaacaaatctgcacatgtatcctggacttaaaatcgacgttaaaaaaaaagagttgttgtgaagattaaatgaatataagccyatttaaggtgtttagaacagggctcataagaagtacacaataaatattagctattaccattaccataaatataatttttactcttaaaatttgatttcctattgctatctttatctctgagtctttgtctctgttttgcctagctctctctgttgcctaatgttgttcaatgttctcatcccgttgaataagaaatgagtaaataaaccattaatctgctgttcaatttataagggatatttctggcaaaaataaccaacacaaattaaaactgaaaatggctatgactgattgtatgtggtaaaaatgtgatattgactaaaaatggagcaaatcttgaaatgcagatctgcaaaatttgacccaggaaaattggatctggtaaaaataagtcactgaagaaacctcacacaaataatacctaaaattggtacaatttgatgcagacagaactcttgatgattaaattttcactctaaaatttacataaagaactgccagacataactttagggcaagcacagtggttcatgcctgtaatcccagcactttgggaggccgaggtgggtgaatcacttgagcccaggagtttcagaccagccgggacaacatggtgaaaccccatcgctacaaaaaatacaaaaattagcctggcatgtggcacgcgcctggggtcccagctatttcttgggaggctgagttgggaggatcaattaagcctaggaggttgaggctgcagtgagtcgtgatcatgccactgtactccagcatgggcgacagagtgagaccctgtttcaaaaaaaaagaaaagaaaccactttaggaaaccaaaaagaattaatccccaaaattaaaacaacgttatgtaatataaaaattgattcaaaaatatattggtgtttattatttattaaggctaattattatgttgagtttattggaatttattggggttattggtgtttgttcctgaaattgctctctcaatgagcaggcaataattttgcataatttttattcaa

SEQ ID NO: 669167 - DNA, 564 bp, Homo sapiens
tgttttatttttgcatttaaataactaaatagcttttaagtgggctaatctttattttttttcttctaaaaccatgctaaatataggattgttaattataagagtaaattcttggccaggcgcagtggctcgcgcctgtaatcccagsactttgggaggccgaggcaggtggatcacgaggtcaggagtttgagaccagcctggccagtatggtgaaactccatctctactaaaaatacaaaaattagccaggtgtggtggtgggcgcctgtagtcccagctacttgggaggctgaggcagaagaattgcttgaacctggaggcggaggttgcagtgagccaagatcgcgccactggttaaagcttcaaatatttaaactatataccaaatatatgaaagctttataatgccttttatttatggagaaacttcttttttaaaacttaggctcattagccctcataagcctcatccttttatttaacctgtttggagtttgctgagctttttgaatttataaattgatgttttccatcaaatttgggaagtttttggctagtatt

SEQ ID NO: 669168 - DNA, 536 bp, Homo sapiens
tttgttttagtaggcagtttatttactggttgccaccttaattttaggcttgactttatgttttgttaatgtgaatctctgaaagtgtaatatgtttcttttagccttccagctctgttttccttgtggatcttttgtggactttgttggcctgatcctattctccctttaatactactgactctctgttatctcttctatgctcttaaccctgtagtagcttgatatatagagtgatctttccctgctgttacacaacttggccttagctgtggactcatgggtaatcgctaagtcagatttttcttgggtaccctctctttgtagattcctcttcacccaagctctaatctttgcttcstccagttcattaagactatggtactctagttggacttgagctctctctgcacctcataaatttcccttctttcaggcatttcagtcttactctttctgttgtctactccttgaaatcggttgcctcatatacttttgtccagttttatagttgtgtatggagagctaatccaata

SEQ ID NO: 669169 - DNA, 606 bp, Homo sapiens
aaagaaatagaagacatagtccgtgacctgcaggaacttagcgagatagtctgtgacctaagatatgcacaaaacaaacaggtaaaagcaatttgccaaacaatataccctcttataataataattttaaaactatttaaatagttagagttaaaagacatccaagaagtaactaataaaaacaaataacctttatagaactatactaaatgaaaatgtcacaatacaaactatcactatctatctcaataaaggaaataaaagaaaaactaagccaggaaaaacaggcttttagctttgtacctaaatagagaagctcgggcaatccacataaaggacttctttgacattctcctgataaaagcagttaaaaaccttacagagttgtctataagaacaaacaattaaaaacaacctaaaagtttaacatcgtaggaacatccaaaattatggtacataaacagaatgaatacagtcatttataataattaacaaaacaaatgtcttattctaggttttttttttttwaaaaaaaagcacaaaatcagttaatcacaactaataaaaattacatttggtcaagaactaaaaagtcaattgcaaaaa

SEQ ID NO: 669170 - DNA, 606 bp, Homo sapiens
aaagaaatagaagacatagtccgtgacctgcaggaacttagcgagatagtctgtgacctaagatatgcacaaaacaaacaggtaaaagcaatttgccaaacaatataccctcttataataataattttaaaactatttaaatagttagagttaaaagacatccaagaagtaactaataaaaacaaataacctttatagaactatactaaatgaaaatgtcacaatacaaactatcactatctatctcaataaaggaaataaaagaaaaactaagccaggaaaaacaggcttttagctttgtacctaaatagagaagctcgggcaatccacataaaggacttctttgacattctcctgataaaagcagttaaaaaccttacagagttgtctataagaacaaacaattaaaaacaacctaaaagtttaacatcgtaggaacatccaaaattatggtacataaacagaatgaatacagtcatttataataattaacaaaacaaatgtcttattctaggttttttttttttawaaaaaaagcacaaaatcagttaatcacaactaataaaaattacatttggtcaagaactaaaaagtcaattgcaaaaa

SEQ ID NO: 669171 - DNA, 624 bp, Homo sapiens
ccaccacgccgggctatttgtttttagtagagacagggtttcaccgtgtgagccaggatggtcttgatctcctgacctcgtgatccgcccgtctaggcctcccaaagtgctgggattacaggtttgggccacckcgcccggcctataccatgcttcttaaccatgcatcagctgatggtcattgggttgttacaatactttttggctattatgaatattgctgctgtgaacatttgtgcacatgtttttatgtggatccaattatttaggcttacagtatttaagagtgctgctttgctactacgctgactggggttaagaccaggctctgctatttagtagatgtgtgaccttgggcaagttacttaacttctctgtgcctcaagctcatctacaaacagtgactatgttacccacctcctagcaatttttgaatcttaaaagagttaacgtacctgacatacttagatccgggtttgctacatggttaggtccaagtaaaatttatctattagtattattttaatatttttacgactttaataaaagggctcatcttcattgtgcctttgaaaccccaaatccaaaacttttttttttgttaattagaaaaactaaataaat

SEQ ID NO: 669172 - DNA, 1685 bp, Homo sapiens
aatgtctttcgagtagaggaaatggagaggggtatagaaatactacacccttaatagctcagctaggctcccaatgatgaaaatgaaaagaatgaaaaggggttcctcacccaaaaaattcagctgagctatgtgagttactgtgggaaatcttatctgcagtctcatcttgaaagtgaaggtcccacaacctcctacagaggccccactggtgggggagcagcatgagtggtctctcattctgagcatggtttccagtgtggcatcgcccttatctttctgtttgctggttattagccttttaccccrggttcagatagttaagcttatcatagtcttcaatacatggacgtactcatcgtcagtcccttgaggtcctttgcttgtttttgtttttgtttttttttttcactttactatttcccccgcattgtctctgacccacattctcatttttctcttctcaaaggcatccaccttacaggggaatgttgagcagctttcaaaagctcacattctcaccgacagtgagaactcttttgatgttctatgctgctgccaatatcagtaccatcaggctatttcattttttccaaaacaatggatatgtaatgatgtcacaatatggctttaaggtcaaactactgtttaatggaaatataacagaatataggacgttatataaacataaatttatagtttataaatactttgaagcaaaaactcaagtaactaggactccaaaaaaaaaaaaaaaaacactgctagtctccataagtctcttctattccccatgccaagaccatgtacttcttcctgatcacaaaatcttcccagcttggcacagtggctcatgcctgggaggctgaggtaggaggattgcttgaagccaggagttcaaggccagcctaggcaacagggcaagactgtctctccaaaacaaagtagctgggtgcaatggctcacacctgtaatctcagcactttgggaagccaagtgggaggactgcttgaggccaggagttcaagacctggacaacagagtgagatctcatctctacaaaaaaaaaaaaattatttataaaaatcttccctctctcctacaggaaatcaccctgaattttgcaattatagtcttttttatagctttaccagctatgtgtgtatcccaaaattatatgtatagttttccttgggtttgaacattatgtgaataaaatcatatagtctgtagtcttttgtgttttatttaagtcaatagcatatttgtgaaatccattcatgctgtttgtatccctgtaggttgtttatgtatttttactaaacagtttttctgggaatgaatatacctcatattctttgttcattctaatttatttatttatttatttagagacagaatcttgcgctctgtctcccaggctgcagtgcagtggctaagtctcacctcagtactacctctacctcccaggttcaagcgattctcctgccttagcctcccgagtagctgggattacaggtgtgtgctaccacgacaagctaatttttgtatttttggtagagatagggtttcaccatgttggccagttggtatcaaactcttgacctcaggtgatctgcccacctcggccttccaaagtgctgggattacaggcatgagccaccacacccggccacgttcattct

SEQ ID NO: 669173 - DNA, 1685 bp, Homo sapiens
aatgtctttcgagtagaggaaatggagaggggtatagaaatactacacccttaatagctcagctaggctcccaatgatgaaaatgaaaagaatgaaaaggggttcctcacccaaaaaattcagctgagctatgtgagttactgtgggaaatcttatctgcagtctcatcttgaaagtgaaggtcccacaacctcctacagaggccccactggtgggggagcagcatgagtggtctctcattctgagcatggtttccagtgtggcatcgcccttatctttctgtttgctggttattagccttttaccccgggttcagatagttaagcttatcatagtcttcaatacatggacgtactcatcgtcagtcccttgaggtcctttgcttgtttttgtttttgtttttktttttcactttactatttcccccgcattgtctctgacccacattctcatttttctcttctcaaaggcatccaccttacaggggaatgttgagcagctttcaaaagctcacattctcaccgacagtgagaactcttttgatgttctatgctgctgccaatatcagtaccatcaggctatttcattttttccaaaacaatggatatgtaatgatgtcacaatatggctttaaggtcaaactactgtttaatggaaatataacagaatataggacgttatataaacataaatttatagtttataaatactttgaagcaaaaactcaagtaactaggactccaaaaaaaaaaaaaaaaacactgctagtctccataagtctcttctattccccatgccaagaccatgtacttcttcctgatcacaaaatcttcccagcttggcacagtggctcatgcctgggaggctgaggtaggaggattgcttgaagccaggagttcaaggccagcctaggcaacagggcaagactgtctctccaaaacaaagtagctgggtgcaatggctcacacctgtaatctcagcactttgggaagccaagtgggaggactgcttgaggccaggagttcaagacctggacaacagagtgagatctcatctctacaaaaaaaaaaaaattatttataaaaatcttccctctctcctacaggaaatcaccctgaattttgcaattatagtcttttttatagctttaccagctatgtgtgtatcccaaaattatatgtatagttttccttgggtttgaacattatgtgaataaaatcatatagtctgtagtcttttgtgttttatttaagtcaatagcatatttgtgaaatccattcatgctgtttgtatccctgtaggttgtttatgtatttttactaaacagtttttctgggaatgaatatacctcatattctttgttcattctaatttatttatttatttatttagagacagaatcttgcgctctgtctcccaggctgcagtgcagtggctaagtctcacctcagtactacctctacctcccaggttcaagcgattctcctgccttagcctcccgagtagctgggattacaggtgtgtgctaccacgacaagctaatttttgtatttttggtagagatagggtttcaccatgttggccagttggtatcaaactcttgacctcaggtgatctgcccacctcggccttccaaagtgctgggattacaggcatgagccaccacacccggccacgttcattct

SEQ ID NO: 669174 - DNA, 1685 bp, Homo sapiens
aatgtctttcgagtagaggaaatggagaggggtatagaaatactacacccttaatagctcagctaggctcccaatgatgaaaatgaaaagaatgaaaaggggttcctcacccaaaaaattcagctgagctatgtgagttactgtgggaaatcttatctgcagtctcatcttgaaagtgaaggtcccacaacctcctacagaggccccactggtgggggagcagcatgagtggtctctcattctgagcatggtttccagtgtggcatcgcccttatctttctgtttgctggttattagccttttaccccgggttcagatagttaagcttatcatagtcttcaatacatggacgtactcatcgtcagtcccttgaggtcctttgcttgtttttgtttttgtttttttttttcactttactatttcccccgcattgtctctgacccacattctcatttttctcttctcaaaggcatccaccttacaggggaatgttgagcagctttcaaaagctcacattctcaccgacagtgagaactcttttgatgttctatgctgctgccaatatcagtaccatcaggctatttcattttttccaaaacaatggatatgtaatgatgtcacaatatggctttaaggtcaaactactgtttaatggaaatataacagaatataggacgttatataaacataaatttatagtttataaatactttgaagcaaaaactcaagtaactaggactccaaaaaaaaaaaaaaaaacactgctagtctccataagtctcttctattccccatgccaagaccatgtacttcttcctgatcacaaaatcttcccagcttggcacagtggctcatgcctgggaggctgaggtaggaggattgcttgaagccaggagttcaaggccagcctaggcaacagggcaagactgtctctccaaaacaaagtagctgggtgcaatggctcacacctgtaatctcagcactttgggaagccaagtgggaggactgcttgaggccaggagttcaagacctggacaacagagtgagatctcatctctacaaaaaaaaaaaaattatttataaaaatcttccctctctcctacaggaaatcaccctgaattttgcaattatagtcttttttatagctttaccagctatgtgtgtatcccaaaattatatgtatagttttccttgggtttgaacattatgtgaataaaatcatatagtctgtagtcttttgtgttttatttaagtcaatagcatatttgtgaaatccattcatgctgtttgtatccctgtaggttgtttatgtatttttactaaacagtttttctgggaatgaatatacctcatattctttgttcattctaatttatttatttatttatttagagacagaatcttgcgctctgtctcccaggctgcagtgcagtggctaagtctcacctcagtactacctctacctcccaggttcaagcgattctcctgccttagcctcccgagtagctgggattacaggtgygtgctaccacgacaagctaatttttgtatttttggtagagatagggtttcaccatgttggccagttggtatcaaactcttgacctcaggtgatctgcccacctcggccttccaaagtgctgggattacaggcatgagccaccacacccggccacgttcattct

SEQ ID NO: 669175 - DNA, 1162 bp, Homo sapiens
  misc_feature 308, 309, 310, 311, 312, 313, 314, 315, 316, 317, 318, 319,320, 321, 322, 323, 324, 325, 326, 327, 328, 329, 330, 331,332, 333, 334, 335, 336, 337, 338, 339, 340, 341, 342, 343,344, 345, 346, 347, 348, 349, 350, 351, 352, 353, 354: n = A,T,C or G
  misc_feature 355, 356, 357, 358, 359, 360, 361, 362, 363, 364, 365, 366,367, 368, 369, 370, 371, 372, 373, 374, 375, 376, 377, 378,379, 380, 381, 382, 383, 384, 385, 386, 387, 388, 389, 390,391, 392, 393, 394, 395, 396, 397, 398, 399, 400, 401: n = A,T,C or G
  misc_feature 402, 403, 404, 405, 406, 407: n = A,T,C or G
cccmaaacggggctactccccattcctgttgaaattttttcttaggaaaaaatatagctcttgtactgatcttttaaaaaattacttacatggcaagagatcagaggaaaggggggattgtagatctcagtggaccttcggggaagacagaaggggccacttgaagccaaggaatcacaatgcctggcttatcgggaggaccctcagtgttttagcaaggctggagcatcacttccatgaagagtgggagaaataactcaaaagtaatattaagaccttgatataaacatggcattgccaggcactannnnnnnnnnnnnnnnnnnnnnnnnnnnnnnnnnnnnnnnnnnnnnnnnnnnnnnnnnnnnnnnnnnnnnnnnnnnnnnnnnnnnnnnnnnnnnnnnnnnagcactaacattctatgattcaaagaattctgagagtttctctgttctttttggtaataaccaaaataagaagaaaaaaatttaagtctgatgcttctcactcaaaaatataattattttctatataaatcacaaatgatccctatgctatcagctaaattttacttccaccctatccttcttcaaaatccatgaattttttaaaaccacatgtcctacaagctaccttagcatgcaccaaatgatttttcaaaaagttttctcatctcctactcccttataccaacttcttggtataatgtcatttaaagggccaaatcagtgtacatccaatcttcataacaaaattttaaaatttaggagaacaactgacatcaaagcatgaggacagtgagtaaccgaagtggtttttgttgttttctaattttttgttttttagagacagggtctcactctgtcacccaggttagagtgcagtggtatgatcataactcactgcagcctccaactcctgggctcaagcaatctcctgcctcagcctcctgagagacggagactataggaatgcgccaccacatctggctcacttttcaattatctgtagagacagggtcttgctatgttgcccaagctggtctcaaattcctggcctcgagcaatcctctggcctcagcctcccacagcactgggattacaggcatgagccaccccaccccaccccaaagtgattttaacttcagcaatagttaaaactg

SEQ ID NO: 669176 - DNA, 1449 bp, Homo sapiens
tcgagtgtttacgtggtacctggcacatagtgagcattcaataaatgtcactgatgatggtaaagatgataatcatggtgataaccagtggatatcctgataaatgcctataatctccttaaatcatatatgtctttctaaggactcaccacaatatgaggaatttcaagttttgaacttgactctctcaaaggataatggtcaactcagttatctacatgacatggagaggagggtgatggaattgattatctaaggcaggatataattcaggaaaatatctaacttgactttgtaataaagattttttctttccctgattgttctgcgcacacatattattccatatcacagaggtatgctaattaccctaatttatttactttctccccattgatggactcttagtttgaatctaatttttactattaccagcaatgctgcagaggacatccttctagacatattcttatgctcttttgtgtttttgtaggaaaaagttgtacagccatttatagacagcttattacatatccgacattgtgttatgtgccaggtgaataagatatatatggttccttccctcatggagctcacagccattaaaattacatgtattaaaagaataattttgagtatggggtgtatattataggaggacataacatagtagggaggagggagaggtgaggtcacacccaagcacaggaagataagcaagattttgaggtcaaatgagaagagttaggccatctctagaaaagaagtgaaatcttaggatctggggaatcagaacttggacaacattggagccaagttcctgggatcttgaaattactcttaaaaaattcacatgtacaaatctcagactgttaattcagaaataagattgtatttttctattagaaaaattattttaagatcccttatttttctgagtagcagaaacttaaccttcgtcaatatgaggtttcctgtctttttcccagtgttgggtctaagcactggggtcttacatcatgccaagacattcggtatatggaattgagatgaagaggtatctggtctttagtagtcacctagtgtattagtctgttttcaagctgctggtaaagacatacccgagactgggcaatttacaaaagaaagaggtttatgagccaggtgcggtggctcacgcctgtaatcccagcactttgggaagctgaagcgggtggatcacctgaggtcgggagtttgagaccagcctgaycaacgtgaagaaaccccgtctctactaaaaatagaaaaaattagctgggcgtggtggtgcttgcctgtaatcccagctacttgggaggctgaggcaggagaattgcttgaacccgggaggtggaggttgcagtgagccaagatcgcgccatcgcactccagcctgggcaacaagagagaaactccatctcaaaaaaa

SEQ ID NO: 669177 - DNA, 1219 bp, Homo sapiens
tttgtatttttagtagagaaggggtttctccatgttgaccaggctggtctcgaactcctggyctcaagtgatccacccacctcagcctcccaaagtgttggaattaggcatgacccaccacacgcggcctaatccgaatgttcaaatagatcatagtttaaatctcctatcaaagagtcatccttgaaccatggacccctcaagcatttcccaacatgcccgcacatttcacaggaagtgcatagttgtagctgccactgagggaccctgcacaaagtgttccaaagttctgccctggcagtgctggacctggaccccctccagggttaacaccaccatctggatatttcaccggcagtgctgaagccagagggcatggaggacacagaccaccagagatagttagtggtttcctttgggaaagatcagggcttgagtcctgaggctggggaggggcagcctcagtctttgaggatttagtggggcccagcagggatttggcagacagggctggacagaagctgagtatgctttcttctgaggtcagccaaatcatcacactctcagggacaccttccccagccctttattacatattctgatggaactgtgaaccttttctgcatactaccattgtcactgtatggttgttaattgacatctgttctcttctcctagagcacaatccgcagattggctttgctctctgttgaatcccctgtttccagcaccctgctgggcacgcactagacactcaggaagtaactgtttcttgaaggattatcagagctaatgtttattgagaattttgtattctaccatttaatcctcaacaaccacttgtgaaataagtaatattaattaatcccattttacagatgagtaaacggagactcaaaggattaagtgacttgccaaatgctaatgagtggtggagtggggcttgaactctggtagtctgactgttgagtctgggagaggccatgtggcaggtctggtggcagaagaggaaccagagtggcccagaataaggaaggcagagaaagtggtggctctgggggcagggatgtggggagatcctttctcccatttaagcttacgggacccagatttctggcatcactgctagatcgcctctgcttcagctgttcagggagtattttagcgagtgaatgagtctggacatccttaacagatgctgcccgcccacgtggactgg

SEQ ID NO: 669178 - DNA, 1219 bp, Homo sapiens
tttgtatttttagtagagaaggggtttctccatgttgaccaggctggtctcgaactcctggtctcaagtgatccacccacctcagcctcccaaagtgttggaattaggcatgacccaccacacgcggcctaatccgaatgttcaaatagatcatagtttaaatctcctatcaaagagtcatccttgaaccatggacccctcaagcatttcccaacatgcccgcacatttcacaggaagtgcatagttgtrgctgccactgagggaccctgcacaaagtgttccaaagttctgccctggcagtgctggacctggaccccctccagggttaacaccaccatctggatatttcaccggcagtgctgaagccagagggcatggaggacacagaccaccagagatagttagtggtttcctttgggaaagatcagggcttgagtcctgaggctggggaggggcagcctcagtctttgaggatttagtggggcccagcagggatttggcagacagggctggacagaagctgagtatgctttcttctgaggtcagccaaatcatcacactctcagggacaccttccccagccctttattacatattctgatggaactgtgaaccttttctgcatactaccattgtcactgtatggttgttaattgacatctgttctcttctcctagagcacaatccgcagattggctttgctctctgttgaatcccctgtttccagcaccctgctgggcacgcactagacactcaggaagtaactgtttcttgaaggattatcagagctaatgtttattgagaattttgtattctaccatttaatcctcaacaaccacttgtgaaataagtaatattaattaatcccattttacagatgagtaaacggagactcaaaggattaagtgacttgccaaatgctaatgagtggtggagtggggcttgaactctggtagtctgactgttgagtctgggagaggccatgtggcaggtctggtggcagaagaggaaccagagtggcccagaataaggaaggcagagaaagtggtggctctgggggcagggatgtggggagatcctttctcccatttaagcttacgggacccagatttctggcatcactgctagatcgcctctgcttcagctgttcagggagtattttagcgagtgaatgagtctggacatccttaacagatgctgcccgcccacgtggactgg

SEQ ID NO: 669179 - DNA, 1219 bp, Homo sapiens
tttgtatttttagtagagaaggggtttctccatgttgaccaggctggtctcgaactcctggtctcaagtgatccacccacctcagcctcccaaagtgttggaattaggcatgacccaccacacgcggcctaatccgaatgttcaaatagatcatagtttaaatctcctatcaaagagtcatccttgaaccatggacccctcaagcatttcccaacatgcccgcacatttcacaggaagtgcatagttgtarctgccactgagggaccctgcacaaagtgttccaaagttctgccctggcagtgctggacctggaccccctccagggttaacaccaccatctggatatttcaccggcagtgctgaagccagagggcatggaggacacagaccaccagagatagttagtggtttcctttgggaaagatcagggcttgagtcctgaggctggggaggggcagcctcagtctttgaggatttagtggggcccagcagggatttggcagacagggctggacagaagctgagtatgctttcttctgaggtcagccaaatcatcacactctcagggacaccttccccagccctttattacatattctgatggaactgtgaaccttttctgcatactaccattgtcactgtatggttgttaattgacatctgttctcttctcctagagcacaatccgcagattggctttgctctctgttgaatcccctgtttccagcaccctgctgggcacgcactagacactcaggaagtaactgtttcttgaaggattatcagagctaatgtttattgagaattttgtattctaccatttaatcctcaacaaccacttgtgaaataagtaatattaattaatcccattttacagatgagtaaacggagactcaaaggattaagtgacttgccaaatgctaatgagtggtggagtggggcttgaactctggtagtctgactgttgagtctgggagaggccatgtggcaggtctggtggcagaagaggaaccagagtggcccagaataaggaaggcagagaaagtggtggctctgggggcagggatgtggggagatcctttctcccatttaagcttacgggacccagatttctggcatcactgctagatcgcctctgcttcagctgttcagggagtattttagcgagtgaatgagtctggacatccttaacagatgctgcccgcccacgtggactgg

SEQ ID NO: 669180 - DNA, 1219 bp, Homo sapiens
tttgtatttttagtagagaaggggtttctccatgttgaccaggctggtctcgaactcctggtctcaagtgatccacccacctcagcctcccaaagtgttggaattaggcatgacccaccacacgcggcctaatccgaatgttcaaatagatcatagtttaaatctcctatcaaagagtcatccttgaaccatggacccctcaagcatttcccaacatgcccgcacatttcacaggaagtgcatagttgtagctgccactgagggaccctgcacaaagtgttccaaagttctgccctggcagtgctggacctggaccccctccagggttaacaccaccatctggatatttcaccggcagkgctgaagccagagggcatggaggacacagaccaccagagatagttagtggtttcctttgggaaagatcagggcttgagtcctgaggctggggaggggcagcctcagtctttgaggatttagtggggcccagcagggatttggcagacagggctggacagaagctgagtatgctttcttctgaggtcagccaaatcatcacactctcagggacaccttccccagccctttattacatattctgatggaactgtgaaccttttctgcatactaccattgtcactgtatggttgttaattgacatctgttctcttctcctagagcacaatccgcagattggctttgctctctgttgaatcccctgtttccagcaccctgctgggcacgcactagacactcaggaagtaactgtttcttgaaggattatcagagctaatgtttattgagaattttgtattctaccatttaatcctcaacaaccacttgtgaaataagtaatattaattaatcccattttacagatgagtaaacggagactcaaaggattaagtgacttgccaaatgctaatgagtggtggagtggggcttgaactctggtagtctgactgttgagtctgggagaggccatgtggcaggtctggtggcagaagaggaaccagagtggcccagaataaggaaggcagagaaagtggtggctctgggggcagggatgtggggagatcctttctcccatttaagcttacgggacccagatttctggcatcactgctagatcgcctctgcttcagctgttcagggagtattttagcgagtgaatgagtctggacatccttaacagatgctgcccgcccacgtggactgg

SEQ ID NO: 669181 - DNA, 1219 bp, Homo sapiens
tttgtatttttagtagagaaggggtttctccatgttgaccaggctggtctcgaactcctggtctcaagtgatccacccacctcagcctcccaaagtgttggaattaggcatgacccaccacacgcggcctaatccgaatgttcaaatagatcatagtttaaatctcctatcaaagagtcatccttgaaccatggacccctcaagcatttcccaacatgcccgcacatttcacaggaagtgcatagttgtagctgccactgagggaccctgcacaaagtgttccaaagttctgccctggcagtgctggacctggaccccctccagggttaacaccaccatctggatatttcaccggcagtgctgaagccagagggcakggaggacacagaccaccagagatagttagtggtttcctttgggaaagatcagggcttgagtcctgaggctggggaggggcagcctcagtctttgaggatttagtggggcccagcagggatttggcagacagggctggacagaagctgagtatgctttcttctgaggtcagccaaatcatcacactctcagggacaccttccccagccctttattacatattctgatggaactgtgaaccttttctgcatactaccattgtcactgtatggttgttaattgacatctgttctcttctcctagagcacaatccgcagattggctttgctctctgttgaatcccctgtttccagcaccctgctgggcacgcactagacactcaggaagtaactgtttcttgaaggattatcagagctaatgtttattgagaattttgtattctaccatttaatcctcaacaaccacttgtgaaataagtaatattaattaatcccattttacagatgagtaaacggagactcaaaggattaagtgacttgccaaatgctaatgagtggtggagtggggcttgaactctggtagtctgactgttgagtctgggagaggccatgtggcaggtctggtggcagaagaggaaccagagtggcccagaataaggaaggcagagaaagtggtggctctgggggcagggatgtggggagatcctttctcccatttaagcttacgggacccagatttctggcatcactgctagatcgcctctgcttcagctgttcagggagtattttagcgagtgaatgagtctggacatccttaacagatgctgcccgcccacgtggactgg

SEQ ID NO: 669182 - DNA, 629 bp, Homo sapiens
tgaagtttatatttgaatgaaaatacctcaaattcttttctaccctgacttagaactatataactttaactctctttttcatttttaaagatgtgatattcctctgatgagataacgtggagctttcctctaaaattttcttgtgttcagaccttttttttctcttccttctggtcttcaaaaagctataggaatctgacctaggaacactgtttcctcaataattggcattttctattttcactttggttttccccaacttaattgatgagatatataatctttctccatccaaagaaactacaatgactgacactaacatttttgaacccatctatgcccatttccatttttagttctacaaatgttctgacaccattttttaaaaaatcacaacaccccaaacagkgggttctatttttttttctattgttatagatgagtaaactgacacctaaagagggcccttagcttgtggctggcatctcaggaccaaaatgcctgcgtttgaagcccctgggaatttggcctttggagcctttagcagcttctaagcctagtgagtttgtggcttcaggtcctgtttaggtcctgtttctcatttgtggagaggttggtcttgttttgaa

SEQ ID NO: 669183 - DNA, 1034 bp, Homo sapiens
aaagtttcctacagactgaggatattcacacgacaggagcctgggggttaaatgagcctttattagaatgttgtagcagttgtgtttgaaggcggtggccctacaaaaaaaaaattaaattaaagtccctaactgcatgggtaggaaaaccagggctggagctcaattggaaccagtggagcccagaactcatggagacatacgtatgtacgtgggcacgggacgccctcgcactggcatgaagccggcccagcctgcaagagacacggaacggcttctgcctttcctcacggaaccagtttttaaagagtgggacgggaaagaaacaaaaatgaaactaaaagcagacctgatccttttaaaaacatttttgtagactctaaagggaattacaaaaaaaaaaaaagtctgaaagcaaatcctgacagcaacccctaggtttaaggacaggttctaaactagacccaaacggaaatcctgacatctgtgcgcagcggctcgccgcacacctggacggcacctcctgacctgcacacacctgtgcacgctcacctcccaggagcaaggccagggtggcttaagattgcgtccatcgaaatgaatagaaaaaaggaaaaaatttaataaaataaaccacaacagaaaaaccccgcgacagtcccccctccagctttctgctcagggctgctgccgacyggatcctctccttctcccttaatgggcagcttctggaatccctgcttctctggctgggtctgttcttcagtttgttcttctgctaagtctggaaggtgcgggggcgggggtctccagaacaagcagcaatggaggcgttcagctggagcgagggctgcctcggccatccctgcatctgtcagtcagtcacgggggcgggccggccgtccctgccaggggctgtggcaccatgagccgcccaccctccagggcacagggccagcgggatgatgcagcgtacaacagggaccccagggtctgcacggtttacttttaactccatcatcatgaggtgatta

SEQ ID NO: 669184 - DNA, 1034 bp, Homo sapiens
aaagtttcctacagactgaggatattcacacgacaggagcctgggggttaaatgagcctttattagaatgttgtagcagttgtgtttgaaggcggtggccctacaaaaaaaaaattaaattaaagtccctaactgcatgggtaggaaaaccagggctggagctcaattggaaccagtggagcccagaactcatggagacatacgtatgtacgtgggcacgggacgccctcgcactggcatgaagccggcccagcctgcaagagacacggaacggcttctgcctttcctcacggaaccagtttttaaagagtgggacgggaaagaaacaaaaatgaaactaaaagcagacctgatccttttaaaaacatttttgtagactctaaagggaattacaaaaaaaaaaaaagtctgaaagcaaatcctgacagcaacccctaggtttaaggacaggttctaaactagacccaaacggaaatcctgacatctgtgcgcagcggctcgccgcacacctggacggcacctcctgacctgcacacacctgtgcacgctcacctcccaggagcaaggccagggtggcttaagattgcgtccatcgaaatgaatagaaaaaaggaaaaaatttaataaaataaaccacaacagaaaaaccccgcgacagtcccccctccagctttctgctcagggctgctgccgaccggatcctctccttctcccttaatgggcagcttctggaatccctgcttctctggctgggtctgttcttcagtttgttcttctgctaagtctggaaggtgcgggggcgggggtctccagaacaagcagcaatggaggcgttcagctggagcgagggctgcctcggccatccctgcatctgtcmgtcagtcacgggggcgggccggccgtccctgccaggggctgtggcaccatgagccgcccaccctccagggcacagggccagcgggatgatgcagcgtacaacagggaccccagggtctgcacggtttacttttaactccatcatcatgaggtgatta

SEQ ID NO: 669185 - DNA, 929 bp, Homo sapiens
caagtagtggcgattacaggcacctgccaccatgcccagctaatttttttgtatttttagtagaggtgggtttcaccatcttggccaggctggtcttgaactcctgaccttgtgatccacccaccttggcctcccaaagtgctgggattacaggtgtgagccaccgtgcctggccagtactgattttttttcctctaggagttgataatgcttataaatatataatagatatactaaaccctctgaaattccagcatgatctgaaatagttattttaattttctgcttctaccctgccacattacctgtcctgacttgctaaagataaatatgktacgtgtctccttatccctataatgtgctacattttttatatagcatgtatctctacctgatgtattttgtttaatgtcttacccaaaatattataacattcatttgcttcaggatttttcttttttatttttctatgccttattccttgtgacttcatgtagtagggtcaggataaatgtcacctaaataaacatgaaacgaaggaggtaagggctataagggaagcatcgttgcccaagacataggccttaggaaaaggagctcaaagataacatatttgattatttatttattttatttattttgagacagagtctggctctgttgcccaggctggagtgcagtggtgtgatttcggcttactgcaacctctgcctcctgagttcacacaattctcctgcctcagcctcctgagtagctgggactacagctgtgcgccaccatgcccggctgatttttgtagttttagtagagacagggtttcgccattttggccaggctggtcttgaactcctgacctcatgtgattcccccgaccttggtctcccaaagtgctgggattacaagcatgagctaccacgcacagcatattt

SEQ ID NO: 669186 - DNA, 576 bp, Homo sapiens
caggttgtagtcagccgggatcgtgccactgccctctagcctggtcgacagcgagactccatctgaaaagtaaataaatacatgaataaaaaagaaaaatacaaatgttagccaaggatgatgtcaggcgcctgtaatcccagctcctcaggaagctcaggaaggagaattgcttgagcccaggagacagaggttgcagtgagccgagatcacgccactgcactccagcctgggtcacagagcaagactctgtcccaaaaaagaggactatctgagcgcaagagacctaggttggaagtgcttatggactccagcctggaaaatacagattttgtcttaggagaaaaaaaaaaaaaaaagcacagaaccccgatatcatccaagtctgatgataagcatsctctacaaatgtattactgaagtcagcatcaacttcaacattgagtttctcaaaccgtaacgctccaaagggaagcgctttggtttctttcagacaacagaaagtgcttccctctagagggtcacagcatgggatcttctcactccagcactctgggtttcttgttggaattttcc

SEQ ID NO: 669187 - DNA, 651 bp, Homo sapiens
tttgttttcacactatgtgtactatttaacttgagtctttcacattgaaaatctatccatgaggccgggcatgatgtctcacgcctgtaaacccagcactttgggaggcaaaggtgggcggatcacccgaggtcaggagtttgagaccagcctggctaacatggctaaacatggtctctactaaaaatacaaaaattaggtgggcatggtggcacctagatgaagcatgagaatcgcttgaacccaggatgcagaggttgcagtgagcgaagatcacgccactgcactccagcctgggcaacaaagtaagactgtctcaaaaaaaaaaaaaaaaaaaactatgaatctgtggttctttctgacaccaaatacacagtgtcttttccagcaacactttctctgatgccaactgggtatcctagagttcgatgctatgctaacactaaccgctgagggttatcatcagactctgcaggtttcagggctcggtcccacaagactgccctcacatcatgtgccactctggggtccccacgttatcacacttctgtccaacttgaccacaactggaggttgccacaacctccctgctcaggttcgataatttgctagaatgactcacagaactcaggaaaatgycacacaattaca

SEQ ID NO: 669188 - DNA, 1471 bp, Homo sapiens
agtataatgaaacaagaaatgatggtatgcaatagcaataataatttcttctgaggtttaaaaaaagaactcaatatgtgcaactatgatatatcaataaagaaagaatgaaaatgcataagaaaaccatgtaaatcaggagagtaacatatgcaaatctagatttagtgaatgagcatgggtaagaattatttagaacaaccactgaaataatagagtaaataaattcaaaatgtacagaaaataaaaaaggagaatgacaaaaatacacaaaagaagctagagaaaaaacagaagacaaatgtaacattcaaatatattaatacagaagatgctaacagaataaatgctttaactaaaatactaatattcacagaatagattaatccaattatatgctacgtacaagagatatctaaaatataagaatacaataagagccgggcgcggtggctcatgcctgtaatcccaatgctttgggaggccaaggcaggtggatcacctgaggttgggagttcgagaccagcctgaccaatatgatgaaaccccatctctactgaaaataaaaaaattagctgggtgtggtgccatgcgcctgtacttccagctacttgggaggctgagacaggagaatcacttgattccaggaggtggaggttgcagtgagccaagatcgcgccattgcactccagcctgggcaaaaagagtgaaactccgtctcaaaaaaaagaaagaaagaaagaaagaaagaaagaaaaaagagtacaataagaatggaaataaaaggatatataaggcaagtaaaaaaaaaaaaaaagaaagctggtttgaatgttagtatcagacagaatagattaaggcaaaaaggctcatagagaaaaatgaagtattacataataaaaagttataaatccaaaaagaggtgtgtgtgtgtgcctgtgtgtataaaacacagcctcaaaaaaaaggaaaacacaaaaattaaaaaaaaaaaaggggggacagaattctaaggagaaatggatgaagccaccaccagagctctcacaaatccagtttaagcaggcagttcaayaactatgtgcagattgaacatgatgagacagcactcatggggccatgtttgtctcagaaaatgcttgaccacagagcaatgcagttggcaaacaatgaccaaaagataaccagaaaaaaagtcacagaaatgaaaattaaaagaaaaaaattctaaatctgcatgccaaagaagccatgatatttgatatttataattaaaatacaataaagtatgatactgcaattctttgggatgtgacaggcattcaacataagaaactggaaagaaacatcccaaaaaggaagaaaatgataacaatcagaaagttataaaatagaaaacatatatatcataaagtggttcaatcaagccagaagttctttaagaagaaaactgacaacattctgatggaat

SEQ ID NO: 669189 - DNA, 625 bp, Homo sapiens
cttgaacctgggaggcggaggctgcagtgagccaagatcgtgccactccagcctgggtgacacagcgagactccatctcaaaaaacaaaacaaaacaaaaaacaatctttgggccaggctcgatggctcatgcctgtaatcccagcattttgggaggccgaggtgggctgatcacttgaggtcaggagttcgagaccagcctggctaacatggtgaaaccccgcctctactaaaaatacaaagattagccgggcgtggtggcacacacctgtaatctcacctacttgggagggtaaggtatgagaatcatttgaactcaggaggcagaggttggagtgagccaagattgcaccactgcactccagcctgggtgacagagcaagactcactttcaaaaaacaaacaaacaaaaacaaaacaaaacaaacaaacaagaaaaaaaaagcacaatcttcgaagccgtgcatccttctatggttccaggcaccccagccctacggcacaggtracctccaatgtgaaatttgagttaatctcttctttctttatactctactcatatatatatatatccctaagtaatgaatcatttaattttgctttcttaaattttatgtcaacgaaa

SEQ ID NO: 669190 - DNA, 1502 bp, Homo sapiens
gaattcctggtctccagtcattggcgagacttcacttcaccatcagctgggacgacaggcacctacctgccaacaggcccggctacattttatttttttgtagagatggggtctcggtatgttgcacaggctggtcttgaactcctaggctcaagcaatcataccacctgggtcttccaaactgttggaattacwggcgtgagccaccttgccggccgcactccacttgttaaaaagcatcactggattttccctttccacagggtaaaatcagccattaatgaatgagcatcaacctactaggccaatgagaatgtgcactaagtgtccctacctgggggtcctgtgtgctatatactcccagaattgaatactaacccgcatacctgcctttattttttcccatgttccattgcttgctttaatgggaaaagaactgagagtgaatacacggtgatttctaggaacatgaaaccacttttttaagagacaggatctcactatgttgcccaggctgttatcaaactcctgggctcaagtgatcctcttgccttggcctgagcagcagcaggcgcccttgcagcaaagccacttttaattccagaattttaggctctcttttctctctcatatttgtatgcttttttcaaaaaaaattaatttgctttcaaattgaaaactaaaaattgtatacaattgggcacagcataatgtgctttgtaggatgtgaacgctgtaaaatggctaaattaagctgctattcacatgccttactttatgtactaatcatttttggctgtgagaatacttgattgaaatctactcttttagcaatttccaagcatacattgttatgaactgaagtcaccatgttggacaacggctctcttgaattcatctctccaactgaaatttgtacccttagacctatatctccccaacccccatcccagccctggtaaccaccattctactcactgctactatgagtccactaggcttttaaaattattattcatgtcatctacttcttttttaattttttaaatgattttaacttgtattttagattcgctgggtgcctgtgcagatttgttacatgagtgtattgagtgatgctgagatttggggtatgactcaacccgtcacccaggatgtgaggagcacccgataggtagtttttcaaccctccctccctctatccctccagagtttcactgttttggagtccacgtcctgatttcctttcctctgtgtacctgccccggagcgggattgccggatcatgcagttgttggactttcaattttctgaggagcttctatactgtctcccatatcggctgctctaatttacatcccagcacggggcgcagaggacccctttcccccgaatcctcaccaacactcgttccatgtgtctttttgggaacagccactctagcaggcgtgaggggtgccttgtggtttggatttgcatgtccctgatgatgagtgatgacg

SEQ ID NO: 669191 - DNA, 1502 bp, Homo sapiens
gaattcctggtctccagtcattggcgagacttcacttcaccatcagctgggacgacaggcacctacctgccaacaggcccggctacattttatttttttgtagagatggggtctcggtatgttgcacaggctggtcttgaactcctaggctcaagcaatcataccacctgggtcttccaaactgttggaattacaggcgtgagccaccttgccggccgcacwccacttgttaaaaagcatcactggattttccctttccacagggtaaaatcagccattaatgaatgagcatcaacctactaggccaatgagaatgtgcactaagtgtccctacctgggggtcctgtgtgctatatactcccagaattgaatactaacccgcatacctgcctttattttttcccatgttccattgcttgctttaatgggaaaagaactgagagtgaatacacggtgatttctaggaacatgaaaccacttttttaagagacaggatctcactatgttgcccaggctgttatcaaactcctgggctcaagtgatcctcttgccttggcctgagcagcagcaggcgcccttgcagcaaagccacttttaattccagaattttaggctctcttttctctctcatatttgtatgcttttttcaaaaaaaattaatttgctttcaaattgaaaactaaaaattgtatacaattgggcacagcataatgtgctttgtaggatgtgaacgctgtaaaatggctaaattaagctgctattcacatgccttactttatgtactaatcatttttggctgtgagaatacttgattgaaatctactcttttagcaatttccaagcatacattgttatgaactgaagtcaccatgttggacaacggctctcttgaattcatctctccaactgaaatttgtacccttagacctatatctccccaacccccatcccagccctggtaaccaccattctactcactgctactatgagtccactaggcttttaaaattattattcatgtcatctacttcttttttaattttttaaatgattttaacttgtattttagattcgctgggtgcctgtgcagatttgttacatgagtgtattgagtgatgctgagatttggggtatgactcaacccgtcacccaggatgtgaggagcacccgataggtagtttttcaaccctccctccctctatccctccagagtttcactgttttggagtccacgtcctgatttcctttcctctgtgtacctgccccggagcgggattgccggatcatgcagttgttggactttcaattttctgaggagcttctatactgtctcccatatcggctgctctaatttacatcccagcacggggcgcagaggacccctttcccccgaatcctcaccaacactcgttccatgtgtctttttgggaacagccactctagcaggcgtgaggggtgccttgtggtttggatttgcatgtccctgatgatgagtgatgacg

SEQ ID NO: 669192 - DNA, 2757 bp, Homo sapiens
cctccaggtccccaaatgagcccctaagttctaatacaaggtgagctgccatcggccaattgagttggattcacccagaatatttctccttgtcttctctttggtttagagaccctttcatctaaaggactcatatttatgtacttatgtagaaaaggaaaaaattcagacagattgctgtgtccacagagctgattctgcattgggaaggcagatttgaacattacagtaaagtgtgagcattatggcaggacccagggaatatgagagctactttcaggttctcatagtgagtctgattgtcttttttctctctacagtctgtggtcaattttcttggcaaggaatatcttatgcaggaatcagatgtcgagatggctgaaatccctgccagtgtcagagatgatccgagaggcgtgtccagccagcgggcctcctctgtgaatgagatgcgtccgggggaaggccaggccagccaagagctgcagaccctgcccagggtccctgcactgtccagaaggcaggtgagtgtgtgaggccctggtgtctgggcagaggtgggagaaggaacaggagaaaactgagtgtgcctctggactgattgagagatttggcacaggacaagaacagagacattccccatggatgtgttacatccttagacattcctgagtcatcacagagaatgaagcctcatctacttttctctccaccatgagagcttttagcatgtagggtggggggtcagaaatggtctcagtgaaatgagggaggcagttggcaccgatgaatgaactgaaggtcccttccccattcagtttcctcaaagacatttaatgtcataattcagcaaggagcgcactttctacagattgtcaatttcttaatttgaggagtgtttctcaactggggtgattttgcctttcaggacacatggccatgtctggagatgtgtttgtgtgtcattgtagggggtggtggggtgttgatagcatctagagggtggaggcggggtctctgctctgcacaggagcgccccctccaggagggtgatgcagccccaatgccagtggtgccaggggttaggggcctccacctagagtcatgctccttccagtgtcaggggcagggagacgttggcacagcggggagaaatatgctcagagaaccaaacagtgaaaaccaccaggcacaggagctgatttagaatatggagggtgcagattagggagagactcagaaatgaggtggtgatgtttatttgggatgatgtgggaggcccataggaagtctgcacgtatccctaaacctgtgtcattagaaaagttggtgtatccagtcaggaagggacagtgatgtccatgacccaccagtttagrcagggcagtcattgctgttggttttccattgtcaggaagaggacttcctgctgccagagactactgtcatgaaaagtgccccaaaggctctgagacccaagccaaccttggagaaggatctgaacgtagacagggaagaaaacacgggacttacatccccagagcctcagcttccaaacggtcctagtgagtatgaagacttggatccacaggggttagcccctctcttctggggtgtggggctggggtcccagcattatcatgtctgggggagttggcactcagctgccaaagcctctccatcccttactctccagagacctacggtccaatgtcttaggtttaaggttgaggggaagttgtcagccaacatcagtgtttggttgcaatgagtttggtgtattgaaaatgtaccttattaactgttgtgtgtggaatcccttcttccagcaggtgtggtgggagcaaaggaggggaaggaacccaaaaaaagagcctctgtcgaaaatgtggatgctgacacaccttctgcctgcgttgtggagagagaagcttcgactcacagcgggagcagaggagacgctctgaatctgagatgtcccaaaagaagcaaaccagacgccacctccatttcccaagaagggcctcaaggaggagccacacctgtgggcaacagcgaatccccaggaaaacctgagataaattcagtttattccccaggccctgcaggtgcagtcagtcaccccaatggccaagaagccaaggaactgctgccctttgcatgtggcgtgtgcaataagaggtttacgtgtaattccaagctagccatccacatgagatcacacacaggagagagaccctttcaatgtaatttctgtgagaggtgcttcacgcagctctcagacctccgcgtccaccagcgaatccacactggtgagaagccctacacatgtgacatctgtcacaaacggttcaacaggatgttctccttgaagtgtcacaagaggagccacacgggggagaagccctataaatgtaaggactgcaaccaagttttcacctacaggaagaacctgaacgagcacaagctcatccactccggagagaaaccctataaatgtcccaagtgtctaagagcctttcgtcggcctgaaacgttaaaataccaccagaaaacacatcaagaaaccactgcacccagagaatgtgaaggatgatttttcactgacgctattagatgagatatgacatgaagcaggtgcaagggcgcctggcacacagagggagtgccctagataggaattgccaggatgtcggagtaaatattcattctccccacagagctttattttctgtttcattaggtccattgttttcg

SEQ ID NO: 669193 - DNA, 2757 bp, Homo sapiens
cctccaggtccccaaatgagcccctaagttctaatacaaggtgagctgccatcggccaattgagttggattcacccagaatatttctccttgtcttctctttggtttagagaccctttcatctaaaggactcatatttatgtacttatgtagaaaaggaaaaaattcagacagattgctgtgtccacagagctgattctgcattgggaaggcagatttgaacattacagtaaagtgtgagcattatggcaggacccagggaatatgagagctactttcaggttctcatagtgagtctgattgtcttttttctctctacagtctgtggtcaattttcttggcaaggaatatcttatgcaggaatcagatgtcgagatggctgaaatccctgccagtgtcagagatgatccgagaggcgtgtccagccagcgggcctcctctgtgaatgagatgcgtccgggggaaggccaggccagccaagagctgcagaccctgcccagggtccctgcactgtccagaaggcaggtgagtgtgtgaggccctggtgtctgggcagaggtgggagaaggaacaggagaaaactgagtgtgcctctggactgattgagagatttggcacaggacaagaacagagacattccccatggatgtgttacatccttagacattcctgagtcatcacagagaatgaagcctcatctacttttctctccaccatgagagcttttagcatgtagggtggggggtcagaaatggtctcagtgaaatgagggaggcagttggcaccgatgaatgaactgaaggtcccttccccattcagtttcctcaaagacatttaatgtcataattcagcaaggagcgcactttctacagattgtcaatttcttaatttgaggagtgtttctcaactggggtgattttgcctttcaggacacatggccatgtctggagatgtgtttgtgtgtcattgtagggggtggtggggtgttgatagcatctagagggtggaggcggggtctctgctctgcacaggagcgccccctccaggagggtgatgcagccccaatgccagtggtgccaggggttaggggcctccacctagagtcatgctccttccagtgtcaggggcagggagacgttggcacagcggggagaaatatgctcagagaaccaaacagtgaaaaccaccaggcacaggagctgatttagaatatggagggtgcagattagggagagactcagaaatgaggtggtgatgtttatttgggatgatgtgggaggcccataggaagtctgcacgtatccctaaacctgtgtcattagaaaagttggtgtatccagtcaggaagggacagtgatgtccatgacccaccagtttagacagggcagtcaytgctgttggttttccattgtcaggaagaggacttcctgctgccagagactactgtcatgaaaagtgccccaaaggctctgagacccaagccaaccttggagaaggatctgaacgtagacagggaagaaaacacgggacttacatccccagagcctcagcttccaaacggtcctagtgagtatgaagacttggatccacaggggttagcccctctcttctggggtgtggggctggggtcccagcattatcatgtctgggggagttggcactcagctgccaaagcctctccatcccttactctccagagacctacggtccaatgtcttaggtttaaggttgaggggaagttgtcagccaacatcagtgtttggttgcaatgagtttggtgtattgaaaatgtaccttattaactgttgtgtgtggaatcccttcttccagcaggtgtggtgggagcaaaggaggggaaggaacccaaaaaaagagcctctgtcgaaaatgtggatgctgacacaccttctgcctgcgttgtggagagagaagcttcgactcacagcgggagcagaggagacgctctgaatctgagatgtcccaaaagaagcaaaccagacgccacctccatttcccaagaagggcctcaaggaggagccacacctgtgggcaacagcgaatccccaggaaaacctgagataaattcagtttattccccaggccctgcaggtgcagtcagtcaccccaatggccaagaagccaaggaactgctgccctttgcatgtggcgtgtgcaataagaggtttacgtgtaattccaagctagccatccacatgagatcacacacaggagagagaccctttcaatgtaatttctgtgagaggtgcttcacgcagctctcagacctccgcgtccaccagcgaatccacactggtgagaagccctacacatgtgacatctgtcacaaacggttcaacaggatgttctccttgaagtgtcacaagaggagccacacgggggagaagccctataaatgtaaggactgcaaccaagttttcacctacaggaagaacctgaacgagcacaagctcatccactccggagagaaaccctataaatgtcccaagtgtctaagagcctttcgtcggcctgaaacgttaaaataccaccagaaaacacatcaagaaaccactgcacccagagaatgtgaaggatgatttttcactgacgctattagatgagatatgacatgaagcaggtgcaagggcgcctggcacacagagggagtgccctagataggaattgccaggatgtcggagtaaatattcattctccccacagagctttattttctgtttcattaggtccattgttttcg

SEQ ID NO: 669194 - DNA, 629 bp, Homo sapiens
attctggcagttagtgtggagacagatataggggcagcccctggtggcagggaccagtgggcaggtcacccagggcttgatccctgacatccagtcgtgtgacgattgtgtcctgagttcagggaagggctgttgatgaagcagaagaaatgtttgagaagcaytggaaaaatccggagccacctgttttgcgatggattatctgttgcagatagtggtgaaaaaaaaaagcaaacaggtggttctgggatccccccgaaagggaaacccaagatgaggagctggtgggaaggggaaattaaatgctcatttaacttaacatgtgggatgtccagaggtgtatttgccatcaggggaatacctgcgtaagggctctggaatagacacctgacttggctatcatttctagcggggttagatagcccctcaaaagacagagtgtggagagaagagccacatgtcaggcttaggtccaagaggggcgagtttgcagaaggagtgatggcaggagagcggggaaccaggggcatcccaagtttggacagaagcaatgtgaatggacacgaaaggagagattcgagtgagatttacacgttagaatccctggaaccaggtgactgatcagggct

SEQ ID NO: 669195 - DNA, 606 bp, Homo sapiens
aggacactacacacaaccctctgtttctatcaggcttgaaggaagtaccatagaaaccttcagagcttagatagaccagtggtctctacactctgcctttattccaggagtccagagggatactgggtcaagttcatattcccactgacagctaaagttcttgactgtcaaagcaatttctaagaattaccagtggaaacagttagttccctgtggctgctatgaaaaattattacaaacttaatggctacaacagtacaaatttactatcatacaggtgtgatatgatagtatcacatkagcctggaaatatcattatcccaactttatagatcaagaaaatgaagcacagagtggttaagtaacttgctcagggtacatagctagtaagtgctagaggtaagtataaacgtagacatctttggaaaggaatatacacaaaaatgtaaaaacaatacttacttctgagtagaaatacgatagatgttgtttgcttgctttgttgtttttctgaaatttacagtacgtctaggacaggggtccacaaacgttttctataaagggccggacagtaaatattttaggccttttggcccagatggtctc

SEQ ID NO: 669196 - DNA, 606 bp, Homo sapiens
aggacactacacacaaccctctgtttctatcaggcttgaaggaagtaccatagaaaccttcagagcttagatagaccagtggtctctacactctgcctttattccaggagtccagagggatactgggtcaagttcatattcccactgacagctaaagttcttgactgtcaaagcaatttctaagaattaccagtggaaacagttagttccctgtggctgctatgaaaaattattacaaacttaatggctacaacagtacaaatttactatcatacaggtgtgatatgatagtatcacattagmctggaaatatcattatcccaactttatagatcaagaaaatgaagcacagagtggttaagtaacttgctcagggtacatagctagtaagtgctagaggtaagtataaacgtagacatctttggaaaggaatatacacaaaaatgtaaaaacaatacttacttctgagtagaaatacgatagatgttgtttgcttgctttgttgtttttctgaaatttacagtacgtctaggacaggggtccacaaacgttttctataaagggccggacagtaaatattttaggccttttggcccagatggtctc

SEQ ID NO: 669197 - DNA, 602 bp, Homo sapiens
gtctcgaactcctgacctcgtgatctgcccacctcagcctcccaaagtgctgggattacatgtgtgagccactgcacctgaccggatattattatacagtgatttgtgccaagtgaaaggacttgtagatttatttatttatttaagacagagcttcgttcttgtcacccaggctggagtgcaatggcgaratcttggctcactgcaaccttcgcctcccgggttcaagcgattctcctgcctcagcctctgtaactgggattacaggcgactgccaccacgcccggctcattcactgggctaatttttggtatttttagtagagacagggtttcaccatgttggtcactctggttttcaactcctgacctcaggtgatccacccgccttggcctcccaaagtgctgggattacaggcgtgagccactgtgcctggccaggacttgtagatttaaacatagaattcaacaattccagtctggtagagtaaataattagatgaaaatatgaactgcaatatgaaatactgaatacagacaatgtgctggcaccattagggactttaacaaaatgttctgcatatcaggtggaagagcagctca

SEQ ID NO: 669198 - DNA, 670 bp, Homo sapiens
cactcagaaaacgtgtggaatgggcaaatgaatgaatgaatgaatgaaccaatgaacaaaggagaccctagtgggttcccaagggtggaaactcctaagctcagcccagacccaaacagcaacaaaggagcctggagacacctctggtccgcgggcagcgcccccatcgcccaccatcaaccaggcaaagcccagcgtgtctccatggagatggcagcaggacccgmccccgtgctggcccgcactctcggcctccttatctggtttaggaatgcgcggtatccacgctcgctcgcgcgggagccacgcctcctctcccccccgcccccgagaccgccacacgcgcggggcccccacgtctccaagcggcactggaaggattcctctccgtcccgccaggggtcccgcctcgagattctgggaagactgggggtgggggaccagatcgcagcagcagctgcaccgcgagttccgcgcctggccgtgtcgccccacgagggggactgtgggctcagcgcgtggggcccggagcatctgacaaggacagagacagaggagggggtggaaatccccgggtgagtcaacccgtgcctgagaagggggcgagttccgacgctccgcccggctcggggccacgcgaggtccgcgccacgcgcgccttcacccacga

SEQ ID NO: 669199 - DNA, 944 bp, Homo sapiens
ggtaaatgtaactacagtgttttgctgagttctgcgagtagctctatcaaattatgaaacttgagggaggttacaggagtccataatttttaaacagtagctcagaagcatagatgggcctatggggtttgtgactggcatctgcaattaggacaatattgtgaaaatgagccctgaatcagggtctgtgctgactctgggtggtgtcagaattcaaattcaaatgttagacaatgagttggtgttggagaatgtcttgatgttcagcaaactctacagatttggtacaagaaaaaagataccacagaggcctggcctggaataaaactctgggtgtctgggaatgggaggctctactctcctgtacacaggctgtcacactgcccattgtcctgtgattccaggtctcccaggatgagagaggatccaaacttagagtaaagaaactctgacagcagacccccttttcccacagctgtaaccacaggattccctctcactcacgagcatacccactagatattaatgtgtccagacctctcccaggactaggcaccatgctgagaaattttacaacagcatytttgattctagtgtttcctggcaaaaacctacaaaagtgtctacaagtctcctggcatatcccaacccccagacactgaatctgcaacagcaaactgttttccccaccaactgagggttctggaccacctgttcataatctcatctgcttgcataaacacaaaaatccatcagagtatacctctacctgagccgctatctgtagcacaaaccagttcttccacctgcattgcactgtttcccactcatagatttttattctttttaacttttatttttggttcaggggtacacatgcaggtttgttatacagctaaaattgtgtcatgggggtttggtgtgcagattattttgtcactgag

SEQ ID NO: 669200 - DNA, 605 bp, Homo sapiens
gtattgcagctgttatcttttgaactaactgctattgcgtgtcccatgaccagccgtggcagggtttttgttcccatgaatgaatgggctataaatctgtcggagctgacagtagcagcagtactagagggtgtaaagagaaaatgtgcagaagaatcttgtggtctttgcttgcctagaaaatgagttcaataaaatggaggtgatcagtgcttatttatagggcaaacggatacatccagcattggccgtcagagcctaacttagtgttttctcatttacagtcactctgttgtaaagcacatctgtgcaccgagggcactcgtggagcttccagcaattgcagtggtggagacacgtgcagataaaggggtgttttcctctctgtttctaagcttcaggagccttcagaggtagctgtctggagagctgtagttttgagggttctaacaggcaggaaaacccgaggccgagaacagctccttatttatatttcagttttgagggtgaatggcaggaaatggrataaaattaatcgccattttttcaggcccctgaaacaataaatttcagcagccataaatttggagctgggttaagtactg

SEQ ID NO: 669201 - DNA, 1287 bp, Homo sapiens
cctcggtgccaggtctgtgctgagcgcttyccgtcacgatcgcacgtgctcctcctcctaaccagcctaggcaggtactgatgaagcacccctgatacagacggggacactgagggcgctcccgccgcgccgaacccaggcgcgcacccggtctgcgctcggctccctggagggcgcgcagccagcggctcccgcagccccgcccccacgcggtgacgtcggcgccccgtccccgcccactgtgtctggctcaggctcgcgcgatcgatgtcctcctggacgtgtccgcggacgtccttcacctccaccgcggcctgggtcccgcccaccgcggcctgagtctcacttttgcccggctcctcctcctgagaacgttccctgggagtttttcatcaactcccgtggttcatccaccaaccacgcaggtctcctccatctgaccctgaactccggcttgggcagccacctgctcctgggcgccccctgcaccactgtccctaggcccctctcacttaccgagtcccaactcattgctctatttccccaaaccctccttccctgttcttccacgttcttcatctcaggggcagcgtcaccgaccacccagttattcggccagacgcccttggcactgaccttgccccatctctccccttatcccctacagcccatcggtccccagccttgtcccttcggcccctgcctctctctgccccgtcccctcctctctgtccccttggcctggctccagctcagacgtcctcctctctctctggaccctcgctcctcctgtccgggaggacagcctcctgtcggtcaccacgtggccctagagggtctctctgcacttggagatcaccccgcccctcccctgctcacagccttcccttgcagctccccatcacccctgggcaaggtcccggcttctcggtctgcagttttaagccctttgagattccccagcaggaaaaagcctcccctcaaacccccttctcagggggcctgcagactgcccacctccggagcgggactggactcgtggtgcccgaagggcctccccatgaggtgctggccctcttctaacttagtctcaccacggcctccgttccttctggaaccagacaagctgctgtttcagggcgctgggtctggatccagacagcatgggtgcagatctctgttccactacttactattttgggagaccctggtaagagttttttcttctctgtgtctcagtttcttatccttaaaatcagaggatcccctcgtagagtttttcgagga

SEQ ID NO: 669202 - DNA, 732 bp, Homo sapiens
ttgccctctggctttcagttgggttgtaaggatgagagacaaaagtagaagactgagaggagaaagagaatgaagtcaaagtatgtatcccctccttatgttcctgccagagagttgcagattggctgcctctctctactcaagaccacaggtcaaaccaggaagccctccctgttcatcttctctctctttgggcttgcagtggatctgccatgatccctttgattttcctaaatgttacccacatcttgtaatacccatatctttccttatccaaatttgccckattacatagttaggggaactatctgagacagataaactctgataaagagtgtggaatttcaaatctagaaattcatactctctaaactattaatagagtaagaaatagagatacatgtatattacctatggtcatgaaaataactaaaacgataactaaatataaaattataatgtcaagaaaatgtataaggaagacatgagagggaactagagtagtgtaaagagataagttatttgtctcccaaattcaagtgaggaaagaaaagaagttttataggaggaatgcaagccctttcaaatgatcaggcctagagagacgtgaaaatgagacagcaatcacatcctactcctgcctttaagctatgtattcacctattgaaacagcttgctattgtcacagatagctatgaattaaactaataatgcttcaccagacactgtatt

SEQ ID NO: 669203 - DNA, 1533 bp, Homo sapiens
gatactgcagtgagaaatagggagccatggatggctatagaggaggggtgggcacatgtatagccaggatttggggacttgacttggtatggatggtgtggctttcttctgcctggagaggtctcactgttggtctgaggtggactattgacccagtggacttgatggtacccagaagagggtttacagggacagggctggctgtcaccatctctgctaaattccgtgcatccttacagcccatcttattgccaacagggatttcagataactgtgtttagcccaatgttcctaaggagggaagcgagggatattaaatgtgtatcataggtgctgcgtctgctaattttagactccttatttttgccatctctgagtgtcaccctaataatttcacttaatatttaaaaattaattggttaaaaacttaaaaatacacaactctagctttgttttaggaataatatccaactctgattcactagtttttgggatttttgctaaagctgttaacctgaaaagtggtcagcttggttccatttaaaattacctttgaagccggtttaataagcacctctcccccagcccccgcaatgttggagagagaagggaatttctggaggagtgaggtgggccaccagcccctccgctcccggctcccccactccagcacttccaggccagcgccttctctttggtttctcccggcatttctttaaagactaaatgcactcacccagagacaaactctgggtatcattagagtattattatattacacatcgaaaaatcttcaaaaacggaatgtaagttcattgaccctttgaaggttatttaatgataaacataaatgctttcataaaatccgggcaatgatttaaggtccccgatcaatagttgctgttgagtgcacactggcagggcaggccggcttgcctgaccacccaggcgggctgatggctccactcatcagaggagcctgggtaagcaaataaacaggatataaggcaaaatctgtagggcatgcgcaatggcgggggatgaagttgctggggaagggagccacctagaggccaggccccaggaagagtagccctgaagccaacacctggtggggctgagctgggaggcatgggagactctgcaccaccagccagaggctcctctctgctgatgccctgctgaaatctggcgacatctaagctcttatcctaactcaacttgggcctcaagctgcagggagacagcaagacacagkgcaggttgagctccagctgcaggaccatgttctgcctctctctggctttgtggctctggacagatgctgtgctagtccattctcacactgctacaaagatatgatcagagacagggtaatttataaacaaaagaggtctaattgactcatagttctgcatggctgaggaggcctcaggaaacttacagtcatggcgtaaggtaaaggggaagccaggcatgggggcaggtgagagagagagcaagtgggaactgccaaacacttttaaaaccatc

SEQ ID NO: 669204 - DNA, 3509 bp, Homo sapiens
ctgtaaatgcctcctaccctccagcactccctcccttgtgcagctcacctcttcctctctcctggctaccaacaggctccaaggtccctgctcctaaatgcacaaatgttactaaaaattacagaaaggggccatgcccagtggctcacacctataatcccagcacttttggaggctgaggcaggaggatcacttgaggccaggagtttgagaccagcctgggcaacatagtgagatcccatctttaccaaaaaaattgtttttaaattagccaggcgtggtgatgtgcacctgtagttccagctactcaggaggctgaggtgagaggattgcttgagtacaggaattcgaggctgcagtgagccatgttcatgccactacattccagcctgggtgacagagcgagaccctgtctcaaaaaaaaaaaaagaaaagaaaagaaaaaaaagaaaagagaaatacagaaagggctctctcagctctctggcacattctgtcccactctttcccagaacagcaccttagcagaaatctccaagggggctctccaactcccctgcacaagtctagacctagggaaggacaaaggtcagggtccttctcccagctgagggctcccaggcagaaccccagactggtgcacacgcagaacctcaggcttctgcacacacagaactccagaatgatgcacacgcagaaccctaggctggtgcacacacagaatcccaggctggtgcaaatgcagaatcccaggctggcacacacgcaggctcccagaccctgctccagtgccctctctcctcaaaggagacacaattcaactcatccagctctttctgcttatgcactttatcatacaactgaacacacagatgcaaaggcagacagatctgagcaatgccacacagtcgcactggctctgaaatgcacactggcggtgacacccccagccagaaccagagacaccaccactcattctgcacacacctatggagcccttgccaaatgcctggtgctcatctggggctggaataaactggagacacacagccattccatgtgtgagggcactgtgtgtgttgaatcatgtccctccaaaactcatgttcattcagaacctcagaatgtgacctttggacacagggaggggaacaacacacactggggcctgttggggtagggcaggggtggggagagcmtcagaaaaatagctaatgtatgccaggcttaatacctaggtgataggttgataggtgcagcaaagcaccatggcacacatttgcctgtgtgacaaacctgcacatcctgagcatgtaccctgaaaccaaactaaactaaactaaaataaaataatgtgaccttaggtggcaatagagtcttttacagatgtcattaaggtaaggatccaaaaatgagatcagctgggtgtggtggctcacacctataatcccagcactgtgggagaccaaggtgggtggggcgggggattgcttgaatccaggagttcgagaccagcctgagcaacatggcaaaaccccatctctacaaaaattagctgggcgtggtgctgtgtgcctgcgctaacagctgcttaggaggccaagtgggaggatcagttgagcctgggaggtcgaggctgcagtgagctgtgatcgtgccactgcactccagcctgggtgacagagcgagaccctgtccaaaaaataataataataaaaataaaaatgagattattctgaattaggttgtttactaaatccaacaactggtgcccctcaaagacgaggggaggacacacagaggaaaaggtcgcgtgaagagagaggcagagattggagcgatgcagctacaaatcaatcaatgcctagagcacccagaagctggaagaggcaaggcatcttctcccttagaatcttcagagggagagtagctttgtagacgtcttgctttaagacgtctagcctccagaaccctgcaagaatgcatttatcttgttttaagccacaaggtttgcggcactttgaaatggcagctacaataatctcatacaagcgcacacaactgcacacacacacacacagtgaaggcaggagtacacatgggtgatgcctaagtacacccacatgcatggtgacacactcaatgtcacccgcttggctcagaaccaccctcctccacaacttagtatagagaccactccccaccccagcatggaccctggtggccacgactgctgtggaaagggggctgctctaggcagtaggtggactctatgggggacttggagtgaggacaggctgatccagcctggagtcaggtggctgaggctatagaacccctactccatatcatcccatgctccctctcgtttcttttcccaaacctgtgcctccctctgttccaattttccctgcttctcttgccttctcccttccacctcccagtactcttgccacttcatcctggaaagcaggtttggaaatagacgactccacttaccttcatcagagacctttagggacgccttgcagccaggcctgtaatggccctgggcacagtgcacccagggtgagagcttcatctctgcaggcgtcttccccagtggcacgttcccagaggtgtcttgaggagcctgcctgggatgcaggatgcagggtaatcgaagtccaaggagggaggcgggggaccttgggattgccctctccattcctgcctccctccttcctttgctgcttccctccctcttttcttccttctcttccttccttcctctcttcttcccttcttccatctttcctcccttcctcctgcctgggaccccttccaccactactcactctcacttatctcagtcctgttctcatttgaggtttcagtttttacatcacctcctccctaaagatctcaccatcaaaccctgacaccaccatcaaaccctgacaccaccaccaccaccaccccctgcggctagcgaggctgggctgggctgccccaattccaagcattttggaaaaatgggactggattctgggtgatgtttcccaggatggtgtctcttctcaacagatatcaggaaagggatctggagagacacagaggtgtgattctcagaagaagcatcctctatggttgcctctgggaacacaaagcccacagagggcagggaacaaggccaaggtcacacggtaggttcctgcagcaagcccagatggagtggaggggccaagagctccagctctgcctcttcctccccataaacttgacagggtgcatcatgacccaggtatcaacaccttcagaatctcccagttccccataactccagaaacagtccaacaaagatttcagatactggaattatcaggcaaggactatgaaacaatattgcttacgaagtttaaataacgaaatgtaattttggaaatatcttcaaggataaagcattgtaaagagcggcagggttgatttgaaaaaaaagatatataatttttagaaccaaagctacaata

SEQ ID NO: 669205 - DNA, 3509 bp, Homo sapiens
ctgtaaatgcctcctaccctccagcactccctcccttgtgcagctcacctcttcctctctcctggctaccaacaggctccaaggtccctgctcctaaatgcacaaatgttactaaaaattacagaaaggggccatgcccagtggctcacacctataatcccagcacttttggaggctgaggcaggaggatcacttgaggccaggagtttgagaccagcctgggcaacatagtgagatcccatctttaccaaaaaaattgtttttaaattagccaggcgtggtgatgtgcacctgtagttccagctactcaggaggctgaggtgagaggattgcttgagtacaggaattcgaggctgcagtgagccatgttcatgccactacattccagcctgggtgacagagcgagaccctgtctcaaaaaaaaaaaaagaaaagaaaagaaaaaaaagaaaagagaaatacagaaagggctctctcagctctctggcacattctgtcccactctttcccagaacagcaccttagcagaaatctccaagggggctctccaactcccctgcacaagtctagacctagggaaggacaaaggtcagggtccttctcccagctgagggctcccaggcagaaccccagactggtgcacacgcagaacctcaggcttctgcacacacagaactccagaatgatgcacacgcagaaccctaggctggtgcacacacagaatcccaggctggtgcaaatgcagaatcccaggctggcacacacgcaggctcccagaccctgctccagtgccctctctcctcaaaggagacacaattcaactcatccagctctttctgcttatgcactttatcatacaactgaacacacagatgcaaaggcagacagatctgagcaatgccacacagtcgcactggctctgaaatgcacactggcggtgacacccccagccagaaccagagacaccaccactcattctgcacacacctatggagcccttgccaaatgcctggtgctcatctggggctggaataaactggagacacacagccattccatgtgtgagggcactgtgtgtgttgaatcatgtccctccaaaactcatgttcattcagaacctcagaatgtgacctttggacacagggaggggaacaacacacactggggcctgttggggtagggcaggggtggggagagcctcagaaaaatagctaatgtatgccrggcttaatacctaggtgataggttgataggtgcagcaaagcaccatggcacacatttgcctgtgtgacaaacctgcacatcctgagcatgtaccctgaaaccaaactaaactaaactaaaataaaataatgtgaccttaggtggcaatagagtcttttacagatgtcattaaggtaaggatccaaaaatgagatcagctgggtgtggtggctcacacctataatcccagcactgtgggagaccaaggtgggtggggcgggggattgcttgaatccaggagttcgagaccagcctgagcaacatggcaaaaccccatctctacaaaaattagctgggcgtggtgctgtgtgcctgcgctaacagctgcttaggaggccaagtgggaggatcagttgagcctgggaggtcgaggctgcagtgagctgtgatcgtgccactgcactccagcctgggtgacagagcgagaccctgtccaaaaaataataataataaaaataaaaatgagattattctgaattaggttgtttactaaatccaacaactggtgcccctcaaagacgaggggaggacacacagaggaaaaggtcgcgtgaagagagaggcagagattggagcgatgcagctacaaatcaatcaatgcctagagcacccagaagctggaagaggcaaggcatcttctcccttagaatcttcagagggagagtagctttgtagacgtcttgctttaagacgtctagcctccagaaccctgcaagaatgcatttatcttgttttaagccacaaggtttgcggcactttgaaatggcagctacaataatctcatacaagcgcacacaactgcacacacacacacacagtgaaggcaggagtacacatgggtgatgcctaagtacacccacatgcatggtgacacactcaatgtcacccgcttggctcagaaccaccctcctccacaacttagtatagagaccactccccaccccagcatggaccctggtggccacgactgctgtggaaagggggctgctctaggcagtaggtggactctatgggggacttggagtgaggacaggctgatccagcctggagtcaggtggctgaggctatagaacccctactccatatcatcccatgctccctctcgtttcttttcccaaacctgtgcctccctctgttccaattttccctgcttctcttgccttctcccttccacctcccagtactcttgccacttcatcctggaaagcaggtttggaaatagacgactccacttaccttcatcagagacctttagggacgccttgcagccaggcctgtaatggccctgggcacagtgcacccagggtgagagcttcatctctgcaggcgtcttccccagtggcacgttcccagaggtgtcttgaggagcctgcctgggatgcaggatgcagggtaatcgaagtccaaggagggaggcgggggaccttgggattgccctctccattcctgcctccctccttcctttgctgcttccctccctcttttcttccttctcttccttccttcctctcttcttcccttcttccatctttcctcccttcctcctgcctgggaccccttccaccactactcactctcacttatctcagtcctgttctcatttgaggtttcagtttttacatcacctcctccctaaagatctcaccatcaaaccctgacaccaccatcaaaccctgacaccaccaccaccaccaccccctgcggctagcgaggctgggctgggctgccccaattccaagcattttggaaaaatgggactggattctgggtgatgtttcccaggatggtgtctcttctcaacagatatcaggaaagggatctggagagacacagaggtgtgattctcagaagaagcatcctctatggttgcctctgggaacacaaagcccacagagggcagggaacaaggccaaggtcacacggtaggttcctgcagcaagcccagatggagtggaggggccaagagctccagctctgcctcttcctccccataaacttgacagggtgcatcatgacccaggtatcaacaccttcagaatctcccagttccccataactccagaaacagtccaacaaagatttcagatactggaattatcaggcaaggactatgaaacaatattgcttacgaagtttaaataacgaaatgtaattttggaaatatcttcaaggataaagcattgtaaagagcggcagggttgatttgaaaaaaaagatatataatttttagaaccaaagctacaata

SEQ ID NO: 669206 - DNA, 709 bp, Homo sapiens
tacacacaattttctgttaacttttccacagatgggaagtgcatgtatctttttttttttttttttttgagacggagtctcgctgtcgcccaggctggagtacagtggcgatctcgcctcactgaaagctctgccccccrggttcacgccattctcctgcttcagcctcccaagtagctgggactacaggtgcccgccaccatgcccggataatttttttttttttagtagagacggggtttcacggtgttcgccaggatggtctcgatctcctgacctcatgatccacccacctcagcctcccaaagtgctgggattacaggcgtgagccaccacacccggctgtgcatgtatcttatactcctgggaagtgcttcccaaaaggcttctgggtttctgtttcctgcccaaatcacagatctatatatatttgattccctcagctaaatcttttgacacaagaaacccattttaggtccttcaacttccatcaaatgctacagtgtggttaagggtgcagtcttagtttccacagctgtagaactgggtactgatatgatctggtggtgtccccacccaaatctcagctcgaattgtagctcccataattccctcatgttgtggcagggacccagtgggagatagtggaatcatgggggcggtttcccccatgctgttctcatggtagtgaataagtctcacgagatct

SEQ ID NO: 669207 - DNA, 709 bp, Homo sapiens
tacacacaattttctgttaacttttccacagatgggaagtgcatgtatctttttttttttttttttttgagacggagtctcgctgtcgcccaggctggagtacagtggcgatctcgcctcactgaaagctctgccccccgggttcacgccattctcctgcttcagcctcccaagtagctgggactacaggtgcccgccaccatgcccggataatttttttttttttagtagagacggggtttcacggtgttcgccaggatggtctcgatctcctgacctcatgatccacccacctcagcctcccaaagtgctgggattacaggcgtgagccaccacacccggctgtgcatgtatcttatactcctgggaagtgcttcccaaaaggcttctgggtttctgtttcctgcccaaatcacagatctatatatatttgattccctcagctaaatcttttgacacaagaaacccattttaggtccttcaacttccatcaaatgctacagtgtggttaagggtgcagtcttagtttccacagctgtagaactgggtactgayatgatctggtggtgtccccacccaaatctcagctcgaattgtagctcccataattccctcatgttgtggcagggacccagtgggagatagtggaatcatgggggcggtttcccccatgctgttctcatggtagtgaataagtctcacgagatct

SEQ ID NO: 669208 - DNA, 658 bp, Homo sapiens
gaataccagatgatggacactctggaaaccaaatgcatcttgattctcttgttttatctttctgcaaagtgtgcctcttgctcctgctccgctaactgccttgcagattaataatttagggaactgtgagcagaagcaagaaaagttccagcctagagaggcagagaaggccaatttttctgcagaaatgaccagactggtcagaatccttgcatgcaccattcaggcaaattgcttagttttctgagtctcagtttctgcaactgtaaagagtggcttagcagccacctctaccccagctaattcaccttgctgtttaatttaatttagcaagcattaattagtacttactctgaggcctcagtggggaaacactgctgtgacaagtattccccagtatggtgtcgtgacagtggaggaaaragcttgtaattctgccccaggagaggctctaatggggggacattttgggttggaccttgagggatgaggagggccccatgtatggggtcacaggatgtaaaaagtcatggagacgtttagttccactgtatcaccccatgttttagtcctgagctgcttgccttggcccatttcacatgctacaacccgactttatctctatcctccccagcttctgatagcctccagtctttcc

SEQ ID NO: 669209 - DNA, 663 bp, Homo sapiens
cctattcactacccccttccttagacaaagaagaaagctgctcccttcaatctccattttgttgtgctgagaggcctcaattctttagcccctgtatcctgactccctgggtcttgccgtccaggtcaaggggggccaaacaggaaccctccccttgtgcgtgagcgtgagtgtgtgtgcgcacatgcggtgtgagatgtgtgtgtgcgtgcatgcgtgcaygtgtccacacaaatccccttcaaagaggactggtgaggactggtaaggactgcagcaccctgggctgggtcctcacctcctcactggcctccctgcctcctttccttgtcatctgctgcctctgggctgtttcccaatacccagacctgtagaggtaagtctgctgcctgaacctgctccatggctttcctccattcccagaccattcccagctccaccctcgtcccacctttatttatttatttattttgagatgaggtctcgctacattaaccagactggtcttgaactcctggcctcaagtaatcttcccatctcagcttccggaagtgttaggattacaggcgtgagccatcatgctctgtctaaaatcttttttttatacagtctaactctgtcacccaagttggagtgcagtggtgcaatctctgctcactgcaa

SEQ ID NO: 669210 - DNA, 1580 bp, Homo sapiens
aaggtttaaatttacagacatacatttatctgcacagtatcacgtggccaattgatctttcatttaaatgcagattgggcttattcaaagactctgctttttcctttttcttcattatctatcaaatatccagataactaatgctaccttccaactgtcaaaattattgccaaagtctggatttttaaatattgaaatctatctaaaatatgttaagtaattccttttattcttgaacagttgctatgaaaataaattctacctttatggcttaatggtccacattaggaataaaatggtcctcactagggaaaaaacgttctatgttgcatgttacaacacagtgatgcattgatggggtatttgtgacagtggaaatgcttgcttatacgttaaagagtctatggctacacaatttttgaattatcttttctgatttgctaaattgtttttcttttttcttccttcttatcaggctgctggttgtaaattttggtycttatctatttctctaactctaggccagatggcattttctaaatacatgtccctagagatcttctaatttataaaagtaattaagctcttagtggagtactactgcactccgccttctaaaaagaaggtgggtgttctaacacagattttatggtgtgtgtgtgtgtgtatttatgtgtgcatttggatgtgtgtttgatgagcctttgctaagtagactcagtttctcagctatggtctcaataattaaattttccagaccagtgatccacagataaaagaggtattactctagttaagtataaaaattattttagagtgaaatgtatatatccaacacaaagctattgttttaaaaatcatgaaacagtcatatgctgaaatactatgtagaaattataataatttttaacaagactacttactaaaatgggaaaaatttcaaacatattttataccacaaattcagttccactattttataaaaccaattatgtaaatataatatgaacataagacacagtagacttatttgttataaaaatgacacaggttattattggttattaggcttaagaatcagaagtcaatatttatccagaataaataaactaaaaaatacttgtagaactattatggaaatacaaagataaatgccatataaaataaaaataagcaaggagacaagatggccgaataggaaccgctccggtctacagctcccagcgtgagcaacacagaagacgggtgatttctgcatttccatctgaggtaccgggttcgtctcactagggagtgccagacagtgggtgcaggtcagtgggtgcgtgcaccatgcgcgagccgaagcagggcaaggcattgcctcactcaggaagcgcaaggggtcagggagttccctttcctagtcaaagaaagtggtgacagacggcacctggaaaattgggtcactcccacccgaatactgcgcttttccgatgggcttaaaaaagggcgcaccaggagattatatcccgcacctggtacggacggtcctacgcccacggagtctggctgattgctagcacagcagtctgagatca

SEQ ID NO: 669211 - DNA, 2106 bp, Homo sapiens
tttcagttattttaatttaaatgaaaagtatcatttaagtctaaacatatccaatgtctaccaatatatgtctgagtagtgtgtaattttgttttctccatgcattcagttattaaacatttatcacatgcaagaaactctattgaaactttaatagatttttttaaacccaaagaaggaaaatcttactaaaagagacaaaatacatccttgattgattattgacattaaattgaatgtttaatatgagaaatcatagaatataccaggttatttgagtaactcaatcttgatagataactccatgaccgaagaggggctaaaattcttttgtatacttctggaaagctaaggatttgtagcagacagactgctaaaattgtcatgaatgatctttacgtcctggtattctttcccttgtgtaattccatacccttgagtgtgggctggaactagtagtttggttctaatgactagaacacagtaaaggtgatgggatgacactactgatattaggttacaggtgactaagacttgcatatatttggaaccatctttcttgaactctttcttgcccactcacttgctgctccaatgaagccaatgtgagctgcctgatttggaagatgtccatttggtgaaaaatcgaggaaaacattgtgccacaagttcaggaggaacggagaccctcagttcagcaatcagcaagtaactatttctggtgaacaacatgttaaggaaatttaaaatttatctaccactagtcaagtagtcaagtcttaaactgatttcagccccagccaacacctagactgtaaccttcagaagacccagtcctgggacccatggaagcctcatctggactcctaatccatagacaccatgagacaatactgttttttttaagttgctaagttgaggggtaatatgttatgcagcaatagattactaatttaggctttgtgtatttcctcagcaacttctgcagaaaaaaataaaagaagcatttttagttactcaccgctgaaactttccctaaaacctaatgactgaaaacaacaatcattttattatagctcataattttgcaggccaagcattctggaaattctcactggaatgatttttctgcttcaagtagcattgaccagtgtcacttggtgacattcaatgcgtggtgtggtctggagagtctaatatgacttctctcacatacctagctgtctgctgatgatgatagaaaagctggacttacctgggggctgtcttcctttctgtgtgctccccaagattcatgatatctctgcaggaaggtagttgggctactcacagggagacacagggctccaagtaacaggaagagagagcttctggtccaaggcagaaactaagagcattatttctgctgtatgccattccatcccattgttcaaagaagatacagggaatacctcagcatcacgctgtcaatggaaatatattaaagaattactagacaacttcaattacccacaaatatttaggaatactaaatttctccagaaacaatgcrgactactattttttttctgtctcaaaaaaaagttattttgttttgtggagtccatataggtctggagactacaaaaatggaagaactataataatttaaaaacctttcatcacttctgtgactaaaatttaacacccactttggaatctttttcaaaatttctttatagtttgactccatatcccttttggagggttatttctacgtaaagagatatttgtaaattagatagaacacgcaaagtttacatacatgtgatcttgccaaatacagaacataaacattcaaattatcaatattagtctgaaaacctactttaaagtaccatttgatccagccatctatcagtgatcaatagaaatattaatagcctaagtaattatttattgcctgtggccaattctaggtgcaaagcgacagttatggtctatggtattgatgtacaaaactccctatataacttcatactttatcaaaagtattatgtaacaggtaaagtcagccccacttatgcaaaataatccatcagttgtccttggttggaggtagctttc

SEQ ID NO: 669212 - DNA, 658 bp, Homo sapiens
taatggatgtctgtggttcaaggtagcaggggatcccagaacaaagagtacgattttattcacaggagaaagaaaacaaaaaatagcagtgtattctagtgcaatttcctggaaagttgtgaaatagctttctttttatagtgttaaaactgttgtcaatgtatattttaaaaacacacttttatcttttatttttaacatatttgcatcaamcattatctaattttaaacttgtcatgcaaagtttcttcaaagatagctattttaaattgttagtgttagcactaataatgggggatatttttacttttagttatcttctataaaaagtaagttaagaaatataaattactattttgttaaattaattatcctaaatattttacagaaactgtgcagaattaattgtttgtctctctcagaccattcaagccatatttgtttattaaaactatattatttcagtaattttataattatgccaatgctggaaaaagatgctgtcttctgattgaacagaaaatctaatggtctaattcatatttttctatacttctaaagatataaaatttactttgaaataaactactttttattattttattttatttttaattgacacacaataattgtacatatttatgagatacatagtgat

SEQ ID NO: 669213 - DNA, 658 bp, Homo sapiens
taatggatgtctgtggttcaaggtagcaggggatcccagaacaaagagtacgattttattcacaggagaaagaaaacaaaaaatagcagtgtattctagtgcaatttcctggaaagttgtgaaatagctttctttttatagtgttaaaactgttgtcaatgtatattttaaaaacacacttttatcttttatttttaacatatttgcatcaaacattatctaattttaaacttgtcatgcaaagtttcttcaaagatagctattttaaattgttagtgttagcactaataatgggggatatttttacttttagttatcttctataaaaagtaagttaagaaatataaattactattttgttaaattmattatcctaaatattttacagaaactgtgcagaattaattgtttgtctctctcagaccattcaagccatatttgtttattaaaactatattatttcagtaattttataattatgccaatgctggaaaaagatgctgtcttctgattgaacagaaaatctaatggtctaattcatatttttctatacttctaaagatataaaatttactttgaaataaactactttttattattttattttatttttaattgacacacaataattgtacatatttatgagatacatagtgat

SEQ ID NO: 669214 - DNA, 1061 bp, Homo sapiens
cccccaaatcattcaggagcagattgtttattttccatgtatttgtgtagttttaggagttccttctggagttgatttctagttttattccactrtggtctgaaaaaaatagttgatatgatttcaattaaaaaaaattattcggccaggtgtggtagctcatgcctgtaatcccagcactttgggaggccaaggtgggcgaatcatctgaggccaggaattcaagaccagcctggccaacatggtgaaaccacatctctattaaaaatacaaaaattagccaggtgtggtggtgcatgcctgtaatctcagctactcgggaggctgaggcaggagaattgcttgaacccgggaggcagaagttgcagtgagccaagattgtgtcactgcactccagtccatgtgacagagcaagactgtctcaaaaaaaaaaaaaaaaaaaagcaccagttctatccctctaagtttcagagatggattcattgctaaccaaggtgatggaagccattttattatccagcaagacttagactatgtcattgagctcaccgggctgattgtgaccctatgtacaaggtagccacatgggagaagcagatctacacatactgttaagatggtcttgtatgattctaccagctttctgacctctgacctcttggaaagagcagccccagttagtgaaaaggtttgaccctgatcaacaatgagtagaaacatcatcagtccttaatgtcttgggcgccccttggaaatcacagaaagtcagctgtcctggctatatgggactctcatcccaagacctactttgaactgagtaagaagctcacctgtgactaccgcatttgtctcaacttctccttgtgtaaactcaccccagcaacacagggcaaggatatagatgcttcagtttgttcttttgtgttaaatgtttacaaggacctcagaactaaagcctgttctctggaggaaataaagaaaatatgtttggaggtgcctgaatatgaaaaaaaaaattgagatttgtgatgtatcatatgatctatatttgagaatgttcc

SEQ ID NO: 669215 - DNA, 1061 bp, Homo sapiens
cccccaaatcattcaggagcagattgtttattttccatgtatttgtgtagttttaggagttccttctggagttgatttctagttttattccactgtggtctgaaaaaaatagttgatatgatttcaattaaaaaaaattattcggccaggygtggtagctcatgcctgtaatcccagcactttgggaggccaaggtgggcgaatcatctgaggccaggaattcaagaccagcctggccaacatggtgaaaccacatctctattaaaaatacaaaaattagccaggtgtggtggtgcatgcctgtaatctcagctactcgggaggctgaggcaggagaattgcttgaacccgggaggcagaagttgcagtgagccaagattgtgtcactgcactccagtccatgtgacagagcaagactgtctcaaaaaaaaaaaaaaaaaaaagcaccagttctatccctctaagtttcagagatggattcattgctaaccaaggtgatggaagccattttattatccagcaagacttagactatgtcattgagctcaccgggctgattgtgaccctatgtacaaggtagccacatgggagaagcagatctacacatactgttaagatggtcttgtatgattctaccagctttctgacctctgacctcttggaaagagcagccccagttagtgaaaaggtttgaccctgatcaacaatgagtagaaacatcatcagtccttaatgtcttgggcgccccttggaaatcacagaaagtcagctgtcctggctatatgggactctcatcccaagacctactttgaactgagtaagaagctcacctgtgactaccgcatttgtctcaacttctccttgtgtaaactcaccccagcaacacagggcaaggatatagatgcttcagtttgttcttttgtgttaaatgtttacaaggacctcagaactaaagcctgttctctggaggaaataaagaaaatatgtttggaggtgcctgaatatgaaaaaaaaaattgagatttgtgatgtatcatatgatctatatttgagaatgttcc

SEQ ID NO: 669216 - DNA, 1061 bp, Homo sapiens
cccccaaatcattcaggagcagattgtttattttccatgtatttgtgtagttttaggagttccttctggagttgatttctagttttattccactgtggtctgaaaaaaatagttgatatgatttcaattaaaaaaaattattcggccaggtgtggtagctcatgcctgtaatcccagcactttgggaggccaaggtgggcgaatcayctgaggccaggaattcaagaccagcctggccaacatggtgaaaccacatctctattaaaaatacaaaaattagccaggtgtggtggtgcatgcctgtaatctcagctactcgggaggctgaggcaggagaattgcttgaacccgggaggcagaagttgcagtgagccaagattgtgtcactgcactccagtccatgtgacagagcaagactgtctcaaaaaaaaaaaaaaaaaaaagcaccagttctatccctctaagtttcagagatggattcattgctaaccaaggtgatggaagccattttattatccagcaagacttagactatgtcattgagctcaccgggctgattgtgaccctatgtacaaggtagccacatgggagaagcagatctacacatactgttaagatggtcttgtatgattctaccagctttctgacctctgacctcttggaaagagcagccccagttagtgaaaaggtttgaccctgatcaacaatgagtagaaacatcatcagtccttaatgtcttgggcgccccttggaaatcacagaaagtcagctgtcctggctatatgggactctcatcccaagacctactttgaactgagtaagaagctcacctgtgactaccgcatttgtctcaacttctccttgtgtaaactcaccccagcaacacagggcaaggatatagatgcttcagtttgttcttttgtgttaaatgtttacaaggacctcagaactaaagcctgttctctggaggaaataaagaaaatatgtttggaggtgcctgaatatgaaaaaaaaaattgagatttgtgatgtatcatatgatctatatttgagaatgttcc

SEQ ID NO: 669217 - DNA, 1061 bp, Homo sapiens
cccccaaatcattcaggagcagattgtttattttccatgtatttgtgtagttttaggagttccttctggagttgatttctagttttattccactgtggtctgaaaaaaatagttgatatgatttcaattaaaaaaaattattcggccaggtgtggtagctcatgcctgtaatcccagcactttgggaggccaaggtgggcgaatcatctgaggccaggaattcragaccagcctggccaacatggtgaaaccacatctctattaaaaatacaaaaattagccaggtgtggtggtgcatgcctgtaatctcagctactcgggaggctgaggcaggagaattgcttgaacccgggaggcagaagttgcagtgagccaagattgtgtcactgcactccagtccatgtgacagagcaagactgtctcaaaaaaaaaaaaaaaaaaaagcaccagttctatccctctaagtttcagagatggattcattgctaaccaaggtgatggaagccattttattatccagcaagacttagactatgtcattgagctcaccgggctgattgtgaccctatgtacaaggtagccacatgggagaagcagatctacacatactgttaagatggtcttgtatgattctaccagctttctgacctctgacctcttggaaagagcagccccagttagtgaaaaggtttgaccctgatcaacaatgagtagaaacatcatcagtccttaatgtcttgggcgccccttggaaatcacagaaagtcagctgtcctggctatatgggactctcatcccaagacctactttgaactgagtaagaagctcacctgtgactaccgcatttgtctcaacttctccttgtgtaaactcaccccagcaacacagggcaaggatatagatgcttcagtttgttcttttgtgttaaatgtttacaaggacctcagaactaaagcctgttctctggaggaaataaagaaaatatgtttggaggtgcctgaatatgaaaaaaaaaattgagatttgtgatgtatcatatgatctatatttgagaatgttcc

SEQ ID NO: 669218 - DNA, 1061 bp, Homo sapiens
cccccaaatcattcaggagcagattgtttattttccatgtatttgtgtagttttaggagttccttctggagttgatttctagttttattccactgtggtctgaaaaaaatagttgatatgatttcaattaaaaaaaattattcggccaggtgtggtagctcatgcctgtaatcccagcactttgggaggccaaggtgggcgaatcatctgaggccaggaattcaagaccagcctggccaacatggtgaaaccacatctctattaaaaatacaaaaattagccaggtgtggtggtgcatgcctgtaatctcagctactcgggaggctgaggcaggagaattgcttgaacccgggaggcagaagttgcagtgagccaagattgtgtcactgcactccagtccrtgtgacagagcaagactgtctcaaaaaaaaaaaaaaaaaaaagcaccagttctatccctctaagtttcagagatggattcattgctaaccaaggtgatggaagccattttattatccagcaagacttagactatgtcattgagctcaccgggctgattgtgaccctatgtacaaggtagccacatgggagaagcagatctacacatactgttaagatggtcttgtatgattctaccagctttctgacctctgacctcttggaaagagcagccccagttagtgaaaaggtttgaccctgatcaacaatgagtagaaacatcatcagtccttaatgtcttgggcgccccttggaaatcacagaaagtcagctgtcctggctatatgggactctcatcccaagacctactttgaactgagtaagaagctcacctgtgactaccgcatttgtctcaacttctccttgtgtaaactcaccccagcaacacagggcaaggatatagatgcttcagtttgttcttttgtgttaaatgtttacaaggacctcagaactaaagcctgttctctggaggaaataaagaaaatatgtttggaggtgcctgaatatgaaaaaaaaaattgagatttgtgatgtatcatatgatctatatttgagaatgttcc

SEQ ID NO: 669219 - DNA, 634 bp, Homo sapiens
tgttatattcttccaaagagtgttattctttagttagttagttagtttctttgttttataaggtatttaacttcgttgacttggaattgcaaactatgtgttggtgttttaatcagctcaggtgctaaaacaaaaaccatcaacatatatatttgaaggatatgcaaacattcagtccttaacagatggtaataaaaacaatgacaatgagtgagtttgcccagaaaaagtatatgaagtaaaaagaggagagtgtctgaaacaaatccctggaagaacaggggataaccagaataacataatccatggatacttgtgaggaatgatgcaaaaaacaggatttgagtcatgcaggtgtagtcaastctaagcttctactggaaaggacacaagggagagttatgggaaagagaaggttcagtggggcaggggagttattttttaaaataaaataaactgtagaagcttagaactgtcttctgactgttaagtccagaaattttaccgtattacactaatgaacagcttgccgtgactgcaggtagatagagactttacctcttatctcgatgccagttgtctcttcctgccagtgacacattaaaatctctctgacaattatgtacatttgtat

SEQ ID NO: 669220 - DNA, 634 bp, Homo sapiens
tgttatattcttccaaagagtgttattctttagttagttagttagtttctttgttttataaggtatttaacttcgttgacttggaattgcaaactatgtgttggtgttttaatcagctcaggtgctaaaacaaaaaccatcaacatatatatttgaaggatatgcaaacattcagtccttaacagatggtaataaaaacaatgacaatgagtgagtttgcccagaaaaagtatatgaagtaaaaagaggagagtgtctgaaacaaatccctggaagaacaggggataaccagaataacataatccatggatacttgtgaggaatgatgcaaaaaacaggatttgagtcatgcaggtgtagtcaagtctaagcttctactggaaaggacacaarggagagttatgggaaagagaaggttcagtggggcaggggagttattttttaaaataaaataaactgtagaagcttagaactgtcttctgactgttaagtccagaaattttaccgtattacactaatgaacagcttgccgtgactgcaggtagatagagactttacctcttatctcgatgccagttgtctcttcctgccagtgacacattaaaatctctctgacaattatgtacatttgtat

SEQ ID NO: 669221 - DNA, 634 bp, Homo sapiens
tgttatattcttccaaagagtgttattctttagttagttagttagtttctttgttttataaggtatttaacttcgttgacttggaattgcaaactatgtgttggtgttttaatcagctcaggtgctaaaacaaaaaccatcaacatatatatttgaaggatatgcaaacattcagtccttaacagatggtaataaaaacaatgacaatgagtgagtttgcccagaaaaagtatatgaagtaaaaagaggagagtgtctgaaacaaatccctggaagaacaggggataaccagaataacataatccatggatacttgtgaggaatgatgcaaaaaacaggatttgagtcatgcaggtgtagtcaagtctaagcttctactggaaaggacacaagggagagttatgggaaagagaaggttcagtggggcaggggagttattttttaaaataaaataaactgtagaagcttagaactgtcttctgactgttaagtccagaaattttaccgtattacactaatgaacagcttgccgtgactgcaggtaratagagactttacctcttatctcgatgccagttgtctcttcctgccagtgacacattaaaatctctctgacaattatgtacatttgtat

SEQ ID NO: 669222 - DNA, 1155 bp, Homo sapiens
cacattaacagcaagggctggcacgcactcagtaaaccttaaataagcactcagtccaccactgttacctggcggactcacagtccccacgtgtgctggttagaagtggagtctcagcggcgtgctgcagccagtacctctgagatttaccccgtggggatcggcagggatggcaaatgcgagagctggttcccaacgcggctggaagcctcctgcctgctcatctccagtctccactcacagttttatttccccatgttctcctcaacttccccttccttttggaagttggacacagtcaagcagtcccgaaagtgtgctcccagcccctccttccaaggtgagctcacacctgggggaaggctcacagggccgtgccctcttcacacctcacatcacctctggcctcatttgtctcagcttctcaccttctcactctgctggctggctccctgtctgtcrcctgccctgggcatgcggcagatgggggcatgtcagccaggccagcagctccgtgggcccttcccagggctggcgcaccccccttgcctggctggccgtgtaactggagctgcaggcactggaactgagtcccccggtggccagatcgcacaggtatcagctgaccgcctgtgtcccgttttccttcacacgcggcgcagttaacaatggccgacagtcctcacagggggcccgggcccccccagggagaggccccggcatgctatcgggccacatgatcttgccccttaaaaggcctgccctccctgctgacatagcacacaaatagggcctttactcgctgccagcgaccgtctgccgccctgggagtgtgagccggaacccgggcccctgtgccagccaggcccgcaaggctcgctctctccctccatgtgaacctgctctcgatacacctgaccattcttctcccctcggcctggattacaccccgtaaaagccctttgttcctcggccctggacaaaactgaagctggcaccgcaggggtctctgctaatgtagccatctgccctgacccactcttggtggaaaaccagctccgggcagggaatcaggttgggggtggtgaacagggtgacgggggcgctgctgttgccccagataaccctggttagtctctgcggcaagatgctggg

SEQ ID NO: 669223 - DNA, 636 bp, Homo sapiens
ggaaactgaggcagggaactggcaggcaatgtgcccaggttctgcaaactactcagagttagacttggtcttcagtagcctygctccgaaaactcctgccctgtggggccgccctagagctttaacatagaatgagaggctcagaatcaccagatcagagcattgaaaaacagaatcacagaatccaggaatctgattatggaaattctcaacagtattacaggatcttgtaatgaaatcagattcttagattctctggctcatcacatttcattgtcaaaagagaccctaaatgttctatggtcacccctccttctccgcccctttgccaatgcatttccttgcaacccccagcacagggctcccccagcccgcccatcctatagcgctgtggttagaattgtcttcctgcttcctccacagccccccttccgtcttccagccccctctgatcatctctcctcttcctacttgcctgcataaattagcaccccagcctctgaacatctggtgacaaacagtggcactgattctaaaaggctgtgtatttcttgtatggatttcacagggccgtctctgagggatggatggggaaatttcatcttcaagctgtttgtttggctcagggttgctcta

SEQ ID NO: 669224 - DNA, 2400 bp, Homo sapiens
catctacttaatatcttcatttctaaattgactgcttttacctttttctcatgtttatataatggtatgcttgcatatatttcatgaatacattgtacatattatgttaatatttacacaatttaaaatatagatgtgttttattttgaagtgagaaaatgaacattaacaggcatgtttgtacagctagaatatattagtaagatactgtttttcgtcattccagagctacaactaataacacgaggttccaaagctgaagactttgtataaagtatttgggttttgttcttgtattgctttctttcaacagtttcaaaataaaatatcatayaaatattgagggaaatgttttcatatttttcaaaataggtttttattgttgaatgtacatctaccccagcccctcaaaagaaaaactgtttacatagaaattcctacacatacgtttgcgtatatgttattttaaacatctttgtggtgagaattttttccccgatattctccttctgtcaaagtcagaacaaattcagggaatttattttctggcagttgtgctccagtccttttaaaattgtacatgaacatgttttagaaacaatatggaggatgatgcatacatgtcggtcaagttcagcgctcgacattttatggaaagatttttttaaccttaccacgaaatacttaactactgtttaagtgaattgacttatttcactttagtttttgaactgtgattattggtatactgttatatcctcaacttggatttatggtaaccccttatagttcatggagaccaaaatttggggtatttataatagtcagcgcaggaatgcacatggaatatctacttgtccttttgaacctcacgagtcatccagaatgtatagacaggaaaagcatgtcttatttaaaactgtaatttatgggctcaggatctgaccgcagtcccgggagtaagcatttcaaagggggaaggcagtgtggtccctaccctgtgtgaatgtgaggatgtagacatccatcagtgcaactcgagctccatcctcctccgatttctaaggttccagttttctggagggacagtcatcatgttttgatttatctgggagaaaactgtggtgcacagcttgtgaggagggcaaggttgtgacgttcgagcttagttctggtgttattctgtctcctcttctttgtcatcagccaaaacgtggtttttaaagagagtcatgcaggttagaaataatgtcaaaaatatttaggaatttaataacctttaagtcagaaactaaaacaaatactgaaatattagctcttcctacacttcgtgttcccctttagctgcctgaaaatcaagattgctcctgctcagatcttctgagtggctaaaacttatggatatgaaaaatgagattgaatgatgactatgctttgctatcattgttacctttcctcaatactatttggcaactactgggactcttcagcacaaaaggaatagatctatgattgaccctgattttaattgtgaaattatatgattcatatattttatgaatcagaataaccttcaaataaaataaatctaagtcggttaaaatggatttcatgattttccctcagaaaatgagtaacagagtccacggcgtgcaatggtaattataaattggtgatgcttgtttgcaaattgcccactcgtgataagtcaacagccaatatttaaaactttgttcgttactggctttaccctaactttctctagtctactgtcaatatcattttaatgtaattgattgtatatagtctcaagaatggttggtgggcatgagttcctagagaactgtccaagggttgggaaaatccaaattctcttcctggttccagcactgattttgtacataaacattaggcaggttgcttaacctttttatttcaaactctctcaactctaaagtgctaataataatctcagttaccttatctttgtcacagggtgttcttttttatgaagaaaaatttgaaaatgataaaagctaagatgccttctaacttcataagcaaacctttaactaattatgtatctgaaagtcacccccacataccaactcaacttttttcctgtgaacacataaatatatttttatagaaaaacaaatctacataaaataaatctactgtttagtgagcagtatgatttgtacatgccattgaaaattattaatcagaagaaaattaagcagggtctttgctatacaaaagtgttttccactaattttgcatgcgtatttataagaaaaatgtgaatttggtggttttattctatcggtataaaggcattgatattttagatgcacccgtgtttgtaaaaatgtagagcacaatggaattatgctggaa

SEQ ID NO: 669225 - DNA, 2400 bp, Homo sapiens
catctacttaatatcttcatttctaaattgactgcttttacctttttctcatgtttatataatggtatgcttgcatatatttcatgaatacattgtacatattatgttaatatttacacaatttaaaatatagatgtgttttattttgaagtgagaaaatgaacattaacaggcatgtttgtacagctagaatatattagtaagatactgtttttcgtcattccagagctacaactaataacacgaggttccaaagctgaagactttgtataaagtatttgggttttgttcttgtattgctttctttcaacagtttcaaaataaaatatcatataaatattgagggaaatgttttcatatttttcaaaataggtttttattgttgaatgtacatctaccccagcccctcaaaagaaaaactgtttacatagaaattcctacacatacgtttgcgtatatgttattttaaacatctttgtggtgagaattttttccccgatattctccttctgtcaaagtcagaacaaattcagggaatttattttctggcagttgtgctccagtccttttaaaattgtacatgaacatgttttagaaacaatatggaggatgatgcatacatgtcggtcaagttcagcgctcgacattttatggaaagatttttttaaccttaccacgaaatacttaactactgtttaagtgaattgacttatttcactttagtttttgaactgtgattattggtatactgttatatcctcaacttggatttatggtaaccccttatagttcatggagaccaaaatttggggtatttataatagtcagcgcaggaatgcacatggaatatctacttgtccttttgaacctcacgagtcatccagaatgtatagacaggaaaagcatgtcttatttaaaactgtaatttatgggctcaggatctgaccgcagtcccgggagtaagcatttcaaagggggaaggcagtgtggtccctaccctgtgtgaatgtgaggatgtagacatccatcagtgcaactcgagctccatcctcctccgatttctaaggttccagttttctggagggacagtcatcatgttttgatttatctgggagaaaactgtggtgcacagcttgtgaggagggcaaggttgtgacgttcgagcttagttctggtgttattctgtctcctcttctttgtcatcagccaaaacgtggtttttaaagagagtcatgcaggttagaaataatgtcaaaaatatttaggaatttaataacctttaagtcagaaactaaaacaaatactgaaatattagctcttcctacacttcgtgttcccctttagctgcctgaaaatcaagattgctcctrctcagatcttctgagtggctaaaacttatggatatgaaaaatgagattgaatgatgactatgctttgctatcattgttacctttcctcaatactatttggcaactactgggactcttcagcacaaaaggaatagatctatgattgaccctgattttaattgtgaaattatatgattcatatattttatgaatcagaataaccttcaaataaaataaatctaagtcggttaaaatggatttcatgattttccctcagaaaatgagtaacagagtccacggcgtgcaatggtaattataaattggtgatgcttgtttgcaaattgcccactcgtgataagtcaacagccaatatttaaaactttgttcgttactggctttaccctaactttctctagtctactgtcaatatcattttaatgtaattgattgtatatagtctcaagaatggttggtgggcatgagttcctagagaactgtccaagggttgggaaaatccaaattctcttcctggttccagcactgattttgtacataaacattaggcaggttgcttaacctttttatttcaaactctctcaactctaaagtgctaataataatctcagttaccttatctttgtcacagggtgttcttttttatgaagaaaaatttgaaaatgataaaagctaagatgccttctaacttcataagcaaacctttaactaattatgtatctgaaagtcacccccacataccaactcaacttttttcctgtgaacacataaatatatttttatagaaaaacaaatctacataaaataaatctactgtttagtgagcagtatgatttgtacatgccattgaaaattattaatcagaagaaaattaagcagggtctttgctatacaaaagtgttttccactaattttgcatgcgtatttataagaaaaatgtgaatttggtggttttattctatcggtataaaggcattgatattttagatgcacccgtgtttgtaaaaatgtagagcacaatggaattatgctggaa

SEQ ID NO: 669226 - DNA, 2400 bp, Homo sapiens
catctacttaatatcttcatttctaaattgactgcttttacctttttctcatgtttatataatggtatgcttgcatatatttcatgaatacattgtacatattatgttaatatttacacaatttaaaatatagatgtgttttattttgaagtgagaaaatgaacattaacaggcatgtttgtacagctagaatatattagtaagatactgtttttcgtcattccagagctacaactaataacacgaggttccaaagctgaagactttgtataaagtatttgggttttgttcttgtattgctttctttcaacagtttcaaaataaaatatcatataaatattgagggaaatgttttcatatttttcaaaataggtttttattgttgaatgtacatctaccccagcccctcaaaagaaaaactgtttacatagaaattcctacacatacgtttgcgtatatgttattttaaacatctttgtggtgagaattttttccccgatattctccttctgtcaaagtcagaacaaattcagggaatttattttctggcagttgtgctccagtccttttaaaattgtacatgaacatgttttagaaacaatatggaggatgatgcatacatgtcggtcaagttcagcgctcgacattttatggaaagatttttttaaccttaccacgaaatacttaactactgtttaagtgaattgacttatttcactttagtttttgaactgtgattattggtatactgttatatcctcaacttggatttatggtaaccccttatagttcatggagaccaaaatttggggtatttataatagtcagcgcaggaatgcacatggaatatctacttgtccttttgaacctcacgagtcatccagaatgtatagacaggaaaagcatgtcttatttaaaactgtaatttatgggctcaggatctgaccgcagtcccgggagtaagcatttcaaagggggaaggcagtgtggtccctaccctgtgtgaatgtgaggatgtagacatccatcagtgcaactcgagctccatcctcctccgatttctaaggttccagttttctggagggacagtcatcatgttttgatttatctgggagaaaactgtggtgcacagcttgtgaggagggcaaggttgtgacgttcgagcttagttctggtgttattctgtctcctcttctttgtcatcagccaaaacgtggtttttaaagagagtcatgcaggttagaaataatgtcaaaaatatttaggaatttaataacctttaagtcagaaactaaaacaaatactgaaatattagctcttcctacacttcgtgttcccctttagctgcctgaaaatcaagattgctcctgctcagatcttytgagtggctaaaacttatggatatgaaaaatgagattgaatgatgactatgctttgctatcattgttacctttcctcaatactatttggcaactactgggactcttcagcacaaaaggaatagatctatgattgaccctgattttaattgtgaaattatatgattcatatattttatgaatcagaataaccttcaaataaaataaatctaagtcggttaaaatggatttcatgattttccctcagaaaatgagtaacagagtccacggcgtgcaatggtaattataaattggtgatgcttgtttgcaaattgcccactcgtgataagtcaacagccaatatttaaaactttgttcgttactggctttaccctaactttctctagtctactgtcaatatcattttaatgtaattgattgtatatagtctcaagaatggttggtgggcatgagttcctagagaactgtccaagggttgggaaaatccaaattctcttcctggttccagcactgattttgtacataaacattaggcaggttgcttaacctttttatttcaaactctctcaactctaaagtgctaataataatctcagttaccttatctttgtcacagggtgttcttttttatgaagaaaaatttgaaaatgataaaagctaagatgccttctaacttcataagcaaacctttaactaattatgtatctgaaagtcacccccacataccaactcaacttttttcctgtgaacacataaatatatttttatagaaaaacaaatctacataaaataaatctactgtttagtgagcagtatgatttgtacatgccattgaaaattattaatcagaagaaaattaagcagggtctttgctatacaaaagtgttttccactaattttgcatgcgtatttataagaaaaatgtgaatttggtggttttattctatcggtataaaggcattgatattttagatgcacccgtgtttgtaaaaatgtagagcacaatggaattatgctggaa

SEQ ID NO: 669227 - DNA, 2400 bp, Homo sapiens
catctacttaatatcttcatttctaaattgactgcttttacctttttctcatgtttatataatggtatgcttgcatatatttcatgaatacattgtacatattatgttaatatttacacaatttaaaatatagatgtgttttattttgaagtgagaaaatgaacattaacaggcatgtttgtacagctagaatatattagtaagatactgtttttcgtcattccagagctacaactaataacacgaggttccaaagctgaagactttgtataaagtatttgggttttgttcttgtattgctttctttcaacagtttcaaaataaaatatcatataaatattgagggaaatgttttcatatttttcaaaataggtttttattgttgaatgtacatctaccccagcccctcaaaagaaaaactgtttacatagaaattcctacacatacgtttgcgtatatgttattttaaacatctttgtggtgagaattttttccccgatattctccttctgtcaaagtcagaacaaattcagggaatttattttctggcagttgtgctccagtccttttaaaattgtacatgaacatgttttagaaacaatatggaggatgatgcatacatgtcggtcaagttcagcgctcgacattttatggaaagatttttttaaccttaccacgaaatacttaactactgtttaagtgaattgacttatttcactttagtttttgaactgtgattattggtatactgttatatcctcaacttggatttatggtaaccccttatagttcatggagaccaaaatttggggtatttataatagtcagcgcaggaatgcacatggaatatctacttgtccttttgaacctcacgagtcatccagaatgtatagacaggaaaagcatgtcttatttaaaactgtaatttatgggctcaggatctgaccgcagtcccgggagtaagcatttcaaagggggaaggcagtgtggtccctaccctgtgtgaatgtgaggatgtagacatccatcagtgcaactcgagctccatcctcctccgatttctaaggttccagttttctggagggacagtcatcatgttttgatttatctgggagaaaactgtggtgcacagcttgtgaggagggcaaggttgtgacgttcgagcttagttctggtgttattctgtctcctcttctttgtcatcagccaaaacgtggtttttaaagagagtcatgcaggttagaaataatgtcaaaaatatttaggaatttaataacctttaagtcagaaactaaaacaaatactgaaatattagctcttcctacacttcgtgttcccctttagctgcctgaaaatcaagattgctcctgctcagatcttctgagtggctaaaacttatggatatgaaaaatgagattgaatgatgactatgctttgctatcattgttacctttcctcaatactatttggcaactactgggactcttcagcacaaaaggaatagatctatgattgaccctgattttaattgtgaaattatatgattcatatattttatgaatcagaataaccttcaaataaaataaatctaagtcggttaaaatggatttcatgattttccctcagaaaatgagtaacagagtccacggcgtgcaatggtaattataaattggtgatgcttgtttgcaaattgcccactcgtgataagtcaacagccaatatttaaaactttgttcgttactggctttaccctaactttctctagtctactgtcaatatcattttaatgtaattgattgtatatagtctcaagaatggttggtgggcatgagttcctagagaactgtccaagggttgggaaaatccaaattctcttcctggytccagcactgattttgtacataaacattaggcaggttgcttaacctttttatttcaaactctctcaactctaaagtgctaataataatctcagttaccttatctttgtcacagggtgttcttttttatgaagaaaaatttgaaaatgataaaagctaagatgccttctaacttcataagcaaacctttaactaattatgtatctgaaagtcacccccacataccaactcaacttttttcctgtgaacacataaatatatttttatagaaaaacaaatctacataaaataaatctactgtttagtgagcagtatgatttgtacatgccattgaaaattattaatcagaagaaaattaagcagggtctttgctatacaaaagtgttttccactaattttgcatgcgtatttataagaaaaatgtgaatttggtggttttattctatcggtataaaggcattgatattttagatgcacccgtgtttgtaaaaatgtagagcacaatggaattatgctggaa

SEQ ID NO: 669228 - DNA, 2400 bp, Homo sapiens
catctacttaatatcttcatttctaaattgactgcttttacctttttctcatgtttatataatggtatgcttgcatatatttcatgaatacattgtacatattatgttaatatttacacaatttaaaatatagatgtgttttattttgaagtgagaaaatgaacattaacaggcatgtttgtacagctagaatatattagtaagatactgtttttcgtcattccagagctacaactaataacacgaggttccaaagctgaagactttgtataaagtatttgggttttgttcttgtattgctttctttcaacagtttcaaaataaaatatcatataaatattgagggaaatgttttcatatttttcaaaataggtttttattgttgaatgtacatctaccccagcccctcaaaagaaaaactgtttacatagaaattcctacacatacgtttgcgtatatgttattttaaacatctttgtggtgagaattttttccccgatattctccttctgtcaaagtcagaacaaattcagggaatttattttctggcagttgtgctccagtccttttaaaattgtacatgaacatgttttagaaacaatatggaggatgatgcatacatgtcggtcaagttcagcgctcgacattttatggaaagatttttttaaccttaccacgaaatacttaactactgtttaagtgaattgacttatttcactttagtttttgaactgtgattattggtatactgttatatcctcaacttggatttatggtaaccccttatagttcatggagaccaaaatttggggtatttataatagtcagcgcaggaatgcacatggaatatctacttgtccttttgaacctcacgagtcatccagaatgtatagacaggaaaagcatgtcttatttaaaactgtaatttatgggctcaggatctgaccgcagtcccgggagtaagcatttcaaagggggaaggcagtgtggtccctaccctgtgtgaatgtgaggatgtagacatccatcagtgcaactcgagctccatcctcctccgatttctaaggttccagttttctggagggacagtcatcatgttttgatttatctgggagaaaactgtggtgcacagcttgtgaggagggcaaggttgtgacgttcgagcttagttctggtgttattctgtctcctcttctttgtcatcagccaaaacgtggtttttaaagagagtcatgcaggttagaaataatgtcaaaaatatttaggaatttaataacctttaagtcagaaactaaaacaaatactgaaatattagctcttcctacacttcgtgttcccctttagctgcctgaaaatcaagattgctcctgctcagatcttctgagtggctaaaacttatggatatgaaaaatgagattgaatgatgactatgctttgctatcattgttacctttcctcaatactatttggcaactactgggactcttcagcacaaaaggaatagatctatgattgaccctgattttaattgtgaaattatatgattcatatattttatgaatcagaataaccttcaaataaaataaatctaagtcggttaaaatggatttcatgattttccctcagaaaatgagtaacagagtccacggcgtgcaatggtaattataaattggtgatgcttgtttgcaaattgcccactcgtgataagtcaacagccaatatttaaaactttgttcgttactggctttaccctaactttctctagtctactgtcaatatcattttaatgtaattgattgtatatagtctcaagaatggttggtgggcatgagttcctagagaactgtccaagggttgggaaaatccaaattctcttcctggttccagcactgattttgtacataaacattaggcaggttgcttaacctttttatttcaaactctctcaactctaaagtgctaataataatctcagttaccttatctttgtcacagggtgttcttttttatgaagaaaaatttgaaaatgataaaagctaagatgccttctaacttcataagcaaacctttaactaattatgtatctgaaagtcacccccacataccaactcaacttttttcctgtgaacacataaatatatttttatagaaaaacaaatctacataaaataaatctactgtttagtgagcagtatgayttgtacatgccattgaaaattattaatcagaagaaaattaagcagggtctttgctatacaaaagtgttttccactaattttgcatgcgtatttataagaaaaatgtgaatttggtggttttattctatcggtataaaggcattgatattttagatgcacccgtgtttgtaaaaatgtagagcacaatggaattatgctggaa

SEQ ID NO: 669229 - DNA, 1337 bp, Homo sapiens
gtcccagacacagcagtgttttcaaacgttatctcatttaatccttataccaaatttctgatataggtgttattgttatatctactttacagataagaaaactgaggtttggggacataaagaaaaaaattaaaaatagtcccttgaaggaaagctatgagaatgttgtgaatatttaatattttctttcttaataaagtctaatttaatatgtagatttttttgtcccttagagcctagttggtaaaatataagttagaaaacaaatctgacaaaattggcactagtatttgaccgatcacataaaaatgttatgtaacatgcagtagcatatagtagatacgcatcaacactgtacacagaatataaagttcttttattatttaatcacataatgcaaaggcaatacttttgattaattaagggtgggtccacagactgaagtttctttttgctctttagtcattaaaaatactcatgttgcatcatctaagatttctactttccttacagaagcaaaggtcttcatttacggctttagttaccttacagaagcaaagtcttttttacattcttataattgccttctccaattatttaaaactttcatatacctaaagctacaataatttgagccaaatgccttttatgasttgtttcctggaacatacacatgacttcagtttctcaatgtttgaaaagaagaaagcttaaagtttaacatctaattgtaataaatgggtttgggaacaaatgcaacttactcttaggaatggcacagatggtgactaatctgcaacgtctcttaaaggagactggagcagagggcacaccttggccactgtttacttatctttaagatcacatttctttctattgacatcagcatcacatgaaccaatgttttggatttttcttcatcattatattcctagaatattcccttactaataattcctatgtcccactggcttgcagaaatgagtagggatacttttacaattgagaagaaaacacaaagtatacttaaaaaagtcattcactgccaaagaaaattccacatatgtggcttgatttcattgggaattattaaaaaatgcaaggtatgctttccctgtattaggactgttaaatggaacactctgtgataatggaaaagttcactataggccttttctccctgttgggttgtttctaatcttatcaatttgtaagatggttttatatattctgtagctacactgttcaatatgtcctcattcattacatgtggctattgagcactttaaatacggctagtaaaactgaagaactgaatttttcattttatttaattt

SEQ ID NO: 669230 - DNA, 3595 bp, Homo sapiens
gtggatccatctgtatgtctatagattcatatatccatgtatgtaactttacaaaggtaggacaatctatagcagaattttaaatagcagttgaattccagcagaggatctattcctttggtttgctctatctaggttgctgggttttaaactttttcagagtcttttgcattagtggaaggaatttggattggatatcttccttttttgccctcgagatctataattaccttttaaaattccgctctgtgccttgtcaggctaactttttagggttgtatctgtgggctttcttaccctctggcccccgattgagttcagccaatgagagaatcaacaggagcccatcaggaaggtagagtgagattagggtatttattcacccagtttcctttcttgggaaagggagttaatagcacacaactctttctcctgctgagttttagtagccaacccctcccctctctacttcaggcctggggtagtaacttcttattttagttattattgctgcaaagcaaactatcccaaaacttagtaacttacaactacaattgtttatttgccacagaactggcaatttttgcttggtcaggaaggtttatttttgcttttcactgcttcagctggagtggattaacttggggatataagatctatttccaggaaggttccctcacatgctggcaagttagtgctgactgttggcttggagttcaacttggactgaggaccaggggcttaggttcttcttcacatgagcttctctaaagcttcttggacttcctcacagtacagtgtctaggttccaacaacaatcttccgaaagaaaaccaggcgtatacactgcatcacttttatgatacaaccatggatcattctgcatcattttctactgtaatcacaaatgctcatagattcaaaggaatgaaatagagacatcacctttcaatggcagaataccaagtgaaactraaaagagcatgtgggatgagaaatattagaaataaggcaatttatctgatggcttcttacttattagccacagagtactgtactacctttgggtagtttacttttgtaaacaatctctgtgttcaattatactcaaactaccaaatatgagtatgccatatttttttgctgggaccctgcttaatacaaaattgagagtaaataatagcagggaaggtaaaggaggagggtgccatttagcaaggtgtcaggaactagcctaaatatctactacagcaccatctttatctttaatacaaatattttgatatcacataagttttcattggaagaaagtctctttctgttaaaagaatattttaaaataccactgtttatgtccttgagcatcatgatatcagttttaaaagttgtttcctgcctactgtactaactcctaatcaaaactcttacaagtttgtgcttcttgccagggaaattcattttttcttcttggttaattacaagatatgtacaaagaacatacaatgttcagtgcaccttcagatgtgttaacgacacattatcaacactagatcatctgactcatccatattgacagtcaaggtatcattaacctcaaacttgaatgatctattcaaacagtggcttcatgcaaaaatagtttttaaaaaaatatttctataagtttttttcttccctttctctactgcacatctcttctcagatgaagccctttaggtacttattgaacctacagaaggaaataagatggcaggagttagtatatattctatttgtcagtacaagtgaaatagaatggggctatgtacttttcagaggatggaactgaattcccttggaaaataaaaagagaaaatttcagtattttggctagaggaatataagttaaagataatacctcttttctactttccttgtgacctgtaggaggttttccctatgtgaaactgaaagtggtagaattggtaaagatactgcagcagaaataaatgaagagatgcaggaataagtcaccgaaaaatttaaacctcaagtaatggtgcgtgcctttgtctaactattttaaatcagactcttgaaaaagagtcataataaattataataaagaagaacaatctacataatactcccattttacaaaaacaattttatcacaactataaatattctggcttgaaatatctggtactttccccacattgtcccttgtgatgttagagctgccccttaggtcattagatcagtcagggaccaagcaaaagacagaaatcacacacagttttattaacagagaatgtcctatgaaaaattgtaaactacgtgtaaagttgttaacttggcaatcgaaaaggcaaaaggggaaactaaggtatcatagacagatgacaaatgtgagaagcaacggacactcctagggctggggaaacagagggaataggttggaattttcagaaccttgaagcttggaagaggaggcctatagaacgaacagacaaagttctgagccaggactctgcttagctggcctagtgtctcagctcaccagaggagcctgccaaggtctggatatagacttctgacagggggatcctaaacagctggtgctaatatttccaagaaggacattacgaggttcgttctgcaggcactgagacacctgtacaacagcaacacagctgctttgagggtgaatatagtaatgtaggttagtacctcatagatacatttttaatatatattcagtacaaactttatatgtattttttatcatctgttatctatctgtctaccaacctatctattaacctatcttcctacctatataatcaatttgtcccattttcgtgatgctgaccagtaaatagttcaggagtttctgctgtgctttttctttaggttccgctcctagtgattgctataataggaaacattatgagttttgactcatttggcaagcttgcagtttcttccataaacagcctttttattctgcctaaatcaagcagatgcaaaggagatggaaaagctgcatgtattgatcatctatggtgtactagccaactgagctcggtgcttttcaaaaattatctcatatggttcttgccataatccaattatgcagatatttttgttctcacttctcattttactagtgagaaaactgaagttataaaacgtatcagaagatacacataaaacatatgaagtgggcaggatttgaagctagaactacctccttcaaaaagatttaaatcctcctgcccccaccaactttgaaaccactgctagcccatatggtgtcttgtgctaattttaaaaaaaatgtgcttactaatttaaaaaaaaatgccttctccaaggctgacaaaaccccatgggtacacaacctggcaagaggattaaatgtttgtgtgttagaaaaaggcatttctacttctgggtagatgcaactctgagtcaggtcacacagcttggagacctgagcgggggtttgatttgcatcttctttcacatcctgggtcgggcacccttgtgaacagcacagtctatacaactgaataccatggtctttttcaacatcactttcgtcaaaata

SEQ ID NO: 669231 - DNA, 3595 bp, Homo sapiens
gtggatccatctgtatgtctatagattcatatatccatgtatgtaactttacaaaggtaggacaatctatagcagaattttaaatagcagttgaattccagcagaggatctattcctttggtttgctctatctaggttgctgggttttaaactttttcagagtcttttgcattagtggaaggaatttggattggatatcttccttttttgccctcgagatctataattaccttttaaaattccgctctgtgccttgtcaggctaactttttagggttgtatctgtgggctttcttaccctctggcccccgattgagttcagccaatgagagaatcaacaggagcccatcaggaaggtagagtgagattagggtatttattcacccagtttcctttcttgggaaagggagttaatagcacacaactctttctcctgctgagttttagtagccaacccctcccctctctacttcaggcctggggtagtaacttcttattttagttattattgctgcaaagcaaactatcccaaaacttagtaacttacaactacaattgtttatttgccacagaactggcaatttttgcttggtcaggaaggtttatttttgcttttcactgcttcagctggagtggattaacttggggatataagatctatttccaggaaggttccctcacatgctggcaagttagtgctgactgttggcttggagttcaacttggactgaggaccaggggcttaggttcttcttcacatgagcttctctaaagcttcttggacttcctcacagtacagtgtctaggttccaacaacaatcttccgaaagaaaaccaggcgtatacactgcatcacttttatgatacaaccatggatcattctgcatcattttctactgtaatcacaaatgctcatagattcaaaggaatgaaatagagacatcacctttcaatggcagaataccaagtgaaactaaaaagagcatgtgggatgagaaatattagaaataaggcaatttatctgatggyttcttacttattagccacagagtactgtactacctttgggtagtttacttttgtaaacaatctctgtgttcaattatactcaaactaccaaatatgagtatgccatatttttttgctgggaccctgcttaatacaaaattgagagtaaataatagcagggaaggtaaaggaggagggtgccatttagcaaggtgtcaggaactagcctaaatatctactacagcaccatctttatctttaatacaaatattttgatatcacataagttttcattggaagaaagtctctttctgttaaaagaatattttaaaataccactgtttatgtccttgagcatcatgatatcagttttaaaagttgtttcctgcctactgtactaactcctaatcaaaactcttacaagtttgtgcttcttgccagggaaattcattttttcttcttggttaattacaagatatgtacaaagaacatacaatgttcagtgcaccttcagatgtgttaacgacacattatcaacactagatcatctgactcatccatattgacagtcaaggtatcattaacctcaaacttgaatgatctattcaaacagtggcttcatgcaaaaatagtttttaaaaaaatatttctataagtttttttcttccctttctctactgcacatctcttctcagatgaagccctttaggtacttattgaacctacagaaggaaataagatggcaggagttagtatatattctatttgtcagtacaagtgaaatagaatggggctatgtacttttcagaggatggaactgaattcccttggaaaataaaaagagaaaatttcagtattttggctagaggaatataagttaaagataatacctcttttctactttccttgtgacctgtaggaggttttccctatgtgaaactgaaagtggtagaattggtaaagatactgcagcagaaataaatgaagagatgcaggaataagtcaccgaaaaatttaaacctcaagtaatggtgcgtgcctttgtctaactattttaaatcagactcttgaaaaagagtcataataaattataataaagaagaacaatctacataatactcccattttacaaaaacaattttatcacaactataaatattctggcttgaaatatctggtactttccccacattgtcccttgtgatgttagagctgccccttaggtcattagatcagtcagggaccaagcaaaagacagaaatcacacacagttttattaacagagaatgtcctatgaaaaattgtaaactacgtgtaaagttgttaacttggcaatcgaaaaggcaaaaggggaaactaaggtatcatagacagatgacaaatgtgagaagcaacggacactcctagggctggggaaacagagggaataggttggaattttcagaaccttgaagcttggaagaggaggcctatagaacgaacagacaaagttctgagccaggactctgcttagctggcctagtgtctcagctcaccagaggagcctgccaaggtctggatatagacttctgacagggggatcctaaacagctggtgctaatatttccaagaaggacattacgaggttcgttctgcaggcactgagacacctgtacaacagcaacacagctgctttgagggtgaatatagtaatgtaggttagtacctcatagatacatttttaatatatattcagtacaaactttatatgtattttttatcatctgttatctatctgtctaccaacctatctattaacctatcttcctacctatataatcaatttgtcccattttcgtgatgctgaccagtaaatagttcaggagtttctgctgtgctttttctttaggttccgctcctagtgattgctataataggaaacattatgagttttgactcatttggcaagcttgcagtttcttccataaacagcctttttattctgcctaaatcaagcagatgcaaaggagatggaaaagctgcatgtattgatcatctatggtgtactagccaactgagctcggtgcttttcaaaaattatctcatatggttcttgccataatccaattatgcagatatttttgttctcacttctcattttactagtgagaaaactgaagttataaaacgtatcagaagatacacataaaacatatgaagtgggcaggatttgaagctagaactacctccttcaaaaagatttaaatcctcctgcccccaccaactttgaaaccactgctagcccatatggtgtcttgtgctaattttaaaaaaaatgtgcttactaatttaaaaaaaaatgccttctccaaggctgacaaaaccccatgggtacacaacctggcaagaggattaaatgtttgtgtgttagaaaaaggcatttctacttctgggtagatgcaactctgagtcaggtcacacagcttggagacctgagcgggggtttgatttgcatcttctttcacatcctgggtcgggcacccttgtgaacagcacagtctatacaactgaataccatggtctttttcaacatcactttcgtcaaaata

SEQ ID NO: 669232 - DNA, 3595 bp, Homo sapiens
gtggatccatctgtatgtctatagattcatatatccatgtatgtaactttacaaaggtaggacaatctatagcagaattttaaatagcagttgaattccagcagaggatctattcctttggtttgctctatctaggttgctgggttttaaactttttcagagtcttttgcattagtggaaggaatttggattggatatcttccttttttgccctcgagatctataattaccttttaaaattccgctctgtgccttgtcaggctaactttttagggttgtatctgtgggctttcttaccctctggcccccgattgagttcagccaatgagagaatcaacaggagcccatcaggaaggtagagtgagattagggtatttattcacccagtttcctttcttgggaaagggagttaatagcacacaactctttctcctgctgagttttagtagccaacccctcccctctctacttcaggcctggggtagtaacttcttattttagttattattgctgcaaagcaaactatcccaaaacttagtaacttacaactacaattgtttatttgccacagaactggcaatttttgcttggtcaggaaggtttatttttgcttttcactgcttcagctggagtggattaacttggggatataagatctatttccaggaaggttccctcacatgctggcaagttagtgctgactgttggcttggagttcaacttggactgaggaccaggggcttaggttcttcttcacatgagcttctctaaagcttcttggacttcctcacagtacagtgtctaggttccaacaacaatcttccgaaagaaaaccaggcgtatacactgcatcacttttatgatacaaccatggatcattctgcatcattttctactgtaatcacaaatgctcatagattcaaaggaatgaaatagagacatcacctttcaatggcagaataccaagtgaaactaaaaagagcatgtgggatgagaaatattagaaataaggcaatttatctgatggcttcttacttattagccacagagtactgtactacctttgggtagtttacttttgtaaacaatctctgtrttcaattatactcaaactaccaaatatgagtatgccatatttttttgctgggaccctgcttaatacaaaattgagagtaaataatagcagggaaggtaaaggaggagggtgccatttagcaaggtgtcaggaactagcctaaatatctactacagcaccatctttatctttaatacaaatattttgatatcacataagttttcattggaagaaagtctctttctgttaaaagaatattttaaaataccactgtttatgtccttgagcatcatgatatcagttttaaaagttgtttcctgcctactgtactaactcctaatcaaaactcttacaagtttgtgcttcttgccagggaaattcattttttcttcttggttaattacaagatatgtacaaagaacatacaatgttcagtgcaccttcagatgtgttaacgacacattatcaacactagatcatctgactcatccatattgacagtcaaggtatcattaacctcaaacttgaatgatctattcaaacagtggcttcatgcaaaaatagtttttaaaaaaatatttctataagtttttttcttccctttctctactgcacatctcttctcagatgaagccctttaggtacttattgaacctacagaaggaaataagatggcaggagttagtatatattctatttgtcagtacaagtgaaatagaatggggctatgtacttttcagaggatggaactgaattcccttggaaaataaaaagagaaaatttcagtattttggctagaggaatataagttaaagataatacctcttttctactttccttgtgacctgtaggaggttttccctatgtgaaactgaaagtggtagaattggtaaagatactgcagcagaaataaatgaagagatgcaggaataagtcaccgaaaaatttaaacctcaagtaatggtgcgtgcctttgtctaactattttaaatcagactcttgaaaaagagtcataataaattataataaagaagaacaatctacataatactcccattttacaaaaacaattttatcacaactataaatattctggcttgaaatatctggtactttccccacattgtcccttgtgatgttagagctgccccttaggtcattagatcagtcagggaccaagcaaaagacagaaatcacacacagttttattaacagagaatgtcctatgaaaaattgtaaactacgtgtaaagttgttaacttggcaatcgaaaaggcaaaaggggaaactaaggtatcatagacagatgacaaatgtgagaagcaacggacactcctagggctggggaaacagagggaataggttggaattttcagaaccttgaagcttggaagaggaggcctatagaacgaacagacaaagttctgagccaggactctgcttagctggcctagtgtctcagctcaccagaggagcctgccaaggtctggatatagacttctgacagggggatcctaaacagctggtgctaatatttccaagaaggacattacgaggttcgttctgcaggcactgagacacctgtacaacagcaacacagctgctttgagggtgaatatagtaatgtaggttagtacctcatagatacatttttaatatatattcagtacaaactttatatgtattttttatcatctgttatctatctgtctaccaacctatctattaacctatcttcctacctatataatcaatttgtcccattttcgtgatgctgaccagtaaatagttcaggagtttctgctgtgctttttctttaggttccgctcctagtgattgctataataggaaacattatgagttttgactcatttggcaagcttgcagtttcttccataaacagcctttttattctgcctaaatcaagcagatgcaaaggagatggaaaagctgcatgtattgatcatctatggtgtactagccaactgagctcggtgcttttcaaaaattatctcatatggttcttgccataatccaattatgcagatatttttgttctcacttctcattttactagtgagaaaactgaagttataaaacgtatcagaagatacacataaaacatatgaagtgggcaggatttgaagctagaactacctccttcaaaaagatttaaatcctcctgcccccaccaactttgaaaccactgctagcccatatggtgtcttgtgctaattttaaaaaaaatgtgcttactaatttaaaaaaaaatgccttctccaaggctgacaaaaccccatgggtacacaacctggcaagaggattaaatgtttgtgtgttagaaaaaggcatttctacttctgggtagatgcaactctgagtcaggtcacacagcttggagacctgagcgggggtttgatttgcatcttctttcacatcctgggtcgggcacccttgtgaacagcacagtctatacaactgaataccatggtctttttcaacatcactttcgtcaaaata

SEQ ID NO: 669233 - DNA, 3595 bp, Homo sapiens
gtggatccatctgtatgtctatagattcatatatccatgtatgtaactttacaaaggtaggacaatctatagcagaattttaaatagcagttgaattccagcagaggatctattcctttggtttgctctatctaggttgctgggttttaaactttttcagagtcttttgcattagtggaaggaatttggattggatatcttccttttttgccctcgagatctataattaccttttaaaattccgctctgtgccttgtcaggctaactttttagggttgtatctgtgggctttcttaccctctggcccccgattgagttcagccaatgagagaatcaacaggagcccatcaggaaggtagagtgagattagggtatttattcacccagtttcctttcttgggaaagggagttaatagcacacaactctttctcctgctgagttttagtagccaacccctcccctctctacttcaggcctggggtagtaacttcttattttagttattattgctgcaaagcaaactatcccaaaacttagtaacttacaactacaattgtttatttgccacagaactggcaatttttgcttggtcaggaaggtttatttttgcttttcactgcttcagctggagtggattaacttggggatataagatctatttccaggaaggttccctcacatgctggcaagttagtgctgactgttggcttggagttcaacttggactgaggaccaggggcttaggttcttcttcacatgagcttctctaaagcttcttggacttcctcacagtacagtgtctaggttccaacaacaatcttccgaaagaaaaccaggcgtatacactgcatcacttttatgatacaaccatggatcattctgcatcattttctactgtaatcacaaatgctcatagattcaaaggaatgaaatagagacatcacctttcaatggcagaataccaagtgaaactaaaaagagcatgtgggatgagaaatattagaaataaggcaatttatctgatggcttcttacttattagccacagagtactgtactacctttgggtagtttacttttgtaaacaatctctgtgttcaattatactcaaactaccaaatatgagtatgccatatttttttgctgggaccctgcttaatacaaaattgagagtaaataatagcagggaaggtaaaggaggagggtgccatttagcaaggtgtcaggaactagcctaaatatctactacagcaccatctttatctttaatacaaatattttgatatcacataagttttcattggaagaaagtctctttctgttaaaagaatattttaaaataccactgtttatgtccttgagcatcatgatatcagttttaaaagttgtttcctgcctactgtactaactcctaatcaaaactcttacaagtytgtgcttcttgccagggaaattcattttttcttcttggttaattacaagatatgtacaaagaacatacaatgttcagtgcaccttcagatgtgttaacgacacattatcaacactagatcatctgactcatccatattgacagtcaaggtatcattaacctcaaacttgaatgatctattcaaacagtggcttcatgcaaaaatagtttttaaaaaaatatttctataagtttttttcttccctttctctactgcacatctcttctcagatgaagccctttaggtacttattgaacctacagaaggaaataagatggcaggagttagtatatattctatttgtcagtacaagtgaaatagaatggggctatgtacttttcagaggatggaactgaattcccttggaaaataaaaagagaaaatttcagtattttggctagaggaatataagttaaagataatacctcttttctactttccttgtgacctgtaggaggttttccctatgtgaaactgaaagtggtagaattggtaaagatactgcagcagaaataaatgaagagatgcaggaataagtcaccgaaaaatttaaacctcaagtaatggtgcgtgcctttgtctaactattttaaatcagactcttgaaaaagagtcataataaattataataaagaagaacaatctacataatactcccattttacaaaaacaattttatcacaactataaatattctggcttgaaatatctggtactttccccacattgtcccttgtgatgttagagctgccccttaggtcattagatcagtcagggaccaagcaaaagacagaaatcacacacagttttattaacagagaatgtcctatgaaaaattgtaaactacgtgtaaagttgttaacttggcaatcgaaaaggcaaaaggggaaactaaggtatcatagacagatgacaaatgtgagaagcaacggacactcctagggctggggaaacagagggaataggttggaattttcagaaccttgaagcttggaagaggaggcctatagaacgaacagacaaagttctgagccaggactctgcttagctggcctagtgtctcagctcaccagaggagcctgccaaggtctggatatagacttctgacagggggatcctaaacagctggtgctaatatttccaagaaggacattacgaggttcgttctgcaggcactgagacacctgtacaacagcaacacagctgctttgagggtgaatatagtaatgtaggttagtacctcatagatacatttttaatatatattcagtacaaactttatatgtattttttatcatctgttatctatctgtctaccaacctatctattaacctatcttcctacctatataatcaatttgtcccattttcgtgatgctgaccagtaaatagttcaggagtttctgctgtgctttttctttaggttccgctcctagtgattgctataataggaaacattatgagttttgactcatttggcaagcttgcagtttcttccataaacagcctttttattctgcctaaatcaagcagatgcaaaggagatggaaaagctgcatgtattgatcatctatggtgtactagccaactgagctcggtgcttttcaaaaattatctcatatggttcttgccataatccaattatgcagatatttttgttctcacttctcattttactagtgagaaaactgaagttataaaacgtatcagaagatacacataaaacatatgaagtgggcaggatttgaagctagaactacctccttcaaaaagatttaaatcctcctgcccccaccaactttgaaaccactgctagcccatatggtgtcttgtgctaattttaaaaaaaatgtgcttactaatttaaaaaaaaatgccttctccaaggctgacaaaaccccatgggtacacaacctggcaagaggattaaatgtttgtgtgttagaaaaaggcatttctacttctgggtagatgcaactctgagtcaggtcacacagcttggagacctgagcgggggtttgatttgcatcttctttcacatcctgggtcgggcacccttgtgaacagcacagtctatacaactgaataccatggtctttttcaacatcactttcgtcaaaata

SEQ ID NO: 669234 - DNA, 3595 bp, Homo sapiens
gtggatccatctgtatgtctatagattcatatatccatgtatgtaactttacaaaggtaggacaatctatagcagaattttaaatagcagttgaattccagcagaggatctattcctttggtttgctctatctaggttgctgggttttaaactttttcagagtcttttgcattagtggaaggaatttggattggatatcttccttttttgccctcgagatctataattaccttttaaaattccgctctgtgccttgtcaggctaactttttagggttgtatctgtgggctttcttaccctctggcccccgattgagttcagccaatgagagaatcaacaggagcccatcaggaaggtagagtgagattagggtatttattcacccagtttcctttcttgggaaagggagttaatagcacacaactctttctcctgctgagttttagtagccaacccctcccctctctacttcaggcctggggtagtaacttcttattttagttattattgctgcaaagcaaactatcccaaaacttagtaacttacaactacaattgtttatttgccacagaactggcaatttttgcttggtcaggaaggtttatttttgcttttcactgcttcagctggagtggattaacttggggatataagatctatttccaggaaggttccctcacatgctggcaagttagtgctgactgttggcttggagttcaacttggactgaggaccaggggcttaggttcttcttcacatgagcttctctaaagcttcttggacttcctcacagtacagtgtctaggttccaacaacaatcttccgaaagaaaaccaggcgtatacactgcatcacttttatgatacaaccatggatcattctgcatcattttctactgtaatcacaaatgctcatagattcaaaggaatgaaatagagacatcacctttcaatggcagaataccaagtgaaactaaaaagagcatgtgggatgagaaatattagaaataaggcaatttatctgatggcttcttacttattagccacagagtactgtactacctttgggtagtttacttttgtaaacaatctctgtgttcaattatactcaaactaccaaatatgagtatgccatatttttttgctgggaccctgcttaatacaaaattgagagtaaataatagcagggaaggtaaaggaggagggtgccatttagcaaggtgtcaggaactagcctaaatatctactacagcaccatctttatctttaatacaaatattttgatatcacataagttttcattggaagaaagtctctttctgttaaaagaatattttaaaataccactgtttatgtccttgagcatcatgatatcagttttaaaagttgtttcctgcctactgtactaactcctaatcaaaactcttacaagtttgtgcttcttgccagggaaattcattttttcttcttggttaattacaagatatgtacaaagaacatacaatgttcagtgcaccttcagatgtgttaacgacacattatcaacactagatcatctgactcatccatattgacagtcaaggtatcattaacctcaaacttgaatgatctattcaaacagtggcttcatgcaaaaatagtttttaaaaaaatatttctataagtttttttcttccctttctctactgcacatctcttctcagatgaagccctttaggtacttattgaacctacagaaggaaataagatggcaggagttagtatatattctatttgtcagtacaagtgaaatagaatggggctatgtacttttcagaggatggaactgaattcccttggaaaataaaaagagaaaatttcagtattttggctagaggaatataagttaaagataatacctcttttctactttccttgtgacctgtaggaggttttccctatgtgaaactgaaagtggtagaattggtaaagatactgyagcagaaataaatgaagagatgcaggaataagtcaccgaaaaatttaaacctcaagtaatggtgcgtgcctttgtctaactattttaaatcagactcttgaaaaagagtcataataaattataataaagaagaacaatctacataatactcccattttacaaaaacaattttatcacaactataaatattctggcttgaaatatctggtactttccccacattgtcccttgtgatgttagagctgccccttaggtcattagatcagtcagggaccaagcaaaagacagaaatcacacacagttttattaacagagaatgtcctatgaaaaattgtaaactacgtgtaaagttgttaacttggcaatcgaaaaggcaaaaggggaaactaaggtatcatagacagatgacaaatgtgagaagcaacggacactcctagggctggggaaacagagggaataggttggaattttcagaaccttgaagcttggaagaggaggcctatagaacgaacagacaaagttctgagccaggactctgcttagctggcctagtgtctcagctcaccagaggagcctgccaaggtctggatatagacttctgacagggggatcctaaacagctggtgctaatatttccaagaaggacattacgaggttcgttctgcaggcactgagacacctgtacaacagcaacacagctgctttgagggtgaatatagtaatgtaggttagtacctcatagatacatttttaatatatattcagtacaaactttatatgtattttttatcatctgttatctatctgtctaccaacctatctattaacctatcttcctacctatataatcaatttgtcccattttcgtgatgctgaccagtaaatagttcaggagtttctgctgtgctttttctttaggttccgctcctagtgattgctataataggaaacattatgagttttgactcatttggcaagcttgcagtttcttccataaacagcctttttattctgcctaaatcaagcagatgcaaaggagatggaaaagctgcatgtattgatcatctatggtgtactagccaactgagctcggtgcttttcaaaaattatctcatatggttcttgccataatccaattatgcagatatttttgttctcacttctcattttactagtgagaaaactgaagttataaaacgtatcagaagatacacataaaacatatgaagtgggcaggatttgaagctagaactacctccttcaaaaagatttaaatcctcctgcccccaccaactttgaaaccactgctagcccatatggtgtcttgtgctaattttaaaaaaaatgtgcttactaatttaaaaaaaaatgccttctccaaggctgacaaaaccccatgggtacacaacctggcaagaggattaaatgtttgtgtgttagaaaaaggcatttctacttctgggtagatgcaactctgagtcaggtcacacagcttggagacctgagcgggggtttgatttgcatcttctttcacatcctgggtcgggcacccttgtgaacagcacagtctatacaactgaataccatggtctttttcaacatcactttcgtcaaaata

SEQ ID NO: 669235 - DNA, 3595 bp, Homo sapiens
gtggatccatctgtatgtctatagattcatatatccatgtatgtaactttacaaaggtaggacaatctatagcagaattttaaatagcagttgaattccagcagaggatctattcctttggtttgctctatctaggttgctgggttttaaactttttcagagtcttttgcattagtggaaggaatttggattggatatcttccttttttgccctcgagatctataattaccttttaaaattccgctctgtgccttgtcaggctaactttttagggttgtatctgtgggctttcttaccctctggcccccgattgagttcagccaatgagagaatcaacaggagcccatcaggaaggtagagtgagattagggtatttattcacccagtttcctttcttgggaaagggagttaatagcacacaactctttctcctgctgagttttagtagccaacccctcccctctctacttcaggcctggggtagtaacttcttattttagttattattgctgcaaagcaaactatcccaaaacttagtaacttacaactacaattgtttatttgccacagaactggcaatttttgcttggtcaggaaggtttatttttgcttttcactgcttcagctggagtggattaacttggggatataagatctatttccaggaaggttccctcacatgctggcaagttagtgctgactgttggcttggagttcaacttggactgaggaccaggggcttaggttcttcttcacatgagcttctctaaagcttcttggacttcctcacagtacagtgtctaggttccaacaacaatcttccgaaagaaaaccaggcgtatacactgcatcacttttatgatacaaccatggatcattctgcatcattttctactgtaatcacaaatgctcatagattcaaaggaatgaaatagagacatcacctttcaatggcagaataccaagtgaaactaaaaagagcatgtgggatgagaaatattagaaataaggcaatttatctgatggcttcttacttattagccacagagtactgtactacctttgggtagtttacttttgtaaacaatctctgtgttcaattatactcaaactaccaaatatgagtatgccatatttttttgctgggaccctgcttaatacaaaattgagagtaaataatagcagggaaggtaaaggaggagggtgccatttagcaaggtgtcaggaactagcctaaatatctactacagcaccatctttatctttaatacaaatattttgatatcacataagttttcattggaagaaagtctctttctgttaaaagaatattttaaaataccactgtttatgtccttgagcatcatgatatcagttttaaaagttgtttcctgcctactgtactaactcctaatcaaaactcttacaagtttgtgcttcttgccagggaaattcattttttcttcttggttaattacaagatatgtacaaagaacatacaatgttcagtgcaccttcagatgtgttaacgacacattatcaacactagatcatctgactcatccatattgacagtcaaggtatcattaacctcaaacttgaatgatctattcaaacagtggcttcatgcaaaaatagtttttaaaaaaatatttctataagtttttttcttccctttctctactgcacatctcttctcagatgaagccctttaggtacttattgaacctacagaaggaaataagatggcaggagttagtatatattctatttgtcagtacaagtgaaatagaatggggctatgtacttttcagaggatggaactgaattcccttggaaaataaaaagagaaaatttcagtattttggctagaggaatataagttaaagataatacctcttttctactttccttgtgacctgtaggaggttttccctatgtgaaactgaaagtggtagaattggtaaagatactgcagcagaaataaatgaagagatgcaggaataagtcaccgaaaaatttaaacctcaagtaatggtgcgtgcctttgtctaactattttaaatcagactcttgaaaaagagtcataataaattataataaagaagaacaatctacataatactcccattttacaraaacaattttatcacaactataaatattctggcttgaaatatctggtactttccccacattgtcccttgtgatgttagagctgccccttaggtcattagatcagtcagggaccaagcaaaagacagaaatcacacacagttttattaacagagaatgtcctatgaaaaattgtaaactacgtgtaaagttgttaacttggcaatcgaaaaggcaaaaggggaaactaaggtatcatagacagatgacaaatgtgagaagcaacggacactcctagggctggggaaacagagggaataggttggaattttcagaaccttgaagcttggaagaggaggcctatagaacgaacagacaaagttctgagccaggactctgcttagctggcctagtgtctcagctcaccagaggagcctgccaaggtctggatatagacttctgacagggggatcctaaacagctggtgctaatatttccaagaaggacattacgaggttcgttctgcaggcactgagacacctgtacaacagcaacacagctgctttgagggtgaatatagtaatgtaggttagtacctcatagatacatttttaatatatattcagtacaaactttatatgtattttttatcatctgttatctatctgtctaccaacctatctattaacctatcttcctacctatataatcaatttgtcccattttcgtgatgctgaccagtaaatagttcaggagtttctgctgtgctttttctttaggttccgctcctagtgattgctataataggaaacattatgagttttgactcatttggcaagcttgcagtttcttccataaacagcctttttattctgcctaaatcaagcagatgcaaaggagatggaaaagctgcatgtattgatcatctatggtgtactagccaactgagctcggtgcttttcaaaaattatctcatatggttcttgccataatccaattatgcagatatttttgttctcacttctcattttactagtgagaaaactgaagttataaaacgtatcagaagatacacataaaacatatgaagtgggcaggatttgaagctagaactacctccttcaaaaagatttaaatcctcctgcccccaccaactttgaaaccactgctagcccatatggtgtcttgtgctaattttaaaaaaaatgtgcttactaatttaaaaaaaaatgccttctccaaggctgacaaaaccccatgggtacacaacctggcaagaggattaaatgtttgtgtgttagaaaaaggcatttctacttctgggtagatgcaactctgagtcaggtcacacagcttggagacctgagcgggggtttgatttgcatcttctttcacatcctgggtcgggcacccttgtgaacagcacagtctatacaactgaataccatggtctttttcaacatcactttcgtcaaaata

SEQ ID NO: 669236 - DNA, 605 bp, Homo sapiens
tggagtataatgttaaagatcttgaagaggtgataacgtctcaaagacaaatgttgtaacttgatcctcttaatgctcaggaatttaaaaagaaatctcagggttttagaaacatttttttttttagaattaaatcaataatgtcaaagatgagtgccaaccagtagtaatgatttagaaattatatggcagttcatcatttagaagttgttatagttggtgaaacgttgctaattattttaagatagtggttcaagcactaataaatttcatatctatatatacatatatatgcacacacacattaataaatggctaatatctaatcaagacaaggacaaattataatttattacaaaaagactgcttcacaattttcaggcagtttgaagtatctggcagaaaaagtaaattgaaatcattgggacgttgatttttaaattacctagaagcaatcccaatgytttatgtaatactaaaatttctcctctctcttttctttatctctctctcccctgaaaataatcattttttttccagtgccagttcagatcttggcaacagttgttttgaaaaagtacctgaacaaaatacattttataaag

SEQ ID NO: 669237 - DNA, 665 bp, Homo sapiens
ttccagcaagtagatatgctgatatattatttcagttatttgttgaaatgtatttattggataagtaaattagaccataacatatgtgayaattaaaaaaaaatcactccggatcttttaccatgttccttaaataacgctgtccaaatatgcaagggttcgtctttagttgatagttttttcttcactgatttgatgtttcggtttcatcgaaacagttcttcccataggaatcaggaaagcagctcatttattttgataggaacaactttgcagtcttgttctgtttacctgtttcctaaccttgctctgacatcccaagccctctacctgccatccatttggcaagtattcatttgaaaattaatccataggaaccaatttgcattgaaagtgaggcagactgatgtactagtaagatcattgggctaggttaaaaaaaaggtgtattgtcaacgtcactactacctcactgagagaccatgggcatcggcttttattcattttctcatctctttctgttatctgtggaataagaaatctagattatttgatgtctaaagtttccttaaccctgtaatattcttgtgaaatacgagaattttaagaactgattgtctgttttccacatttactttaatgtaaacatgatgtttaagtcaatg

SEQ ID NO: 669238 - DNA, 665 bp, Homo sapiens
ttccagcaagtagatatgctgatatattatttcagttatttgttgaaatgtatttattggataagtaaattagaccataacatatgtgacaattaaaaaaaaatcactccggatcttttaccatgttccttaartaacgctgtccaaatatgcaagggttcgtctttagttgatagttttttcttcactgatttgatgtttcggtttcatcgaaacagttcttcccataggaatcaggaaagcagctcatttattttgataggaacaactttgcagtcttgttctgtttacctgtttcctaaccttgctctgacatcccaagccctctacctgccatccatttggcaagtattcatttgaaaattaatccataggaaccaatttgcattgaaagtgaggcagactgatgtactagtaagatcattgggctaggttaaaaaaaaggtgtattgtcaacgtcactactacctcactgagagaccatgggcatcggcttttattcattttctcatctctttctgttatctgtggaataagaaatctagattatttgatgtctaaagtttccttaaccctgtaatattcttgtgaaatacgagaattttaagaactgattgtctgttttccacatttactttaatgtaaacatgatgtttaagtcaatg

SEQ ID NO: 669239 - DNA, 623 bp, Homo sapiens
ggatggttttgatctgctgacctcgtgatccgcccgcctcgcccttccaaagtgctgggattagaggcgtgacccacagcggccggcctatttgctaggattttgtgcaattaaaccatcatcatcaccttgtgtctttttgtgtgtgttttgcttattggcttttctttcatatatctgccacatagaaagggtcaggatatctgatacaatttttgctttgtcttagccaaagacaaataagaatcattattgcactgtcaaaaacattggctaacacataattagttactacattttagcattggccagaattgcatagagatggaaaaaagataatgtattcatctcatctctttaaacacaaatatataaaacccttgagacttctgaatcagaaatgtttctgattcagtataacagtttgtgatgtatggctgaatgtcatttgcctagtcacagcacaggggcacgtaggtaataaaaatttcgtcagcatgtttgcgaaatgtaaatgcttaggcaatttkttgtagccacaacgtgtgctgtagatagaatgcaaacttgaataaacacgattaatgaagtgaagggtaaccattgctttatcattcttcctg

SEQ ID NO: 669240 - DNA, 1438 bp, Homo sapiens
agtgggggtcactgccatccccacagacacctagagcagtgcctgtcacataagctccacaaacatttcttggatgagtgaatgagtctggaaattacttaagaaatggcttaattcgaatgcctcacggtgtcagggaaaagcrgagacccagagaagggataagacttgaccccagtctcatagcctgttaggggttgcaaagctgggagaagctctcaggccagagctccaggtcctgcatggtctgagcgactctcataccctccagacgatgtacttgtcagtcatgctctgttacctatgggaccccggagctgtgcagccccaggctaggcaggggtgggacctcgcttgctttttcccttgatttaaaaaaccaaaaatcttataaatttcctgataaataattcattaactcaaagggatccctcaaaatatgagttccttgactgaggaaggtcagaaaatttttcttcctgagaacttgtaaggtgtggagtgggagtggggcgggaagtgtttatcaggacccctccctaggatacctgctgctgtgccagatccttccatggatcactcacgcagtcttcacttccaggctgcagtggagcatgataacaagagctcacagctaatgaacagtgtgccaaggctgctgtcagtgcttttagatatccgaccattgagcctgtccagcagccctatgacctggatggcttctgtctcctccccacgttacatgcagatgagagacctgaggcagctatgctagcaaagaaatgctcctgttccagatgtttagaacacatcggtcaacaaaacagctggcaatcctggtccttatgagaggaaaacgggcaacaggcaccacaaatgagtaaatgatatgggtgctgggagacagtgagtgccacacaaaaaagaaaccccaggcaagacatggcagggtgctgggggtggtgggtaagttgtaatattagctagcgtgtccagggcaggcctcaccgagaaggtgggatttgaggaaagacttgaaggggagctggactgaggtctgtgggaagggccctccaggcagaaggaagagccagggcaaagcctccatggctggagtgtttctgaggagcaacgaagaggccagggtggctgaagcacagagtgcagggcagggtgggcgagatggggcagagaggcagtggggccagaccccacagggccatgtggcctttgtaaggacgctgattcgagtgttcacccgacctgtgcatgttcacaggtgctcacagcctcaggtcaatccttttccctgctcacatgcccagggctgcttccacgctggccagtggacgcacagtcacactcacatacgtacctacacgcacacactggccaacggccactcactcacacagcccccctactcctaccgtgcccg

SEQ ID NO: 669241 - DNA, 1438 bp, Homo sapiens
agtgggggtcactgccatccccacagacacctagagcagtgcctgtcacataagctccacaaacatttcttggatgagtgaatgagtctggaaattacttaagaaatggcttaattcgaatgcctcacggtgtcagggaaaagcagagacccagagaagggataagacttgaccccagtctcatagcctgttaggggttgcaaagctgggagaagctctcaggccagagctccaggtcctgcatggtctgagcgactctcataccctccagacgatgtacttgtcagtcatgctctgttacctatgggaccccggagctgtgcagccccaggctaggcaggggtgggacctcgcttgctttttcccttgatttaaaaaaccaaaaatcttataaatttcctgataaataattcattaactcaaagggatccctcaaaatatgagttccttgactgaggaaggtcagaaaatttttcttcctgagaacttgtaaggtgtggagtgggagtggggcgggaagtgtttatcaggacccctccctaggatacctgctgctgtgccagatccttccatggatcactcaygcagtcttcacttccaggctgcagtggagcatgataacaagagctcacagctaatgaacagtgtgccaaggctgctgtcagtgcttttagatatccgaccattgagcctgtccagcagccctatgacctggatggcttctgtctcctccccacgttacatgcagatgagagacctgaggcagctatgctagcaaagaaatgctcctgttccagatgtttagaacacatcggtcaacaaaacagctggcaatcctggtccttatgagaggaaaacgggcaacaggcaccacaaatgagtaaatgatatgggtgctgggagacagtgagtgccacacaaaaaagaaaccccaggcaagacatggcagggtgctgggggtggtgggtaagttgtaatattagctagcgtgtccagggcaggcctcaccgagaaggtgggatttgaggaaagacttgaaggggagctggactgaggtctgtgggaagggccctccaggcagaaggaagagccagggcaaagcctccatggctggagtgtttctgaggagcaacgaagaggccagggtggctgaagcacagagtgcagggcagggtgggcgagatggggcagagaggcagtggggccagaccccacagggccatgtggcctttgtaaggacgctgattcgagtgttcacccgacctgtgcatgttcacaggtgctcacagcctcaggtcaatccttttccctgctcacatgcccagggctgcttccacgctggccagtggacgcacagtcacactcacatacgtacctacacgcacacactggccaacggccactcactcacacagcccccctactcctaccgtgcccg

SEQ ID NO: 669242 - DNA, 678 bp, Homo sapiens
tggcaggccctaactacagctgcacagattaggtggctctctccccaaggaaggcaagggcaccccatgtccattccttcaagagctgagtctttttcctagcttcaatatcctcaaatgtaaaatggttctggtatctacctcaaaagagtattgtgtttgtaaattaaatagctctatatagttatacaaataacaaataacctgtaggacttgataagtcaccaactcatgatgattaatgtaatggatcactgataaaactgttataaattacaagacattaatggccattacayggatattaggtctggagtctcagagctggaaaataccagaaatctccaaataagccttcctcagctcatcaacatccctgccaggtggtgttattctgattacaaattattccttagttttaattcataaatcctctaaggaaaagaaaacatgatattctcatgccttgtgcttcaaggagcttagtacttgactgtggctccaggtttgtacatattccacgttcctgctccttaaaagaccccagagccataacagaaaactgccagtatctgctgtggtcaccactgaagtagaaacatagccagccagggtccttgctgggaaatattcgggaaatcttaggtgtacgttgttctcttgccaaatcaagtcggg

SEQ ID NO: 669243 - DNA, 629 bp, Homo sapiens
gtaaccaataaaattccacgacctcaatactaatcactctttactcccatccacatcctcccayttgacctgacattgaggtggatatatttgttcctttagttcttgccctaatataaggtaaatgctcagagtaaactgccagatatctactgaaccaaccggtatcaggtccctgcctaagataacaagggcatccttcaaagggggaagtgggagggccaaggatatcccttataacagccctccccatggtccatctccctctagcacaaacaccaattgagctggtttgggggaaagaataaaatatcaaggtcttctgaatcagcacaccaatcagcccaagcaaaaaagaatgacatagagcctttattaaactggttctgaggtatgtgggactagcctggctggctgaccaggcttcttgagccccacaggcctctttcacagaaagggagtttggatcaacaagaccatgtacaaaagggggataatatacctacgtgaggagccaagtttccatgttgatggtaaatggaaaaacttttgagtcagagctgagctctgggacaaaaagggaaaagaagagggatgaagggaaggggcccaattcctcttgactgatt

SEQ ID NO: 669244 - DNA, 629 bp, Homo sapiens
gtaaccaataaaattccacgacctcaatactaatcactctttactcccatccacatcctcccatttgacctgacattgaggtggatrtatttgttcctttagttcttgccctaatataaggtaaatgctcagagtaaactgccagatatctactgaaccaaccggtatcaggtccctgcctaagataacaagggcatccttcaaagggggaagtgggagggccaaggatatcccttataacagccctccccatggtccatctccctctagcacaaacaccaattgagctggtttgggggaaagaataaaatatcaaggtcttctgaatcagcacaccaatcagcccaagcaaaaaagaatgacatagagcctttattaaactggttctgaggtatgtgggactagcctggctggctgaccaggcttcttgagccccacaggcctctttcacagaaagggagtttggatcaacaagaccatgtacaaaagggggataatatacctacgtgaggagccaagtttccatgttgatggtaaatggaaaaacttttgagtcagagctgagctctgggacaaaaagggaaaagaagagggatgaagggaaggggcccaattcctcttgactgatt

SEQ ID NO: 669245 - DNA, 2830 bp, Homo sapiens
ataaaataacctcctaaatcatttgggggtatccccatcattggtgcgtgtgtctgcgtgtgtcaaactttaatgattatttattcagaccctggaaaaccacactataaaatagggcactggatcacaagttcgtttggttaaaaaaaaaaaaaaaaaaaagtgggggcggggggcagagaagaagtttaacttggatgatttccatgcccattccagctgtaacattctatgactgtgacccagcctttgttctcttttctcactctcctactagacatttcaatgaaaagttaggcaggaaaaaggaaaggaatcccaagttgctgccagctctgatgagagatcaggttgggggagagattaggtggttactgaattgaggtgtgggcctcccctgaccatgtcagtgatccacaacccacctcacttcttggggcttaagctaaaagcagcttctgaagagatgttaatgtcctgtaatcactagaggagaaaattcattctccttccataacattacttagtaaaggaaaagcggtggtgcaatcaaattcacaaataccaatggggtctctaaaatgtagaatgcagcttgctgggtgctggtcagttttctaaatgggaccagaaatggctttcctaagaccataaatgaactctccagccacacatacattcaaatgcattccattagacattgagctcctcaagagcaggaactgctttatctccacagtccagctcagggttggctcaagtctgaagctcagtaaatgtctgtcaaatagaaaagaaaggatgagccttcggtcatcagctacatgagtcaggcacggtggcagcttcccattttagtcagtttgccagtttgtaaccagacagtaatcaattaagagctttaatctcttaaggacatttttcctttagggaaaatgaacaaaaaataaaacatttattaccagtgctkcttccaagcaaaaatttaaaaattaaattaaaatttaaaaaataagtgaagccacttaggagtttccctggcaagcctcacccaagaagacttaaccttttttaaaaagaggcaaatagattaaaggggccaggggctggatgcataatcccctgatctgataccaacccaacaggcccagatgacttcttccagcagatacaatcaatgggtcaagaacattttctcaaagtttctttccctctctatggaaaagagctgacagcccccttctaagggcaccacatttcctggatttcccctcagactgaccttcaccctcccccctaacttcccctttaataataaaaaaacccagaatgcatatatacaaggaacagagtaagacatgggtaatttgtatggtgaactgggcttcaatgatttgtgaggaatttgttttgtgaaatcctgcacctcttattctagctcacaaacccttcccatcgttctgtttccttccttgtccttttctgttcccccaaataatacacatcaacatatcgacttttaaccaacttcagaatcatggaaggagagagggagatttttcagaaagaaaagcattcaggttttagttattaaggatgggaagcatcttaaaattcagataataccttagtggtttttccttcctccaaagccaacctgattaaagatcaaccctcctccctccttaacctagaccactctacctatatttgaaggactgttgctcagcaggaagtttagaaaacaactgtcaataccatcctaggcatcactgtaggtacaaggggggaaggcagtaagctggacctagagtttggactatttgcttaacaagaatttgttcttcattctgcacttgttacaactgctatgcaattcttaaaatgaaagtattaatttggggaaatatttaaaatatatatcttttatctattaaaaatatttctttttaccaaagacaaaaatcaattccaactgaaaagtgtttttcaaattactggagatatagagaaagatggcaagtggaaaaataagtgtctttgctcctaccaacaagactagccttccaataatatttactaagatcaaaaaggaaatgcgtgaaatggcagtaactgataagtttcctctaagggcatttatagtaaggtcaccctccctgtcttctgtaaaccagagccagctcttctgttttgggcacaaacatgccctccagcagctcttggaggacataaattgttggtagggcccagaactgaagtggtgtgactacaaaatcatgagtttggtaaatgtttttaaaacatacatctgcatatgtgcacacacacagagaacacagaatgcatacattcaggtgagtgatgttccccaccaacgtagtcaccaaagagattccacctatctcaatgatgaccacaatgtttaagacatctctggaatttctgtttgggaactgtttgggaactatgagctgcacaagaaaatggctctgctttacagcagcactcattactacaaacccacttgataagccaccttctttcccagaggcttcaaatagctgctggctagtctcagacattacattctctctctctctcaaccacaaataaccacaaaacactgaagatttgccctgagaaaaggcaaatctgagaacacttaaaaggagttatactatctgccttgatcaatgggtcactgttctggactttggcttctaggtctagaagctgaggaggaccttaggaggaggctggaatagataaccattaaggtcccttccagttctagcattttgggagtcagtgtttctagtctttgaag

SEQ ID NO: 669246 - DNA, 2830 bp, Homo sapiens
ataaaataacctcctaaatcatttgggggtatccccatcattggtgcgtgtgtctgcgtgtgtcaaactttaatgattatttattcagaccctggaaaaccacactataaaatagggcactggatcacaagttcgtttggttaaaaaaaaaaaaaaaaaaaagtgggggcggggggcagagaagaagtttaacttggatgatttccatgcccattccagctgtaacattctatgactgtgacccagcctttgttctcttttctcactctcctactagacatttcaatgaaaagttaggcaggaaaaaggaaaggaatcccaagttgctgccagctctgatgagagatcaggttgggggagagattaggtggttactgaattgaggtgtgggcctcccctgaccatgtcagtgatccacaacccacctcacttcttggggcttaagctaaaagcagcttctgaagagatgttaatgtcctgtaatcactagaggagaaaattcattctccttccataacattacttagtaaaggaaaagcggtggtgcaatcaaattcacaaataccaatggggtctctaaaatgtagaatgcagcttgctgggtgctggtcagttttctaaatgggaccagaaatggctttcctaagaccataaatgaactctccagccacacatacattcaaatgcattccattagacattgagctcctcaagagcaggaactgctttatctccacagtccagctcagggttggctcaagtctgaagctcagtaaatgtctgtcaaatagaaaagaaaggatgagccttcggtcatcagctacatgagtcaggcacggtggcagcttcccattttagtcagtttgccagtttgtaaccagacagtaatcaattaagagctttaatctcttaaggacatttttcctttagggaaaatgaacaaaaaataaaacatttattaccagtgctgcttccaagcaaaaatttaaaaattaaattaaaatttaaaaaataagtgaagccacttaggagtttcccyggcaagcctcacccaagaagacttaaccttttttaaaaagaggcaaatagattaaaggggccaggggctggatgcataatcccctgatctgataccaacccaacaggcccagatgacttcttccagcagatacaatcaatgggtcaagaacattttctcaaagtttctttccctctctatggaaaagagctgacagcccccttctaagggcaccacatttcctggatttcccctcagactgaccttcaccctcccccctaacttcccctttaataataaaaaaacccagaatgcatatatacaaggaacagagtaagacatgggtaatttgtatggtgaactgggcttcaatgatttgtgaggaatttgttttgtgaaatcctgcacctcttattctagctcacaaacccttcccatcgttctgtttccttccttgtccttttctgttcccccaaataatacacatcaacatatcgacttttaaccaacttcagaatcatggaaggagagagggagatttttcagaaagaaaagcattcaggttttagttattaaggatgggaagcatcttaaaattcagataataccttagtggtttttccttcctccaaagccaacctgattaaagatcaaccctcctccctccttaacctagaccactctacctatatttgaaggactgttgctcagcaggaagtttagaaaacaactgtcaataccatcctaggcatcactgtaggtacaaggggggaaggcagtaagctggacctagagtttggactatttgcttaacaagaatttgttcttcattctgcacttgttacaactgctatgcaattcttaaaatgaaagtattaatttggggaaatatttaaaatatatatcttttatctattaaaaatatttctttttaccaaagacaaaaatcaattccaactgaaaagtgtttttcaaattactggagatatagagaaagatggcaagtggaaaaataagtgtctttgctcctaccaacaagactagccttccaataatatttactaagatcaaaaaggaaatgcgtgaaatggcagtaactgataagtttcctctaagggcatttatagtaaggtcaccctccctgtcttctgtaaaccagagccagctcttctgttttgggcacaaacatgccctccagcagctcttggaggacataaattgttggtagggcccagaactgaagtggtgtgactacaaaatcatgagtttggtaaatgtttttaaaacatacatctgcatatgtgcacacacacagagaacacagaatgcatacattcaggtgagtgatgttccccaccaacgtagtcaccaaagagattccacctatctcaatgatgaccacaatgtttaagacatctctggaatttctgtttgggaactgtttgggaactatgagctgcacaagaaaatggctctgctttacagcagcactcattactacaaacccacttgataagccaccttctttcccagaggcttcaaatagctgctggctagtctcagacattacattctctctctctctcaaccacaaataaccacaaaacactgaagatttgccctgagaaaaggcaaatctgagaacacttaaaaggagttatactatctgccttgatcaatgggtcactgttctggactttggcttctaggtctagaagctgaggaggaccttaggaggaggctggaatagataaccattaaggtcccttccagttctagcattttgggagtcagtgtttctagtctttgaag

SEQ ID NO: 669247 - DNA, 617 bp, Homo sapiens
attaaactacagcagaaaataaatccaaggggcaatttgtattgtgaccatagtagaatgcctgtgtcttttctttaaaggctgttgaaatttatgaaaaatgtgcctttattttctcagacctgagccattcatgtactgggtatgggtggttgggtgggtccaggagtgtgcaactccctccattatccgccttgttcggggtttgctgctctgacccctactttgcttttcagatgactttgggaaattgctgctggctgaggccctcctggagcagtgtttgaaggagaaccatgccaaaataaaagactccatgcctttgctggagaagaatgagccgaagatgagcgaagccaaaaattatctaagcagtatccttaaccatgggaggctctcggtaagtcgtcagccttcaagcctgagacctcctctcctcgtctgtcttgcctcgcatctgtccagtcctccctgagtcatttggtcacctgagcaacaagtctctcttacaagctgcccttkcacttacagtagccactggctgcacatggccccttgagcacttggagtatggctagtccacattgagatgtgctgtaagtataaagcatacacaa

SEQ ID NO: 669248 - DNA, 1406 bp, Homo sapiens
cctatattcccatgaatgtaatctaaatggccatgaattgtggaatgactacagaaatgatgctacatccatactatggaaccaataaattaaggcagaaccacacatcctttcatggaaagacatgcatgacatataaatgaatcagtcatgagttacagaatatgttcactgtgatgttattaatatatattttatatctatatctacataattagaaataatattcaacaaacttttttaaacttaagacaggatctctctatgttgcccaggctggtttcaaactcctcagctcaagtgatcttcctgagcctcctgagtagctgggactgtagatgtataccatcacccctggctaaacacaaacttttaataatagtcatctctatgaaaattggtaagtggaggaggggttttcattctcaacttgtgttttaccattgtttgaggttttaaaaatttagcaattttactatggctttttaacatttaacatgtgcaatttttgtaattaaaaagttgtcttcttattaaataaacataaacaagactgcctagccagtggaggggtataggattgtggttaaggcctgagattttgaagtcagactctaaattcaaacaccggctgtactgcttataggctatgtgacctagagaaaattgctttacttctttgtgcctcagttattcttgtttcaaatgggataagagtagtgtccatctgagaaagtggttgtgaggattaaacaggatgatcataaggttcttaaaacagtgactggcacatagaatacactaaacaggaatgttatgaataacactctaccatgaaatataccaacataaaagttatagagtgatttatttttatagcatgaaaaaatatgtgtgtggttagggaatgtgtgcaaaggtggtgggctgaaataggagaaaaatggtaatcgaggaagcataatttgatagcttcaaagatcaatagaatgagataatgttgaatttttaaaaaaaaggaatccccatgacaaaagatatgcatattccagttcaaaatatcagactgattactttttaaagagacttgatcttttttgaaatgttgctgctatgattggggctaatcttttagtactctttaccatatatgctagaacagacggtggcccagaatatgagtcctccattttctcaatatgaagattcccaaaatgttttttagccaacttcagtatattaacttcaacttagagacaaaaagttaaatattttcctctaaggtttattttttgtacayttctatatgcaagtgtatttaaaatcacatattgtatgaagtacattaatttagacatagtttagatatattactccttactatcctcacaatacttggaataact

SEQ ID NO: 669249 - DNA, 2001 bp, Homo sapiens
ctttgttatatgatcaggaagcttacattctttttctacttactagaattttttgaataagatagagatcatcattgtcttcatagcatctgataatgaacctagggttgattcacagggaagttattgacagctttatgtctatcacaatgtgatagacacacacagtggtaaatacataacaaccacctttccagggtttgtgttgggggtggggagtagggaaaattcctgatttaagtgttttccggtttttgtagtgtaaatattgctactacgccctatttcaagctatcaatgtgagtcgctgaatgtgaagttgcagagatatgcaccgtcagctcctgtgacctggcacaggctggctccagccaaccacctgtctgtcaacacagagactatggcaacctctagagaggagtggcagctccttcactttcaccttcctcgtctttagcacattccttttttggccagctctaactcagaagagggttctaggaatcttatttctggtttaacaagttatttttggcttcatggagaacaaactgccattattagtayttttaatttatttggtggttattgccctcatcagctttactatttggacattttacatgtttccaaacatgtacccttttcatctaggtttcaaatttgctggcatatagttttccacagcatttttatatttttaatacttactaaaattatttacccactttaattataatatatacattttaaattctttttcttgatatgtcttgccaaaagtttgcagttgtattaaaatacttttcatttaatcatctctattttactgatttctatccttatctctattttccttctttcatttccattacatttttcttgttttgatttttgctcctttaacctgtttataatatccctttttgttcattatgatgtttctctcccaaaagtttgtgttacctgatatcaatttgtttccctgactttatttagcattatagttacttggtatatctgatttattccttttgacaggattcatgactacaaccccaaaatacggcacttctgcctgtgtggaaacaacagaagcaggaagattactctcatttttctctggcctttttcccttgaagcagactataaagaagaatctgaccttcctctgaaggaaaccttcattccagacataccctccctatatccaaagaacatctttatctttaaagacacagagatgtcaagaagaatctgaacaaacaggctttgccagatcccccagtttactaatattgaaccatactcttttgttcttcaatcatacttctgcatgatgtccataaaaatacacagttttccccattccttttgggtatttattcccgaaagcttctgtgtcatgtaaaacttacattaaataaatttgtatgcttttccttgtgtgcttttcccttgtgtcttttgttatgagggttttggccatgctcttagcgatgggtgaacaaagaaatcttcttttctcccttatactttattttctttttataagaattcatttacatttattatgagtttccgtaagtttggatttatttctacaacttcatttgacaattaaatctgtcatttgttcaaacattataaggatttgaagacacttcaacatatactgctcactcccaactaatatattcttgttatcaaatattttactactgtttttttctaaccatgcaaattagatgacttcataatcatcatcactatatcccagagtaaatttttatccacatttatcatttctttttgttcaatattccttcttgcattttagacctttcttcagcaatagtttccctacttcttgatgtatattttttcaaataactttaatgagtatatgttggttgtaaagtttttgtctaaaaaatgtttatttgggctgggcatggtggctcacacctgtaatcccagcactttgggaggctgaagtgg

SEQ ID NO: 669250 - DNA, 1098 bp, Homo sapiens
tgccattggcattcataccagtctttagcatagttccagttttctatttcaagcttaattcttcctactctctgcataatgacaacagctaacacttattttgcactttccctgtgtgtggcaccatcttgggagcttggtatgtatcatgtcatttaatatttgcaacaaatctagagatttgtacaattatccttgttttgcacatgaggaccttaaggcttagagaacttaatttgcacaagttcacacagctaataagtgctcaagatgaaatttgaatccagacagtgtcactccagagctgatgctataaattacccactgaattgcttacttatatcctattgccctattctaaaaccaaaagggatttgttgtgtcccaaacttacattatacttttttttgcttatattttatttttgtcatgacatgacatgacatgacaaaacctaacacacacccagtttaaattttatttcttgcaaatcttccctcatttttcaactcttaaartactacacgtgcctctccttgtcacagaaacatttttttcagttatctttgcatgtgcctttcctccctggttgtggtttagggatcagtgtttccaggatagatgatgactttagctgactttcagcagctagcatgttgtattactgcattttcacactgctataaagatactacctgagactgggtaatttataaagaaaggagtttaattgactcacagttctgcatggctggggaggcctcaggaaacttacaatcgtagcatatggcaaagggaagcaggcgacaggcagcaggagagatagagggtgaaggaaaaactgccacttttaaatgatcagatctcacgagaactctccctctatcacgaaaacagcataggggaaacagtgcccatgatccaatcacctcccaccaggcactccctccacatgtggggattacaattcgagaagagatttgggtcaggacacagagccaaaccatatcactggggatctgaatgagcagaaagaagtttggacgctgcttttgccactttgtaggtggatcattttgagaaagctgctctgaacgc

SEQ ID NO: 669251 - DNA, 636 bp, Homo sapiens
gtataatttcacacagtgttaatatagtttccatctatttagatgtttgcacatttattttatctcaatgtttgttctcaggaagrgtgtttttctttataaactaaattttcagcaaattttaaatgcatttcactgacgtaattatacttacattgtatttgtgtattaagttacattttgtccttaaacctgaaaataacttttcaaatatatgtaattttaaatttacatgtttttccctcagaactttgaaaaccataacctattggattcttgatcttattcacatattgagaaatatgtgtcttttcattgctttataattaatttgaattttatcttagatagctttacgtgattttctctattatggtattatgcttttaactattgtttttcttttgatcagaatgcctttaagctattataattaattattttaataattatatatttttatgccctatttgacattcactccattttatttattcgaacttgcacttaaacaacatgacttattttagatttttatgtattttaatttttcatattgtttatttgttttatccctattgggacttctaaatattcacttcatcatatcttctaattcataatttctttttcaat

SEQ ID NO: 669252 - DNA, 636 bp, Homo sapiens
gtataatttcacacagtgttaatatagtttccatctatttagatgtttgcacatttattttatctcaatgtttgttctcaggaagagtgtttttctttataaactaaattttcagcaaattttaaatgcatttcactgacgtaattatacttacattgtatttgtgtattaagttacattttgtccttaaacctgaaaataacttttcaaatatatgtaattttaaatttacatgtttttccctcagaactttgaaaaccataacctattggattcttgatcttattcacatattgagaaatatgtgtcttttcattgctttataattaatttgaattttatcttagatagctttacgtgattttytctattatggtattatgcttttaactattgtttttcttttgatcagaatgcctttaagctattataattaattattttaataattatatatttttatgccctatttgacattcactccattttatttattcgaacttgcacttaaacaacatgacttattttagatttttatgtattttaatttttcatattgtttatttgttttatccctattgggacttctaaatattcacttcatcatatcttctaattcataatttctttttcaat

SEQ ID NO: 669253 - DNA, 636 bp, Homo sapiens
gtataatttcacacagtgttaatatagtttccatctatttagatgtttgcacatttattttatctcaatgtttgttctcaggaagagtgtttttctttataaactaaattttcagcaaattttaaatgcatttcactgacgtaattatacttacattgtatttgtgtattaagttacattttgtccttaaacctgaaaataacttttcaaatatatgtaattttaaatttacatgtttttccctcagaactttgaaaaccataacctattggattcttgatcttattcacatattgagaaatatgtgtcttttcattgctttataattaatttgaattttatcttagatagctttacgtgattttctctattatggtattatgcttttaactattgtttttcttttgatcagaatgcctttaagctattataattaattattttaataattatatatttttatkccctatttgacattcactccattttatttattcgaacttgcacttaaacaacatgacttattttagatttttatgtattttaatttttcatattgtttatttgttttatccctattgggacttctaaatattcacttcatcatatcttctaattcataatttctttttcaat

SEQ ID NO: 669254 - DNA, 836 bp, Homo sapiens
atgagtttgaaagcaggacatgtcttcaaagcatacacaacatgggcctatatatgtacaacaataataatttataagttacagtttggatgggaattaaaagtacagaaaatttgttaaaataaattaaaatggagatcacgtctcaataatctctgagcagacgaaattagttaggtctcataagtgatctcaaccttgcttgatttgcaaatacaagcaaaatttaaatatttattgtagctgcctatttaaaaaagagaaatgaagctcaaccaatcaggagtagccaacatccttatataaatagaaactgtccaacaagataaacagacgaacaaaaaacaataaaaaagttgtgctaccaccaatcaaatgatttttttgtttttacattttttcaataaatacttgcttcttactctgtcagagaagcaataaataacttttggtctgatattttataatttatcaattgctcttactcaaatagacacttggcaatttcattgtgtctcaaattactttttagcagaataaaataaactaggaataaacattacaaaaacgtgtacagaatatgagaaaaacatagaaagtttatgaaatatatgaatgtagacataagcaaatagacaatttgtatcatattcttaggcagcaaatctcaatattatcaacatmaattgtccttaagtttatttataaattcaattttgttcctagacagataccattaaatattggaagtacacgttagtataaaatattagagagaggaaaacacacataagaatagacaagaaaactctgaaaaaaaagcaaaaaacaagact

SEQ ID NO: 669255 - DNA, 627 bp, Homo sapiens
atattacatataagtagaatcatagagtatctgttttattgtgactaattttacttagcattatgttctcaagattcctctttattgtggatggtacaagattttctgcctttaaaagctragtaatattccattacttttgtattacaaattttatttatttattcattctatgaggaaaatttgtgttgctttcacctattggcatttctgaataatgctgcaatgaatattggtatgcaaatagctatttgctcatatgtgtgaggtttacatgtgtgctaccttctgttttattggaaaaattgtctgtctttatgccagaaacaaactgttttcattgctgttgctttgtaatgtgctttgaaatcagaaaaggtgaggtcactaacattgttttttttaaacattttggggctctttatggtcgcttgagattccatataatttgttggttcctttttctatttcaaaaaaaaagttcttaatttaaaagggattgcattgaatctgtaactcgctttagacatcataagcattattcataatattaagtcttacaacccttaaacatgagcatgctcaaaagtgagttgtttaatttccatatatatgttgctatttttg

SEQ ID NO: 669256 - DNA, 627 bp, Homo sapiens
atattacatataagtagaatcatagagtatctgttttattgtgactaattttacttagcattatgttctcaagattcctctttattgtggatggtacaagattttctgcctttaaaagctgagtaatattccattasttttgtattacaaattttatttatttattcattctatgaggaaaatttgtgttgctttcacctattggcatttctgaataatgctgcaatgaatattggtatgcaaatagctatttgctcatatgtgtgaggtttacatgtgtgctaccttctgttttattggaaaaattgtctgtctttatgccagaaacaaactgttttcattgctgttgctttgtaatgtgctttgaaatcagaaaaggtgaggtcactaacattgttttttttaaacattttggggctctttatggtcgcttgagattccatataatttgttggttcctttttctatttcaaaaaaaaagttcttaatttaaaagggattgcattgaatctgtaactcgctttagacatcataagcattattcataatattaagtcttacaacccttaaacatgagcatgctcaaaagtgagttgtttaatttccatatatatgttgctatttttg

SEQ ID NO: 669257 - DNA, 627 bp, Homo sapiens
atattacatataagtagaatcatagagtatctgttttattgtgactaattttacttagcattatgttctcaagattcctctttattgtggatggtacaagattttctgcctttaaaagctgagtaatattccattacttttrtattacaaattttatttatttattcattctatgaggaaaatttgtgttgctttcacctattggcatttctgaataatgctgcaatgaatattggtatgcaaatagctatttgctcatatgtgtgaggtttacatgtgtgctaccttctgttttattggaaaaattgtctgtctttatgccagaaacaaactgttttcattgctgttgctttgtaatgtgctttgaaatcagaaaaggtgaggtcactaacattgttttttttaaacattttggggctctttatggtcgcttgagattccatataatttgttggttcctttttctatttcaaaaaaaaagttcttaatttaaaagggattgcattgaatctgtaactcgctttagacatcataagcattattcataatattaagtcttacaacccttaaacatgagcatgctcaaaagtgagttgtttaatttccatatatatgttgctatttttg

SEQ ID NO: 669258 - DNA, 627 bp, Homo sapiens
atattacatataagtagaatcatagagtatctgttttattgtgactaattttacttagcattatgttctcaagattcctctttattgtggatggtacaagattttctgcctttaaaagctgagtaatattccattacttttgtattacaaattttatttatttattcattctatgaggaaaatttgtgttgctttcacctattggcatttctgaataatgctgcaatgaatattggtatgcaaatagctatttgctcatatgtgtgaggtttacatgtgtgctaccttctgttttattggaaaaattgtctgtstttatgccagaaacaaactgttttcattgctgttgctttgtaatgtgctttgaaatcagaaaaggtgaggtcactaacattgttttttttaaacattttggggctctttatggtcgcttgagattccatataatttgttggttcctttttctatttcaaaaaaaaagttcttaatttaaaagggattgcattgaatctgtaactcgctttagacatcataagcattattcataatattaagtcttacaacccttaaacatgagcatgctcaaaagtgagttgtttaatttccatatatatgttgctatttttg

SEQ ID NO: 669259 - DNA, 914 bp, Homo sapiens
tgaccattaataagtgacactgtggcatctgattgcttttcagagattcctcccaaatcgctgaaatactctctttctggggaaactgaagaacagtcttcctggaaggtggcagtgggtagatgattcctgggttcattaaacacacttatttagcaccaactgcatgctcagcaagtgccaggcaccaggggcccacagacgaaagaccttgtccccagagctgctgctctcaggattggtggagaagaaacagaaataactgcaagttcaatgcaggtgagagacacccaggatccccgaaaagcctagcgcccgggctgcgggaagacgccaaagaggagrtgcccaggaatgcccagcggtgagggagtccccaggggctggcactgcccaccagccagcctggctgggacgggaaggacacgtggaggcccatgcatgtgatgggctgatcggaggggccctgcacatagcaggggaggctgggtgccacagggaaaggccgctctggcaggacctgggcgatggcggcggcagagccaggtacagtgagatgcccgtcagtgcccagcggagacagcggggagatggtgtgaaaagagaggcggggacctaagagaaaatcagggaggcctctgtgagtgcagggggctttccaaggcaagcgaggaggggccgggagcatggggaccccagcacaaacagccctgctggagccacagtgtggggaggccatttgggaaagtcccagctgcggacagaggcgctgttcccaaggaagagggacaaggaggtcagtagtgggggaaggtcgagggggtgggggggctctggcacacacaggtccagaccagcagtaggggaagcaaggccatccccagagtgaaagctgggtagcaggacgcgcggga

SEQ ID NO: 669260 - DNA, 914 bp, Homo sapiens
tgaccattaataagtgacactgtggcatctgattgcttttcagagattcctcccaaatcgctgaaatactctctttctggggaaactgaagaacagtcttcctggaaggtggcagtgggtagatgattcctgggttcattaaacacacttatttagcaccaactgcatgctcagcaagtgccaggcaccaggggcccacagacgaaagaccttgtccccagagctgctgctctcaggattggtggagaagaaacagaaataactgcaagttcaatgcaggtgagagacacccaggatccccgaaaagcctagcgcccgggctgcgggaagacgccaaagaggaggtgcccaggaatgcccagcggtgagggagtccccaggggctggcactgcccaccagccagcctggctgggacgggaaggacacgtggaggcccatgcatgtgatgggctgatcggaggggccctgcacatagcaggggaggctgggtgccacagggaaaggccgctctggcaggacctgggygatggcggcggcagagccaggtacagtgagatgcccgtcagtgcccagcggagacagcggggagatggtgtgaaaagagaggcggggacctaagagaaaatcagggaggcctctgtgagtgcagggggctttccaaggcaagcgaggaggggccgggagcatggggaccccagcacaaacagccctgctggagccacagtgtggggaggccatttgggaaagtcccagctgcggacagaggcgctgttcccaaggaagagggacaaggaggtcagtagtgggggaaggtcgagggggtgggggggctctggcacacacaggtccagaccagcagtaggggaagcaaggccatccccagagtgaaagctgggtagcaggacgcgcggga

SEQ ID NO: 669261 - DNA, 1525 bp, Homo sapiens
ctttaagtggcatagatgagaaaaactttcatgacttaggtgcaattaaatattgctaacatttgatccattttgccatgttcttttaaagtaaagaaataacattcagtacttacatatctgccttcctcaccaggatgaccgggtaacccatcaaaacccttctctccctgagaagacaagaaatcaaaataaataacttggcctctaaattatttatttctcaaatctatatgaaataaaaattattactaatagatacccttgtctcayggagttgtcattttatggagaatgtactgaatatcaggcacaatgtgcagagatgtacagaaacaaatattcttgtccagtgttacagtgaaaacatgcatacctgtttgtcttaatagtatatcaaactattcttattttccaaaataccttcttaagtcattctcttgtaaaaatccaaatcaagactagtttctagttaaaagcttaaggaaaactgttactcttaaagaagctttcaaccttgttttacaaaacatcagtaagcaaagctcttcctgcctatcttattcatgagaaatggttgtttatttctgtatgactcaactgtccagttttgttttgtccttttactacttcttacacaccgaaacacacaaaccatttcctctcaaggaagtttggcttgccatgttatagtcagatgtgtttatttagtctaaaagctggtcagtaagacttggaaggcatattttatttgtgatcaacaaagatataaaagtcattatgaccatctactgaattcttgcaaacagaaacagcagagaagtcaaaaatttaaaatactcccatctttggccttagaggcaccggcacaagctgcaaagaaacgtatcaagaagctcctaaacctgattttctgattctccaatctgttaatgaataacaacatgacagggaaaagtctaatgctaaggcatgattacaatttatttttcaaacagtaattataaactttatactattctaaatttaaaagattgatctgcaaagccctgaagagctcattccaacaacctcatggaaaatcttccaaagagaacatgtaaaaagatgacacaaagccagcgggtgtaatttaaccttacctgtgtgtctgtgattataccctcattataaagcttcaatccctgtgataatggaaccttgccagccctgaatatctgaggaccatttctaatgagatactctcccttagaagtgttaggtagtaattttcctattggttaacctagaattaacagagatgcaactcttttctcagagtttgatgctgtagaaaagaatgttagatgggagagaggcatttactactataaagaaagcagatgttggacaagtgaaaatacggtagataagtgaaaacttctgtgcagtggcagaatttgtgacattatttgtcaaatgagcacaagaaggtagcataatatggtggaaatcatgtgggacttagagttagggagacataggg

SEQ ID NO: 669262 - DNA, 642 bp, Homo sapiens
tgggcaagtaatttacttaacttctcagtgayagtttcctcatttataaaatgagaatgatagtacctacctagggttgttgtgagagttctgtataagctaatgtatttaaaggacacagaaaagtgcctggcatgtagtaaaaaactacagaaatgtaggtgattatgattttgttacagttgttaacatcgccatgatcattaccattcactcttcatgccagggcttataaattctagatgtcgtgaagacatggggaaatgagaaatgtagagatttcaatgaaaaaacataaattgggtgtatagaaagggaacaaagggtttgctgtgcatgggaccagggaggagaaaagaggagcaagaagtgaggccacgtagcacgttgggttggcaactaccttaattctattcttgactcaggaatctctgaataaggacaactagttatttccataactgtattaacaccaataaccaaatactgaaattttagaacactaaaaaaaaaaaagccagaattctgcaatttcagaaaggaatacaaacaagagcaaatgagttagagctggaaaacagtgaactcaggagcaagtaagcaaagtttgtgcaaataacattagccccaaattcctattta

SEQ ID NO: 669263 - DNA, 1361 bp, Homo sapiens
gtgagcaggattatttttctgaaaccaaaaattacagtagcccagaggcttgcaagggagaattttattttgtacaaaaattttgggcaacagatttgaggttcatgaagagtttcatatcaccatttggctagggcaactttttttaacctttgctgtttttaatgtaattgccaactaaaagttatttaatgccagaagcttcatgattgctcagatggaagtatagaaaatattttaggaatgggaaaggccacctgaccacacattcttaaccctggtcttcttctttttgccagaccctttaacttccttctctttcagaagttcatagagtcttgaatttgctaatatgtgtattttatctgcttgctgggtaactcatttcaaattacaaacctctgcatgaaatgactgactggatttcctatccactagggataggggtcctcaaactgcagccaattaccacttgcttttataaataaagttttattggaaaactagcatatagattaaagtattatctatggctgctctcacactataatgacagagttgagtatagtcagtttaagaacagtcaaaggtcattccttactcctgatgcctgcaaatcctaaaatgtttactatttggccctttactagaaaagtttgctgacttctggcatataacatggaaaaattttcatttctggtttatctcagtgacatccttatttatactaaaacagttaaccacttttctggaactctgccatgtgctaggaccactcttccaggaagagtaaactaactgctagggggatctctggagatcccctagcatttcagggaatagayagtgcctgactctaagcctcactagtactgtctgtttgccactggttgtctactatcctccagtgctcttcacctgcatgattcatgatggtcatttctgcgaccactgtgttgacactcaatacttttcttttgtgaggcttatgtatttactgggacggttctttttctctggcttgctattcttacacttttcaactgggaaaaacatttgtcatctccatttcctttagctctataagggaaacaagccaaaccaaactgaaatgggcttgtttttccttccctatcttccctgcctctagtttttatattatctgcaaacttggaaactgcatttcatgtgcttatgacttgtacatagagaattattcacaactatggttctgaaattgaccctggaggaatttcccatctgatcttcacttccattctgagaagtttccatctgctgatactctgagttgcccaagttaaagacttccaaatatgccttaattcatctcctattcagca

SEQ ID NO: 669264 - DNA, 1361 bp, Homo sapiens
gtgagcaggattatttttctgaaaccaaaaattacagtagcccagaggcttgcaagggagaattttattttgtacaaaaattttgggcaacagatttgaggttcatgaagagtttcatatcaccatttggctagggcaactttttttaacctttgctgtttttaatgtaattgccaactaaaagttatttaatgccagaagcttcatgattgctcagatggaagtatagaaaatattttaggaatgggaaaggccacctgaccacacattcttaaccctggtcttcttctttttgccagaccctttaacttccttctctttcagaagttcatagagtcttgaatttgctaatatgtgtattttatctgcttgctgggtaactcatttcaaattacaaacctctgcatgaaatgactgactggatttcctatccactagggataggggtcctcaaactgcagccaattaccacttgcttttataaataaagttttattggaaaactagcatatagattaaagtattatctatggctgctctcacactataatgacagagttgagtatagtcagtttaagaacagtcaaaggtcattccttactcctgatgcctgcaaatcctaaaatgtttactatttggccctttactagaaaagtttgctgacttctggcatataacatggaaaaattttcatttctggtttatctcagtgacatccttatttatactaaaacagttaaccacttttctggaactctgccatgtgctaggaccactcttccaggaagagtaaactaactgctagggggatctctggagatcccctagcatttcagggaatagatagtgcctgactctaagcctcactagtactgtctgkttgccactggttgtctactatcctccagtgctcttcacctgcatgattcatgatggtcatttctgcgaccactgtgttgacactcaatacttttcttttgtgaggcttatgtatttactgggacggttctttttctctggcttgctattcttacacttttcaactgggaaaaacatttgtcatctccatttcctttagctctataagggaaacaagccaaaccaaactgaaatgggcttgtttttccttccctatcttccctgcctctagtttttatattatctgcaaacttggaaactgcatttcatgtgcttatgacttgtacatagagaattattcacaactatggttctgaaattgaccctggaggaatttcccatctgatcttcacttccattctgagaagtttccatctgctgatactctgagttgcccaagttaaagacttccaaatatgccttaattcatctcctattcagca

SEQ ID NO: 669265 - DNA, 1332 bp, Homo sapiens
ttttatctaaacatctccattaatagatagacaatgctgcaataaaaatataccagtagactacatttatggtagtggagttgatagatcaaaagaagaaatatttgatattttgatagctagtaacaaaagactctgagagtgccatttttattcctgccaatagtgtaagacagtttgtgtttttcatttttcatactgtctcccacacaggtattatatgacaataatttaaaagaagaaataaacttatgtacattcatttgtattaatggaaatttcccagtgattttgtaagctgatatttaatgctgagtccttttccctcagtgacattttgcaatgtctgaggcataggaattagtaaaaaaaaaaattactgaattaatttgaawggacatagtaaatttttacactttaaaaaatggcaatatagtacagttacattattagaaatattgaaaaaataaagagctctgacactaaaatggttaatcaaagttaagagatgtccatgaccgacaagagcagctctggttggagttccatggaggagtcgtcagaccagcttgctgaggttttataaatctaaaccctgatctatgtttaaccactttccgctgattatttactcctctctattccagcagtctgaaatcttgagaggcatgttttcacaactggttggaaatgagagttaggtgggttagatcaaacacttcttccctgtgatctagggaaggaaatcgagaccttttcaaaacatactcactagattagccatacagtttggggcttgttctagcatcctatatagactcttttatgtccatttagagccttcaagaaattaagtacagaaatagaaaaaagaaagacaaggggggtcacagagtccaaataatttctgcaaataactctaacacacctggcatcaagattgccctttatatgtagttaccacaaaatctaaaaaaagtaatttataagcataattactccaaacaaatatcaaaaagaaaaatattcatggagaacatgaataaaatgcatacatcatttgggcaagtcatcacacttttctgggtctttcttttacttctttatgtataattttaagaccactatttttttgttgttgttgacagaaaaactgcagagaaagggtaaactttgaactaagcctcagggattgagagaaattgctagttaaactagaaaggaaagctattccgggcaggaaagaacatcctttttaggaggatcccctttactcttgaagacagagttaggctctcctcccctgggcttctgctgtactatgtatttatt

SEQ ID NO: 669266 - DNA, 1332 bp, Homo sapiens
ttttatctaaacatctccattaatagatagacaatgctgcaataaaaatataccagtagactacatttatggtagtggagttgatagatcaaaagaagaaatatttgatattttgatagctagtaacaaaagactctgagagtgccatttttattcctgccaatagtgtaagacagtttgtgtttttcatttttcatactgtctcccacacaggtattatatgacaataatttaaaagaagaaataaacttatgtacattcatttgtattaatggaaatttcccagtgattttgtaagctgatatttaatgctgagtccttttccctcagtgacattttgcaatgtctgaggcataggaattagtaaaaaaaaaaattactgaattaatttgaatggacatagtaaatttttacactttaaaaaatggcaatatagtacagttacattattagaaatattgaaaaaataaagagctctgacactaaaatggttamtcaaagttaagagatgtccatgaccgacaagagcagctctggttggagttccatggaggagtcgtcagaccagcttgctgaggttttataaatctaaaccctgatctatgtttaaccactttccgctgattatttactcctctctattccagcagtctgaaatcttgagaggcatgttttcacaactggttggaaatgagagttaggtgggttagatcaaacacttcttccctgtgatctagggaaggaaatcgagaccttttcaaaacatactcactagattagccatacagtttggggcttgttctagcatcctatatagactcttttatgtccatttagagccttcaagaaattaagtacagaaatagaaaaaagaaagacaaggggggtcacagagtccaaataatttctgcaaataactctaacacacctggcatcaagattgccctttatatgtagttaccacaaaatctaaaaaaagtaatttataagcataattactccaaacaaatatcaaaaagaaaaatattcatggagaacatgaataaaatgcatacatcatttgggcaagtcatcacacttttctgggtctttcttttacttctttatgtataattttaagaccactatttttttgttgttgttgacagaaaaactgcagagaaagggtaaactttgaactaagcctcagggattgagagaaattgctagttaaactagaaaggaaagctattccgggcaggaaagaacatcctttttaggaggatcccctttactcttgaagacagagttaggctctcctcccctgggcttctgctgtactatgtatttatt

SEQ ID NO: 669267 - DNA, 1520 bp, Homo sapiens
gaacacacacccctcagtagaatgcactacttatcaatagtacttgggtcattagaaaacacgaaaatcagatagagagttaaaaatcaaaaactgaaaagcaatcctattgyctgggtagaacatgaacttctgttatcacatacatggcttacagttgggaaaacagtgatcctttagctgcctgaggttggtcagaggtctttaggtggacatacagagaaaagaagaaggagcggggattatatgtgttgttgtgtattcgttgtatcagaatttactggatacttgctatggccagccaattgatagttattttatatgttttattttattattgctctataaaatgagcatattctcttacgtttgtatcagtaaaaacaagcgagtaaaattagagtgattatctcaagtgaaacaagacttaaataacagatttaagtgacctatcttactgataattaaacccatgtgattccaataacccatttgaatgggcgggtgtgtttagaagcagtatctacaacaagactatttgtattcctacttttacataaataatctcatttaattttataatcaccctttgatgtaactatagttccaggtattataaataaattgagatgatgtctcccctgtaatttcatcggatattacctctagttctttactgtgagaactcagtctctggtgcaaatctccttgaggaacacagaagcaaccaaactctttggtgtttctattttgtttgtatcaactaaaacttgtggcttttacaaattgataaaaaaagagagacttataaataaattaataattcaatgaattttgcttgctctagttaacgtaaatgaagagtcaaggtagtcttaggaaaatccagaatgtaggattattctatccattttcctaagacattctatgtctgtgtggaatcatgataaattagacagcattttaaaaacagtacttgaatagggaagcattacatttttcatgccataatttcctggatccttgctcttcaagagtttacatcctgagaattactcacatagattatttcatgaaattttccttaaataaaatttaataacaggttgggatgaatttggttatttatacgtctttggtccttgattaacaggaataaagaaaatcaagttggtgattctatggcaggaaattttcccacaaaatctctgtaccatgttttcttggatatgcttactctttaccccacaggtgatggtattgaacatggaaggcactaatgagtaaaaggatgagcaaggagatgggaatcactgtgagtgtatggtagctaaagcaacaagaaaaaaaggagtagaatcctatcatgagcaggtacagggtgacgcaaatatggaaggcatatatgctaaatactttgggcacagattcttttgcaggtagctacagtacagcctgcaatgtctgatatctgtggataataatgccaaatatatcaaatccatccacagaaaaggcca

SEQ ID NO: 669268 - DNA, 1693 bp, Homo sapiens
tgcaatttcatatcactacccattgtatttgtactatttgatacggcagctactagttacatatgactacttaaatttacatttaaatcaattaaaattaagtacatttaaaattcagttcctcagcttgcactagcaaaatttcaagcaattaatagccatgtacagctactagttactaaacagcagagaaatagaaaatatccacttctgtgggaatttctattggatagtgctgtatttgatactcttctctaacttgattgcatttacttggaaatagtagatgccattaagggctaaccctagccccacaaaaggcctggacaatctgctatcagatctgcttggtcctaacactgtacacaatgggattgagcacaggagggagaagcaggtagatattggccatgaatgtgtgtattagtggtgacaaatgcttcccatagcgatgaattagggtcataccaatgagaggcacatagaaaagcagcactgcagatatgagagagacaggtgttgagagccttgagcctgtcttcctgggaagcaatgctcaatactgcctgcaggattagaatgtaagaggccaaaagtattaaggcatctagtacaatgatgaagatcacagccaacaggccatagatgctattgacaccagtgtcagcacaggcaagcctcatggcatcctgatggaggcagtatgcatgggagaggacattggagtgacagaaaggtaaccttttgatgagaaaaggcacagggagcacagcccccacactccgtagcaggatggctgctgcaatcttgctgatgacactgtgagtgagaattgtagcatagtgcaaaggaaagcggatggccacaaagcgatcaaaggccatggccaccagaacacctgattccactcccccaaatgtgtggatgaagaacatctggataaggcagccattaaaagttattgaacgccagttgaaccagtgaacactgaccatggtaggcatggaagacagtgaaaggctgaggtcagtggcagctaacatggctagaaaaatacatgggctcatggagactttgctcaactttgatgacaacaaggatggtgacatttcccaagatcgtggtgctataaagaagacagaggggcaaggccatccataagtctttctctggcattcctggaatcccagtcagggtgaagaagctctggtggttctcagtagtttggttgagtggtgacatggtggaatagaggtttgagtaggaaaatagagaagagctcattaagtcaaacwgacttcaactggaatcagtaacaataagtattgagatggtagctgtaagaggaagtaacttaaatattattcttgcacattcatgctcagtttgatacagaaaccagtagcccctgcttcatgaagcgagaatgctgctactaaccataaaattttaaaatatctaggagaaagagaaacaaacaaaaaacctccagttaacatctgcacctactagggacatatgcaattcagaaatatcaagaagttacctgtcttgcagactgcaatactagggaagaatttgacattgtgtatttacatgtataataaacacgaacaccaataaccatgaagaatataaccacagtcctaatataagggctgttcataaacacagatgtgcagatataaatgtg

SEQ ID NO: 669269 - DNA, 1693 bp, Homo sapiens
tgcaatttcatatcactacccattgtatttgtactatttgatacggcagctactagttacatatgactacttaaatttacatttaaatcaattaaaattaagtacatttaaaattcagttcctcagcttgcactagcaaaatttcaagcaattaatagccatgtacagctactagttactaaacagcagagaaatagaaaatatccacttctgtgggaatttctattggatagtgctgtatttgatactcttctctaacttgattgcatttacttggaaatagtagatgccattaagggctaaccctagccccacaaaaggcctggacaatctgctatcagatctgcttggtcctaacactgtacacaatgggattgagcacaggagggagaagcaggtagatattggccatgaatgtgtgtattagtggtgacaaatgcttcccatagcgatgaattagggtcataccaatgagaggcacatagaaaagcagcactgcagatatgagagagacaggtgttgagagccttgagcctgtcttcctgggaagcaatgctcaatactgcctgcaggattagaatgtaagaggccaaaagtattaaggcatctagtacaatgatgaagatcacagccaacaggccatagatgctattgacaccagtgtcagcacaggcaagcctcatggcatcctgatggaggcagtatgcatgggagaggacattggagtgacagaaaggtaaccttttgatgagaaaaggcacagggagcacagcccccacactccgtagcaggatggctgctgcaatcttgctgatgacactgtgagtgagaattgtagcatagtgcaaaggaaagcggatggccacaaagcgatcaaaggccatggccaccagaacacctgattccactcccccaaatgtgtggatgaagaacatctggataaggcagccattaaaagttattgaacgccagttgaaccagtgaacactgaccatggtaggcatggaagacagtgaaaggctgaggtcagtggcagctaacatggctagaaaaatacatgggctcatggagactttgctcaactttgatgacaacaaggatggtgacatttcccaagatcgtggtgctataaagaagacagaggggcaaggccatccataagtctttctctggcattcctggaatcccagtcagggtgaagaagctctggtggttctcagtagtttggttgagtggtgacatggtggaatagaggtttgagtaggaaaatagagaagagctcattaagtcaaactgacttcaactggaatcagtaacaataagtattgagatggtagctgtaagaggaagtaacttaaatattattcttgcacattcatgctcagtttgatacagaaaccagtagcccctgcttcatgaagcgagaatgctgctactaaccataaaattttaaaatatctaggagaaagagaaacaaacaaaaaacctccagttaacatctgcacctactagggacatatgcaattcagaaatatcaagaagttacctgtcttgcagactgcaatactagggaagaatttgacattgtgtatttacatgtataataaacacgaacaccaataaccatgaagaatataaccacagtcctaatataagggctgttcataaacacagatgtgcagatataaaygtg

SEQ ID NO: 669270 - DNA, 609 bp, Homo sapiens
gaagtagcaaagtctggatcggcatgttttctcttcacttctacatttaagatactgaacatgtataagatttcagcaattttattttgaagttttataaaaaatactaataaaatgcatttcttcccttytacttattgttgtcatcacccactataaaaataagcaacaagatgtttggtcaatctcttcatgcacaagataaaagcacaaaccatactttagtactcactgcgattttatgattccgcatcatattatcaaattcctcattaatttttttatatttttcttctgtatgtggagttagcacatatgaagtatcagggtctgggctgtcgcaccctctgtgttccttcttgttcagagcctaaataatgaagttaacaaaaaggatcaacaaataaaaagtagaggtaaagtaaaagtacttacagggcctcgtttgaaaataaaatcactatcttcatttagtttgctgaatctgtcctccgagagtggactgtgctcaaagtaatcgtcagcatcagggctctcacaaccattaaggcctttctttcttaaagtctgaaatacaattggaaaattcacacacaaataatgctaact

SEQ ID NO: 669271 - DNA, 619 bp, Homo sapiens
agccagacttattttgagaaatatgtgacttgggtaaagagactaataatgtgttacctaaaggatcactaacagttttcttcctcatgcttctttgattataagggatagaaacccatttaaagtagctccaactaaagaaagaatttgttgaaagaatgcagacagatagcactcaaaggcaagaggcaggagtagctggcttcctgaaggccggacaccaggaacttcatattaagggctccatggtctctcatctctgccaccaaggctggtttgcaaaataactctccttgcaagcacaactgataatcttcatgtagaaatgaattgatttaaaacaggtgagaaattcaaaatgatattgaggggaactgaattggtaacaatttatggaacagatagaatggagagagagaaaagtggaaaaaagatataagagtctagacataagatagtgcaggcttgagtgagtatggggacagtagaaatggaaataatatataaaatttggtattccatgtgaatgtagagagagaacaaagggaataaggtcgactaggttggtaagtccmaaggagagaccggtttaataaaagataatgaattctatggcagt

SEQ ID NO: 669272 - DNA, 621 bp, Homo sapiens
ctctcactctaatcctaaaaagacacaaaaataaaaactagctcagtctgaagttggcattaacatgtaatctgatgtagttattatatctcatatatatgagtttacctttcaagcttgatgtcgccttcaataccaaatagtggtattgcatcaataccaaaatagtacatactgataaaaacgggggcagtgtgtaaggagtatgattaaatcactaaattaaatctaggacttaagagagaggagacactgcatttcatagactaatacaataaatgtaacataaattttgctgaattaatgaagtaattcaggcaggaggagatgtaaaagatactctaactccaatcaggtagtctatcacccatatttctaacatgaatggctcacactctactttaaatccttgcttctgatatctaactaaattttctgcctgtcaaagtatggctttcccatgagaaggaaagcatataaatggcaggttctcagtactgttctactttgcatgacacaatgctacacccacaattgattttcaaaaaaatacttwaaaatgaggccaattatgtatcagtgattcttgctcatcaaagcaataaaagaatagcaaaataa

SEQ ID NO: 669273 - DNA, 1408 bp, Homo sapiens
ggagatcgagaccatcctggctaacaaggtgaaaccccgtctctactaaaaaatacaataaattagccaggtgtggtgttgggcgcctgtagtcccagctactcaggaggctgaagcaggagaatggcatgaacccagaaggtggagcttgcaatgagttgagatcacgccactgcattccagcctggataacagagccagactccatggcaaaaacaaacaaacaaacaaacaaacaaacgaacaaaaatcaccagaaaaaaaaaaattagactccactttctcttgtgaacataagtacaaaactaccaaatgaactaggagcaagcccatctcaaccatacataatatggtattaatcatttatcacaacaaagttgatttaattccagaaatgcaatgttcaacattcaaaagccaatcactgttaagttaccttatcaacataaaaagataagaaaaaacaytgctcaatcaagaaagaaaaaagcaattgatacaattcagtacctattcataaatcttaaaacctgtctaacagagaggaagcaacatgtgagttaaacactcccccagctgagaatagtgacataacttatttgcagccaaaagatgaaaattgcaggccaggcgcggtggctcacgcctctaatcctagcactttgggaggcagaggcgggcggatcacaaggtctggagttcaaaaccagcctggccaacatggtgaaatctcgtctctactaaaaatacaaaaagaaatgagccgggcgtggtgtcatgcgcctgtattcctagctattagggaggctgaggcaggagaatcgcttgaaccatggaggcggacattgtgacagtgagccgagattgtgccactgtactccagcctggcaacagagcaagactgcgtttcaaaaaaaaaaaaaaaaaaggaatgaaaattgaattgcagtataatcttacaacttttgagaaatctatgtttttcagctaaaaagagagaaactcagccttctgacctttcttctttccctccttggaaggcaatccaaggcctggaaaaacagcagccatattttaaccacaagaataaaaacctggctaagaaagtatcaggaaactgaaaagaaccctggactgccttcctctgaacattttaagtgacaaaaatgaaatctatatttctttaagtcactgaatcagatttattctttctgtggctacatgtagccctaaatgatgtattaaatactaaaataaatactaaaatacacactaaaatactaaaattttggtcttgactcctgatctcaggtgatatgcccatctcagcctaccaacgtgctgggattacaggcatgagccaccacgcccacctcaaaagctttgtgtttttaaatatattagacat

SEQ ID NO: 669274 - DNA, 1408 bp, Homo sapiens
ggagatcgagaccatcctggctaacaaggtgaaaccccgtctctactaaaaaatacaataaattagccaggtgtggtgttgggcgcctgtagtcccagctactcaggaggctgaagcaggagaatggcatgaacccagaaggtggagcttgcaatgagttgagatcacgccactgcattccagcctggataacagagccagactccatggcaaaaacaaacaaacaaacaaacaaacaaacgaacaaaaatcaccagaaaaaaaaaaattagactccactttctcttgtgaacataagtacaaaactaccaaatgaactaggagcaagcccatctcaaccatacataatatggtattaatcatttatcacaacaaagttgatttaattccagaaatgcaatgttcaacattcaaaagccaatcactgttaagttaccttatcaacataaaaagataagaaaaaacattgctcaatcaagaaagaaaaaagcaattgatacaattcagtacctattcataaatcttaaaacctgtctaacagagaggaagcaacatgtgagttaaacactcccccagctgagaatagtgacataacttatttgcagccaaaagatgaaaattgcaggccaggcgcggtggctcaygcctctaatcctagcactttgggaggcagaggcgggcggatcacaaggtctggagttcaaaaccagcctggccaacatggtgaaatctcgtctctactaaaaatacaaaaagaaatgagccgggcgtggtgtcatgcgcctgtattcctagctattagggaggctgaggcaggagaatcgcttgaaccatggaggcggacattgtgacagtgagccgagattgtgccactgtactccagcctggcaacagagcaagactgcgtttcaaaaaaaaaaaaaaaaaaggaatgaaaattgaattgcagtataatcttacaacttttgagaaatctatgtttttcagctaaaaagagagaaactcagccttctgacctttcttctttccctccttggaaggcaatccaaggcctggaaaaacagcagccatattttaaccacaagaataaaaacctggctaagaaagtatcaggaaactgaaaagaaccctggactgccttcctctgaacattttaagtgacaaaaatgaaatctatatttctttaagtcactgaatcagatttattctttctgtggctacatgtagccctaaatgatgtattaaatactaaaataaatactaaaatacacactaaaatactaaaattttggtcttgactcctgatctcaggtgatatgcccatctcagcctaccaacgtgctgggattacaggcatgagccaccacgcccacctcaaaagctttgtgtttttaaatatattagacat

SEQ ID NO: 669275 - DNA, 972 bp, Homo sapiens
cccccctccccttggtcaataattattttttaacgtcctggtgactattactggcaaatactttatttaggacttttgcatccatattcataactgaaactggtctgtagactgttttgtattaatctttgttaggttttttttatctttaagaataatatggagaatactcatctttttttaggctgggggggtggctcacacctgtaattccaatcacctgaggtcaggagttcgagaccagcctggccaacatggcaaaaccctgtctttactaaaaatacaaaaattagccaggcgtggtggcgcacacctgtaatgccagctacttgggaagctgaggcagaagaattgcttgaacccgggaggcggaggttgcagtgagcsaagattgcaccattgcactccagcctgggcgacagagcaaaactctatctaaaaaaaatcaccttttttaaaacatttagaaccatttttaaaacattctaattatttgctttttataggtttagtagaaatattctaaaaacaactaacctgctctttcttagaggtagaagaaaataacttctctcatgaacatgagcagagaggtgaatgaacatgaacatgaacagagagatgaataaagatctagttggctgaaagggtcatcggtataagactctttcagctctttatatttattactaatgaatatatggctttttatgtacccgaaggacagtttggatataaaatctttagcatgtatttactatatgatataaaatctttagctcatatttactatccttgagattacagcaatcactccactctcttctggcatacagagctgccagcctaatttttttcacctttttatatactggtttgattgttttgcctgagtgcctaaaggattctgccattaccttttaaggccaataatttatatgccttgatgctgacagttcttgatcaatttcc

SEQ ID NO: 669276 - DNA, 972 bp, Homo sapiens
cccccctccccttggtcaataattattttttaacgtcctggtgactattactggcaaatactttatttaggacttttgcatccatattcataactgaaactggtctgtagactgttttgtattaatctttgttaggttttttttatctttaagaataatatggagaatactcatctttttttaggctgggggggtggctcacacctgtaattccaatcacctgaggtcaggagttcgagaccagcctggccaacatggcaaaaccctgtctttactaaaaatacaaaaattagccaggcgtggtggcgcacacctgtaatgccagctacttgggaagctgaggcagaagaattgcttgaacccgggaggcggaggttgcagtgagccaagattgcaycattgcactccagcctgggcgacagagcaaaactctatctaaaaaaaatcaccttttttaaaacatttagaaccatttttaaaacattctaattatttgctttttataggtttagtagaaatattctaaaaacaactaacctgctctttcttagaggtagaagaaaataacttctctcatgaacatgagcagagaggtgaatgaacatgaacatgaacagagagatgaataaagatctagttggctgaaagggtcatcggtataagactctttcagctctttatatttattactaatgaatatatggctttttatgtacccgaaggacagtttggatataaaatctttagcatgtatttactatatgatataaaatctttagctcatatttactatccttgagattacagcaatcactccactctcttctggcatacagagctgccagcctaatttttttcacctttttatatactggtttgattgttttgcctgagtgcctaaaggattctgccattaccttttaaggccaataatttatatgccttgatgctgacagttcttgatcaatttcc

SEQ ID NO: 669277 - DNA, 972 bp, Homo sapiens
cccccctccccttggtcaataattattttttaacgtcctggtgactattactggcaaatactttatttaggacttttgcatccatattcataactgaaactggtctgtagactgttttgtattaatctttgttaggttttttttatctttaagaataatatggagaatactcatctttttttaggctgggggggtggctcacacctgtaattccaatcacctgaggtcaggagttcgagaccagcctggccaacatggcaaaaccctgtctttactaaaaatacaaaaattagccaggcgtggtggcgcacacctgtaatgccagctacttgggaagctgaggcagaagaattgcttgaacccgggaggcggaggttgcagtgagccaagattgcaccattgcactccagcctgggcgacagagcaaaactctatctaaaaaaaatcaccttttttaaaacatttagaaccatttttaaaacattctaattatttgctttttataggtttagtagaaatattctaaaaacaactmacctgctctttcttagaggtagaagaaaataacttctctcatgaacatgagcagagaggtgaatgaacatgaacatgaacagagagatgaataaagatctagttggctgaaagggtcatcggtataagactctttcagctctttatatttattactaatgaatatatggctttttatgtacccgaaggacagtttggatataaaatctttagcatgtatttactatatgatataaaatctttagctcatatttactatccttgagattacagcaatcactccactctcttctggcatacagagctgccagcctaatttttttcacctttttatatactggtttgattgttttgcctgagtgcctaaaggattctgccattaccttttaaggccaataatttatatgccttgatgctgacagttcttgatcaatttcc

SEQ ID NO: 669278 - DNA, 972 bp, Homo sapiens
cccccctccccttggtcaataattattttttaacgtcctggtgactattactggcaaatactttatttaggacttttgcatccatattcataactgaaactggtctgtagactgttttgtattaatctttgttaggttttttttatctttaagaataatatggagaatactcatctttttttaggctgggggggtggctcacacctgtaattccaatcacctgaggtcaggagttcgagaccagcctggccaacatggcaaaaccctgtctttactaaaaatacaaaaattagccaggcgtggtggcgcacacctgtaatgccagctacttgggaagctgaggcagaagaattgcttgaacccgggaggcggaggttgcagtgagccaagattgcaccattgcactccagcctgggcgacagagcaaaactctatctaaaaaaaatcaccttttttaaaacatttagaaccatttttaaaacattctaattatttgctttttataggtttagtagaaatattctaaaaacaactaacctgctctttcttagaggtagaagaaaataacttctctcatgaacatgagcagagaggtgaatgaacatgaacatgaacagagagatgaataaagatctagttggctgaaagggtcatcggtataagactctttcagctctttatatttattactaatgaatatatggctttttatgyacccgaaggacagtttggatataaaatctttagcatgtatttactatatgatataaaatctttagctcatatttactatccttgagattacagcaatcactccactctcttctggcatacagagctgccagcctaatttttttcacctttttatatactggtttgattgttttgcctgagtgcctaaaggattctgccattaccttttaaggccaataatttatatgccttgatgctgacagttcttgatcaatttcc

SEQ ID NO: 669279 - DNA, 962 bp, Homo sapiens
cttgcacctgtggcctcagctacacaggaggctgaggcaggaggatcacctgagcccagaaggttgagactgcagtgagccatgtttaatgtttacaccactgcactccagcctggtgacagtaagaccctgtcccaaaaaacaaaacaaaacaaacaaaaaaatatatatatacacacacatacacacatatatacatataataattgaactgtgtacttagaataggtgtatttcgtgtgtgcaaaatatacctaaaatttttttaaaccaatgaattattttcttagtattcaatccatcagaaacaaaaattggttcagaacactaaacgtaccatgtatctgagttcatttctacttctcatttcccccaaataaatatctcttaaaatacaaatttttagtcaaatatcctcaccttgtttctataatttcttccaactatatttgctasagcttcataaatacagtgtccaccaaaaatagttgtaagtgtgtgtctacattttccattttatatactcttggcatttagctctaagctcagaaactaaaatgttcataaactaaagaacaaccaaacggaaaactttaggctctaaaattaagctctacctacccatttgccaaagtggtggcttctctcatctgagcaattgatctgttaacaaatcggctttcctctgatcacaggcagccaaagactgccgcactgacacaggcaccatcttctcaagcagatctaagattaggaagagaaattacaacaaaattttaagacaaaaacccgaactgtaaaagtgactattcatgttttctttccaatattcacacatctatacatatttgatatttaaagatcaaagtatcaatagtctattgacatttaaagatcaaaactaaatcactatttaaagcacaatgataaagagaatttttagatcactacattcacggaca

SEQ ID NO: 669280 - DNA, 1246 bp, Homo sapiens
aaaatttgaggggattttttagacagattttggggttcccttttcaaggttcctgccccaattttcagttgatctggcatttccaaatttcaacttctgagtgttttagaatgggaagaatgctgctttatactgacactcgatattccccatgtactgcacagactaatgccctcatgaaaaaaagctggataaatgtggatcttacccactatttttcccatctttcaagaattgtataccttcctgtgttttcatgctattttggttgctttccagggtctttgaaaagaatctcttccttgtccagagtttatagttgttatttgcaacagggtctgtccaacataagctactgtgtcacttccagaagctagaagtccctcttttattttttgattattatctttgaaaagtatggaatcttcctggatcaactattttcagcagattcatgcagcatttaagtcaaagccatatcccagcaatttttctgtgtgacacaggattttatagacagtctaggtaagagataataagtagtagcaataaaggtagtgacaagtggtcaaattccattttcttttattaactattttatgtgccaatattctgttgttagagagttcagacaagctataagaaactaaattatcttttctctttcggcatttctcaaaacttttaaaatcaaaagaatggcatgtatttttagtracagaaaaatatgctttgacaaattgttctttatttcctgtttccaaaaagagcttacggttgtctggtgcaagcatcatagacattgcagatttctggctacatttctatcccctctcttccatgcacagcccaagttcagctaaattgtctgacaaaaattttcatagatgctatgtagagaattgctgaaaggaagatgagtggaatctgtgagaacagagtcacctccagtgcctaaataagaaatgatttctgtaaagaatatctaggaagaaaatcaataaattgttcacgattgattagtctgcagggagtaatgtggatgaacttaagtttctggcttgtgcaatgaaatggatggtgttgtcaagccctgagacaggaaacagtagatataagagaggaaaacatatacgattttcagctttggagtatgagatgtccttgagatttttatttagaggcacctatctaatctccatctgcagtattgcctccatttttttctacatcatatgcatcttat

SEQ ID NO: 669281 - DNA, 631 bp, Homo sapiens
tgattacctgctgcattaggtacaaggtttacaggacaaagtaatattttaatttaatagcagtggttacttatatgatatcttgagtaaatttaataaataggaatccattatatccaaattaccatttcaacatgtaagtattagaaaaattactaatgagatagtttccatttctttgaaggctttcaaagccttcagaattcagtgtgtgttttatacttataaaacatcttatttyaagagctaaatttttactagacatacttgagatacattagatttcataaaacttatatttataagagtagtttcacatacctaaattgtttgaaacatatttaaaagtttccgcagctcaaccatcaataaatcatttttctcttacatttgcatctactttgacaattctttatcttagcaaaagcatatcaacttgaaaactatctctgtccaagtgtatttaaatagcattttaatttaaaattattaacatcaaattcaaatttgagttgaaaagcaactccctaaatttatcaatataaagaagtgtttctttttttttttttttgagatggagtctcactctgtcacccaggctggagtgcagtggcgctatctcggctcactg

SEQ ID NO: 669282 - DNA, 596 bp, Homo sapiens
cagcctcctgagtagctgggactacaggcacacatcaccatgccaagctaattgttgtatttttagtagagacaggatttcactatattggccaggctggtgtcaaactcctgatgtcgtgagtggcccatctcagcctcccaaagtgctgggattacaggcgtgagccaccgcgcctgaccgggcatttctttttttatgttaaataatttattaggatattctgttcaaccaatcaaaagaagtaattaatatgcccttgattaagaggtctagacaagacattttcatgctaggagtatcaccataagcctaatttatcatgaagcgattatgcacctgttccaaaatttcatattattccctatatttcacttttaataacctatatacatcaagctataagacattagttatgaccaataaactaatatgtmagtcaagctttaaaatttccttgatgacagactgcacacattacaataggatcttatcctaatagtaatgtatgatttgttgttttattttaaattgatatataaaactgtatatattatgcacaacatgatgtttgaagtatatatagtatacattga

SEQ ID NO: 669283 - DNA, 767 bp, Homo sapiens
ccctgtaagatatcaagtggctttacattggaagcacatataaatattacttattttcaaggatggcaaaatgacattattaactctgattgttcctttctcctttgggaagaaaaaaatgagcgtatgccgtgagaaatgaacagatagaaaggaaaaaaaaacctcatctccctttgtatctattgttcccctacaaatagaactataattctgatttgaaaagaaggatagctttagaaaaagaatctaaaatttctttcagttattactgcatgtcatagcttctatctagttttatgtgatgccagtagaaactggcaatgaaacgkttaaaatacaagtctattcaacatgccgttggaactctaatatttgttcctttcatccaaaaagacactgtacaagtgagaaacagatctttctcgcaaagtgtagatagatatgcaatccagccactttccactcaaacagaacatggattctattattttaatctcaggcatttcttttttttttttttttttttttttttttttttttggaaatgaagtctcattctgttgcccaagctggagtgcaggggggggatctgggttcactgcaacccccaacccccacttcccaggttcaagcgattctcctgcctcaccctcctgagtagctgggactacaggcacacatcaccatgccaagctaatggttgtttttttagtaaaaacaggatttcactatattggccaggctggggtcaaactcctgatgtc

SEQ ID NO: 669284 - DNA, 767 bp, Homo sapiens
ccctgtaagatatcaagtggctttacattggaagcacatataaatattacttattttcaaggatggcaaaatgacattattaactctgattgttcctttctcctttgggaagaaaaaaatgagcgtatgccgtgagaaatgaacagatagaaaggaaaaaaaaacctcatctccctttgtatctattgttcccctacaaatagaactataattctgatttgaaaagaaggatagctttagaaaaagaatctaaaatttctttcagttattactgcatgtcatagcttctatctagttttatgtgatgccagtagaaactggcaatgaaacggttaaaatacaagtctattcaacatgccgttggaactctaatatttgttcctttcatccaaaaagacactgtasaagtgagaaacagatctttctcgcaaagtgtagatagatatgcaatccagccactttccactcaaacagaacatggattctattattttaatctcaggcatttcttttttttttttttttttttttttttttttttttggaaatgaagtctcattctgttgcccaagctggagtgcaggggggggatctgggttcactgcaacccccaacccccacttcccaggttcaagcgattctcctgcctcaccctcctgagtagctgggactacaggcacacatcaccatgccaagctaatggttgtttttttagtaaaaacaggatttcactatattggccaggctggggtcaaactcctgatgtc

SEQ ID NO: 669285 - DNA, 977 bp, Homo sapiens
tgccatttttatgttaattttttttttttttaagagacagggtctggctatgttgcccaggctagcctcgaaaccctgggctcaagtgatcctcccacctcagcttcccaaatagctggcacttcaggcaggcgccaccatacccagctgtaaatgtttgttgttttaagcactgagactggggtagtttggtacacagcaatcaataaccaaaacaagcacctaggcaagactctgagaggctgtgaaatcgtctcatcctctatggctgaggcatgagaaggctatggcttccctgggccatagaagcagccagtagtaaggatttctttgaaaagagatgtgggtctgctgagccaggctactcctgccccatctcacccatcccacaccccactgggctggaaggagtgcttccacatcacctcaactagtgcgggaagtgttgagagaacacatagagtatctgaagtgtgttccctgaggtttggaggaacagggctggtacctgtctccctgggaaactctaaaagggagaggttctgcctcggggtgactccgtcaggcagcagagcctgatgagagtgagagggcaaggggcaagcctgtttcccaggatccaggtggacactggcaggaggaggctggatttgggggcccttgaaagggacatgggtgaaagagctttctggagctgtttgacccagtgaagagggacactcaagtgtttctcccacctcgacctcccaagtagctgggactacaggcacgtgccaccacgcccactaactgttgtattttttttgtagagatgaggtctcgctatgctgcccaggttggtcttgaacttcttgattcaaacgatcctccaacctcacctcccaaaatgttgggattacaggcatgagccaccagcccccagtcaatatcactatcttttttatatttatgtattttttacaactttttwaataaaa

SEQ ID NO: 669286 - DNA, 644 bp, Homo sapiens
tgttggccaggatgctcttgatcctcctgactctgcctcccaaagtgctgggattacaggtgtaagccacacccctagactttttgtccttttttttttttttttttttttttggkatccagccttttatttgtttttttaaagttaaaaagtagcacacacttattttgttacaaacaaagcagatatataaggaaaaagttgattgatcagtccactctcccctaataactccttttgacaagtaaacaatgtcaaaagtttgactcagactgtctgtccacgaccatcctcacacatacaaatctgggtgtttttgtgttgtgtggctgttgttttacagaaccagaatcacacatatcaatctgcaactttttcctcttcatgtattatggaatccctccaaaccaatccatagggatctcacccatcatatttattagcaagacaaatattccacaggatgggtaaactgaattgattcagctattcccctactgggagatatttggatggtttcccattttccaccccttgaaacaaagcttccaaacccattcttttgcttgtattcaccagatctcttatttcagaaagattccttacagtagaatgcatcattcaaagatatctctatgtatttt

SEQ ID NO: 669287 - DNA, 644 bp, Homo sapiens
tgttggccaggatgctcttgatcctcctgactctgcctcccaaagtgctgggattacaggtgtaagccacacccctagactttttgtccttttttttttttttttttttttttggtatccagccttttatttgkttttttaaagttaaaaagtagcacacacttattttgttacaaacaaagcagatatataaggaaaaagttgattgatcagtccactctcccctaataactccttttgacaagtaaacaatgtcaaaagtttgactcagactgtctgtccacgaccatcctcacacatacaaatctgggtgtttttgtgttgtgtggctgttgttttacagaaccagaatcacacatatcaatctgcaactttttcctcttcatgtattatggaatccctccaaaccaatccatagggatctcacccatcatatttattagcaagacaaatattccacaggatgggtaaactgaattgattcagctattcccctactgggagatatttggatggtttcccattttccaccccttgaaacaaagcttccaaacccattcttttgcttgtattcaccagatctcttatttcagaaagattccttacagtagaatgcatcattcaaagatatctctatgtatttt

SEQ ID NO: 669288 - DNA, 631 bp, Homo sapiens
atttcacccggatgtacaaccaaactcccgaatatgaaacatgctgcccacagcaatgatcagctgcatacccagccatcttytcaaagataaaaatcagatttaaccgggtcatgaataaagtaatgaagatgtgaaaaatgtctacctctatcagggaaccaggtggggcaggccttcctctaggctgcattggagtactttgctttttctcctgaatttagccccatcccaaagacccatttaaactcaatccctctctttccaacacatctttttccttctcttctcctttcttctccttttctcttattttccagccttttctctcttctccaggcttttgggttgatactgaggacaatgtcactcagcagggagccaggcagcatggcacaggtgcatctgactctcctgcagggtttgttaaaacacaggtggctgattagccaggcgtggttgtccgcacctctagtcccagttactcaggaggccgaggcaggagaatcgcttgaacccaggaggcagaagttgcagtgagccgagatcacaccactgtactccagcctgggcgccagagcaatactccatctcaacaaaacaaaacaaaacaaaacaacaacaacaacaa

SEQ ID NO: 669289 - DNA, 2817 bp, Homo sapiens
tgttgcccaggcttaaactcctgacctcaagcaatcctcctgctttggcctcccaaagtgctgggattacaggtgtgagccacctcacccagcctagatcccttccaaaatcgacttgctgtttagttattttgaatggcctttggtagtgaaagcttttgaaaatagtcaacaggctgcctaaaaacactagccttctgagatcagatgatattgggcgcattcagggtggcatggccgtagactaaaaacaccagccttaatgtgtgtatacagcacagacaaatgcaccagccacctgccatcttcccccacattcccccaaaccctgccctgggaactaccctctttcaaatcctgatcaaaattagtagggaacaaggaaatttaggcccttttgatcaggaacttcattttgacttccaaaatattttgacctttgaaaatattctagaacaagatcctaacttatctctcagtgttgatggtctcctatgaacgcccaagtcaacaaatgtttattgagcacagaccatgtcaggcactgggagttacagagagaaccaagacccagccccacccttgaagagcacaatgacttactaaaatccagaaaagacttttaaatacacaatgacctggcctctaaacagtcttgaagaaacattcaacatttaagctttaaaatactctttctggccaggcgtggtggctcatgcctgtaatcccagcactttgggaggccgaggcaggcagatcacccgaggtcaggagttcgagaccagcctggccaacctggtgaaaccccatctctactaaaatacaaaattagctggacgtggtggtgggtgcctgtaatcccagctacttgggaggctgaggcaggagaatcgcttgaacccgggaggcagaagttgcagtgagctgagattgcaccattgcactccagcctgggagacagcaagactccgtctcaaaataaataaaataaaataaaataaaatactctttcccagacttaaccttctttcttttggtaccttaccttgccaaaagagggttttgttgttgttgttgttgttaaatattaaaatgtcagggatgttctttcttttaagagattgctcaacagggccttatgtttctcaaaagagaacttacatacaaattcagtaacttcatggaatagaatgagaggcactatcaagcaggcttgaagttgagtgacattaaatctacttttcagacttaattaagcctgaagcccacaaataccctcactcccaaatcaccatttattgtggaagataaaagcaaatgacttaaaataaagaagaaaacctgcaaaacaacatcttagcgttctgtcagaaaacacggagtcctctgaggacagttaataacaaaattaatcccaaagagctaatacccaccccctgtactgctgtagagtagctaatcacgatttcctcttgcctgaaggctgtttctggaaacaaggacaggtcctgcccttcccaggtgagcactctcaggtgggttgggactgctgctaggccactgtttcttaagactgccttcttttccaggctcagggaaacaccattgccttttcctagattgctgagaatttccagaggcctacggccaaagcatcttcttctgtggcatatgtaagttcatggatggatcgcttgctgccctcaagtgtggtcgctgctcagcactctgtgaacccggaaagaaatcttagccccttagagtgaccattaaaagcctctcacaaaggaatctgtgtgtgtgtgtgtgtgtgtgtgtgtgtgtgtgtgtgtgtgtgtgtgtgtagagagagagagagcatgtgtagcaagcttgattaatggtttggtaaaatggaggagtcttatattccagcaacacaacatcaaacattttagcaagctctgytcttacaaatctttctgccaccccacttgtggccagaagggtttgctcctactctccctccttgaaattgcatttgcaaaaattagaacagtgagaaaattatgataatgaaagagatctgatctaacaaactccctcttgccgctaaccttcaaactgcacttgatcattcctgggtgtagcccaagctaactttgggagaattttaatttatagcttaaataatagtccttcctaaaactaaactgcctttgtaaaagtaatgaaagactactaggtttggaggatgagaggggtctgaattctgctaaaatgtaggcatagttaattaccagccattgttctggaggtcataacatttgtgacttccccaattacttctgtaaataacattactattgtagaacttaagcttggccttttgagatgtcttttcagacttttgcatttctgatgaccgggtgactccactgggaccagagactcaaccctcaacaggtcctgtggcccccacctagaagtggactcagcgcacaaagaccatttccacacccctatgactgtatccccaaccagtcagcagcagccattccctagcccctcctgccaaactatctttagaaaactctagcctccaatttttggggaggctgatttgagtaaccaaaaattccagtctcctgtttagccagctttatgtgcattaaactctttctctattgcaattcccctgtcttgatccattggctatctgggcagcaggcaaaatgaaccaatcatgcagttacatcctctctcctcactcccctttttatcttcttctcttcttttgacctcaaattcaagttcttcccattggattgcaacacc

SEQ ID NO: 669290 - DNA, 2817 bp, Homo sapiens
tgttgcccaggcttaaactcctgacctcaagcaatcctcctgctttggcctcccaaagtgctgggattacaggtgtgagccacctcacccagcctagatcccttccaaaatcgacttgctgtttagttattttgaatggcctttggtagtgaaagcttttgaaaatagtcaacaggctgcctaaaaacactagccttctgagatcagatgatattgggcgcattcagggtggcatggccgtagactaaaaacaccagccttaatgtgtgtatacagcacagacaaatgcaccagccacctgccatcttcccccacattcccccaaaccctgccctgggaactaccctctttcaaatcctgatcaaaattagtagggaacaaggaaatttaggcccttttgatcaggaacttcattttgacttccaaaatattttgacctttgaaaatattctagaacaagatcctaacttatctctcagtgttgatggtctcctatgaacgcccaagtcaacaaatgtttattgagcacagaccatgtcaggcactgggagttacagagagaaccaagacccagccccacccttgaagagcacaatgacttactaaaatccagaaaagacttttaaatacacaatgacctggcctctaaacagtcttgaagaaacattcaacatttaagctttaaaatactctttctggccaggcgtggtggctcatgcctgtaatcccagcactttgggaggccgaggcaggcagatcacccgaggtcaggagttcgagaccagcctggccaacctggtgaaaccccatctctactaaaatacaaaattagctggacgtggtggtgggtgcctgtaatcccagctacttgggaggctgaggcaggagaatcgcttgaacccgggaggcagaagttgcagtgagctgagattgcaccattgcactccagcctgggagacagcaagactccgtctcaaaataaataaaataaaataaaataaaatactctttcccagacttaaccttctttcttttggtaccttaccttgccaaaagagggttttgttgttgttgttgttgttaaatattaaaatgtcagggatgttctttcttttaagagattgctcaacagggccttatgtttctcaaaagagaacttacatacaaattcagtaacttcatggaatagaatgagaggcactatcaagcaggcttgaagttgagtgacattaaatctacttttcagacttaattaagcctgaagcccacaaataccctcactcccaaatcaccatttattgtggaagataaaagcaaatgacttaaaataaagaagaaaacctgcaaaacaacatcttagcgttctgtcagaaaacacggagtcctctgaggacagttaataacaaaattaatcccaaagagctaatacccaccccctgtactgctgtagagtagctaatcacgatttcctcttgcctgaaggctgtttctggaaacaaggacaggtcctgcccttcccaggtgagcactctcaggtgggttgggactgctgctaggccactgtttcttaagactgccttcttttccaggctcagggaaacaccattgccttttcctagattgctgagaatttccagaggcctacggccaaagcatcttcttctgtggcatatgtaagttcatggatggatcgcttgctgccctcaagtgtggtcgctgctcagcactctgtgaacccggaaagaaatcttagccccttagagtgaccattaaaagcctctcacaaaggaatctgtgtgtgtgtgtgtgtgtgtgtgtgtgtgtgtgtgtgtgtgtgtgtgtgtagagagagagagagcatgtgtagcaagcttgattaatggtttggtaaaatggaggagtcttatattccagcaacacaacatcaaacattttagcaagctctgctcttacaaatctttctgccaccccacttgtggccagaagggtttgctcctactctccctccttgaaattgcatttgcaaaaattagaacagtgagaaaattatgataatgaaagagatctgatctaacaaactccctcttgccgctaaccttcaaactgcacttgatcattcctgggtgtagcccaagctaactttgggakaattttaatttatagcttaaataatagtccttcctaaaactaaactgcctttgtaaaagtaatgaaagactactaggtttggaggatgagaggggtctgaattctgctaaaatgtaggcatagttaattaccagccattgttctggaggtcataacatttgtgacttccccaattacttctgtaaataacattactattgtagaacttaagcttggccttttgagatgtcttttcagacttttgcatttctgatgaccgggtgactccactgggaccagagactcaaccctcaacaggtcctgtggcccccacctagaagtggactcagcgcacaaagaccatttccacacccctatgactgtatccccaaccagtcagcagcagccattccctagcccctcctgccaaactatctttagaaaactctagcctccaatttttggggaggctgatttgagtaaccaaaaattccagtctcctgtttagccagctttatgtgcattaaactctttctctattgcaattcccctgtcttgatccattggctatctgggcagcaggcaaaatgaaccaatcatgcagttacatcctctctcctcactcccctttttatcttcttctcttcttttgacctcaaattcaagttcttcccattggattgcaacacc

SEQ ID NO: 669291 - DNA, 626 bp, Homo sapiens
ccagcctggacaacaagagtgaaactccatctcaaaacaaaacaaaaaagaaatgaaggtagagctatgatctttcttatccatatagttacaggaaggtcttggaaacatatagtacatactcaataaacatttgttcattgaatgaatggatgaatgaggtttttttctctaaaaagttagtctggtggcactagttcatgatgtggtggtctccaccaagtcacaatctgatatggaatatctgaatgtgcatgtttgtgtttgcatgtgtttgttacagtttttagagacagcatgtgaaatagtgaccaagaaaggctctggagtcagattccttggatttgaacctcagctctgcatttactagcttcatggccttggaaacactgcttaattmtctatgccttagttttctcatcagtaaaaggaggataacaatagcactcactttataggataattgtgaagattaaaagagctattcatgcaaataacatcataaatttgcttaatatagttcctgccgaggcatctgtttttaggcctgacataagttatttgaaacctagtcatactccatgacctttggcctagttacatcttccccttccagtgtgattgtt

SEQ ID NO: 669292 - DNA, 653 bp, Homo sapiens
  misc_feature 284, 285: n = A,T,C or G
tggctgggcacagtggcttacgcctataatcctagcactttgggaggccgaggcgggagatcacgaggtcaggagatcgagaccatcctggctaacctggtaaaaccccgtctctactaaaaataaaaaaattagccgggcgtggtggcaggtgcctgtagtcccatctacttgggaggctgaggcaggagattggtgtgaacccaggaggcggagcctgcagtgagccgagatcatgccactgcactccagcctgggcaacagagcaagactccgtctcaaannaaaaaaaaaaaaaaaaaaaagggaaagaaaaaattacaacctaacttgataaaggtttgccatttaaagctggtaaaatataaaaaagaaatgtaaattgaaagcaaatgcttacagaattctcagattgcaggggacatagtctgaaaaataccagtttaagagaaaatgaatgagagggtttgtgcagctcaaagcaaaatgatctcctcctttgatttgcttgctsaattagtctcagaggatgagtgtccaatatgtacagaaagatgtttttaattggagaataacctggaaactccatgctactgaactatgtgtcagaaatggtaacaaaaaccactgaggacttactctgtgctagaccc

SEQ ID NO: 669293 - DNA, 1168 bp, Homo sapiens
gaatgcgactgtatttagaaataggattcaaaagagttaactaagggtaaatgagttcactggaacaggctctaattcaatatgactggtattgttaaaagaagagatcagggcacagacacaggaggaaaatcatgtgaagacacagggagaagatggccacccacaaggcaaggagagaggcctcaggagaaaccaatcctgctgacatcttgatctcggccttctagcctctggaagtgtgaggaaataaatttctgttgtttaacctacccagtcagcggttctttgttatggcagccctagcaaactaatacaaccagtataccagacactcttctattttaaaaaaaggtaatcaaagcttagaagtttcaatactattgtcccaattcgtagaaatctctggaatctatatgttcattgttcctctgtcttgccacttcccaaaatatattgtccaattaaagagctaaagtcagcatggaaactggactaaactgaacattgtctttatttcagggctttggggtcttactgcctactctgtagaaatacttcactgcttttaatatccattgctaagtctgtgttagcaaattatcccaaaatgtagtggcttaagataattatatacatttgttatctatcacagtttctgtaggtcaagaatcggggatggcttagctacattgttctggctcagggttgtcagaggttacagtcaagatatcagctagggttgccgtcatctgaaggcttgattgaggctggaagatctacttccaagtagctctctcacttggttggcatcgtggtgctagctgttggcaaaaggtgtagttctcagcatgtagacctccgcatagacctgcttgtgcatcctcacaacatgacaactggcttccctcagagtgagtgatccaagacggatcatgctggaaacaataatatcttttatgaggagtcttggaaattacacaccatygtttctacaccatcctactggttatatagatcaactctagtcaaaatgagcagacactacatgaggacatgaatatccaagagcaaaaattattgggtgccatcttggaaatgagctgcttcattgcttcatcccaattttgtgaacatttggaatttgaccttcctccctaacagggac

SEQ ID NO: 669294 - DNA, 962 bp, Homo sapiens
cagatttttatcttatcaccactctatgttggagtgcagtggcacaatctcggctcactgcagcctccaccttccaggatcaagagatcctcccacttcagcctcctgagtagctgcgaccacaggcgtgcaccaccacacctggctaattttttgtatttttttgtagagatgggggtctgatgggggggggggtctcactttgttgcctgggctcaaggkatcctcccacctcagcctcccaaagtgctgagattacaggtgtgagcctctgcacctagccggcttcacatgccttttaactgtggtttttacctcctgtctagatgactgcttcttgagttcagagacatatttagttcatctctgtgtctttcagtgtcttgcgtgtagaaagtgctcaatagacttaatgcattattggtcagctttggttgtcttaatgaccaatccatcacctcacaatttactgccaaagttatatgttttattctgacatctctgatttggttggagtttccacagtgccacagcctctgctttcttcactgcaatgtctgtgcatgctgatgacagattaataaaattggatgtcccagccattgaaattcccttttgcctccctccaaccccccgcatcagagtcttattcccattcagtctcatgacagaatttcacaggtaactctgctatctgcagctcaaagaagccactcttggtgacaatgagctgaccattaaaatgggctgtaaatcaaaaggatagcacagctatcccaattgttgaggattttagaatgctgcttaggttattgataggtttatgtccaaatgcactctaattgaggaatctctgatgaattcattcaacattcttttagcaaatatttagcacctattgtctgccacaagccatgccacagctagagatggaccaggagacatgacagacacagttcctg

SEQ ID NO: 669295 - DNA, 622 bp, Homo sapiens
ttcacttctttcccaggaaccattcaggwtcaggagctagctctagcattcaggtaccctgcatggggttcccagcttcctccctgttcagtctcagcttcagcatcacctcttcattgagttcggcattttctttctgaagacattcccgaattatggtggtttacttgataatttggtctctctgagtgggagcagtgcctcctggctgcatctaatcagccatcttgttcccccttccccatgtcctgcacttttaaagatgtctacagtgatcaacattatccaataaactgactgagcaataatgcaatataagtattttgtaaaagtggagaaaagtgtagaatgcattatacattaacttgagtaatacaataatatcaggttcaatttgtagaaaattattttggtcatatttaatatgaccaaagataagggaaatagcagcaatgatgatactttattatttcttagtataataatatttcagacttgtggtttgttctttcctctcttttatatatatggatatatagatagatactgatattttattttgtgctgccaaaataatcagtctgcttaacttattttttcccaatattcttacattttgcct

SEQ ID NO: 669296 - DNA, 622 bp, Homo sapiens
ttcacttctttcccaggaaccattcaggttcaggagctagctctagcattcaggtaccctgcatggggttcccagcttcctccctgttcagtctcagcttcagcatcacctcttcattgagttcggcattttctttctgaagacattcccgaattatggtggtttacttgataatttggtctctctgagtgggagcagtgcctcctggctgcatctmatcagccatcttgttcccccttccccatgtcctgcacttttaaagatgtctacagtgatcaacattatccaataaactgactgagcaataatgcaatataagtattttgtaaaagtggagaaaagtgtagaatgcattatacattaacttgagtaatacaataatatcaggttcaatttgtagaaaattattttggtcatatttaatatgaccaaagataagggaaatagcagcaatgatgatactttattatttcttagtataataatatttcagacttgtggtttgttctttcctctcttttatatatatggatatatagatagatactgatattttattttgtgctgccaaaataatcagtctgcttaacttattttttcccaatattcttacattttgcct

SEQ ID NO: 669297 - DNA, 577 bp, Homo sapiens
tggaagtgagaaaaaggtccagatactcccttcagtcactcatggatgctgcaggctgagcagtaaataactctcaggttttctctttgccagcttccccaacatcttctggcttccagcacatttacagttgtctctggtccaagttactggaaagagacctcctcagcgttccagattctacaaggaagttattcttatttaaaaaccacacacatgttgctgctgtggtttagtctatcataatttctcattattcttataatatagtagttcaccatagttttctaagtggtyctccagctctcctcaacctcaactccctgtcaccacctcaagccattagccaaaagtggcttccagaaaaggaaatcttatcaaatcacatccctacttaaactctttcttgaactgtccctgctaataaaataaaggcttccttcatttgaattctctgtgcaaatgccttatcagacaccaccctatctcaaatagcacctaccccttactctgtgtctccttacattggttgattttcatcctgagcacttaacactgatacaggaggggggcaggg

SEQ ID NO: 669298 - DNA, 577 bp, Homo sapiens
tggaagtgagaaaaaggtccagatactcccttcagtcactcatggatgctgcaggctgagcagtaaataactctcaggttttctctttgccagcttccccaacatcttctggcttccagcacatttacagttgtctctggtccaagttactggaaagagacctcctcagcgttccagattctacaaggaagttattcttatttaaaaaccacacacatgttgctgctgtggtttagtctatcataatttctcattattcttataatatagtagttcaccatagttttctaagtggtcctccagctctcctcaacctcaactccctgtcaccaccycaagccattagccaaaagtggcttccagaaaaggaaatcttatcaaatcacatccctacttaaactctttcttgaactgtccctgctaataaaataaaggcttccttcatttgaattctctgtgcaaatgccttatcagacaccaccctatctcaaatagcacctaccccttactctgtgtctccttacattggttgattttcatcctgagcacttaacactgatacaggaggggggcaggg

SEQ ID NO: 669299 - DNA, 1378 bp, Homo sapiens
ctcccaggtttacagaaaagtacattcatttttaaaagataatagagggctaattcataactatacttcatcttgctcaatttttagcaatcaccacaaacaacccatgaaagcaaagcagagtgggacacaaggctatgcagtgcttttcaaagcagaccactgggatagtcacacaactaagtactggctgatcatgaatgtcatgtttgatttgtatcatggtgatcaggaaaacagaatggcaggggttgtayactggagtgcatttcacttgggcttttttcctcaaggtagcaggatgctactgctcaccaccctccatctgactaatcaatggcattcctttgtcacttcatcagaaaggcacctgacagacacacacactgaaagcacatttcatgtagagctacatttgtccatgttacagtcttttcaaaaaattcatttgaaatagaaattatgactattttacatttcacccacagtgaacagtacctaacttattaggtgtctcatgaatttcatgacaatgatcaccttcatttttcttctgattagactccaaataatccttaaccccaaagactttatgttaagataatatgaactatcaacgctacctggatacactttatctataacacttctatgtattttaaatacataatataaaatatgcaaagtacatatttcaagattatataaaatatgtaaagtctaatctataaagttaagtgcagaaatggtttataactaatctaacatagggatttataatagtactagaattatgtcagaaaaagttacatagaatatgctgatattgggactctattttttaaatggtggctaagacaacctaccacaagtatttaactgtgccgtgggtttgtggttctgcacatgaatgataatggaaatggattttggtattaggcaatcctggatttattttctttaatttttaacttttgcaggtacatagtaggtatatatatttataaggtacatgaaaagtcttgatacaggcatgcaatatgaaataagcacatcatgaagaatggggtatgcatcacctcaagcatttatccattgagttgcaaacaatccaattagactctttaagttactctaaaatgtacagttattattaactatagtcaccctgttgttctattaaatactggcagtcctggatttaaaggctaacattgctatctgttaacttgcaatacttaggaaatgcattaacattttcaaatttattatctatcttgaaaacagggatttttggtgaggattattataaacacatcagctaaagaaataaagtgaattgaataatatccactttgcacattgcaggtactcggtg

SEQ ID NO: 669300 - DNA, 1378 bp, Homo sapiens
ctcccaggtttacagaaaagtacattcatttttaaaagataatagagggctaattcataactatacttcatcttgctcaatttttagcaatcaccacaaacaacccatgaaagcaaagcagagtgggacacaaggctatgcagtgcttttcaaagcagaccactgggatagtcacacaactaagtactggctgatcatgaatgtcatgtttgatttgtatcatggtgatcaggaaaacagaatggcaggggttgtacactggagtgcatttcacttgggcttttttcctcaaggtagcaggatgctactgctcaccaccctccatctgactaatcaatggcattcctttgtcacttcatcagaaaggcacctgacagacacacacactgaaagcacatttcatgtagagctacatttgtccatgttacagtcttttcaaaaaattcatttgaaatagaaattatgactattttacatttcacccacagtgaacagtacctaacttattaggtgtctcatgaatttcatgacaatgatcaccttcatttttcttctgattagactccaaataatccttaaccccaaagactttatgttaagataatatgaactatcaacgctacctggatacactttatctataacacttctatgtattttaaatacataatataaaatatgcaaagtacatatttcaagattatataaaatatgtaaagtctaatctataaagttaagtgcagaaatggtttataactaatctaacatagggatttataatagtactagaattatgtcagaaaaagttacatagaatatgctgatattgggactctattttttaaatggtggctaagacaacctaccacaagtatttaactgtgccrtgggtttgtggttctgcacatgaatgataatggaaatggattttggtattaggcaatcctggatttattttctttaatttttaacttttgcaggtacatagtaggtatatatatttataaggtacatgaaaagtcttgatacaggcatgcaatatgaaataagcacatcatgaagaatggggtatgcatcacctcaagcatttatccattgagttgcaaacaatccaattagactctttaagttactctaaaatgtacagttattattaactatagtcaccctgttgttctattaaatactggcagtcctggatttaaaggctaacattgctatctgttaacttgcaatacttaggaaatgcattaacattttcaaatttattatctatcttgaaaacagggatttttggtgaggattattataaacacatcagctaaagaaataaagtgaattgaataatatccactttgcacattgcaggtactcggtg

SEQ ID NO: 669301 - DNA, 600 bp, Homo sapiens
aacaccacatgttctcactcataagtgggagttgaacaatgagaacatatgggcacatggaggggaacgtcacacaccagggcctatcaggggttggcaggcaaggggagggatagcattaggagaaatacctaatgtggatgacgggttgatgggtgcagctagccaccatggcacatatatacctatgtaacaaacctgcacgttctgcacattgtatctcagaacctaaagtataataatttaaaaaaaggaaaaaaaagcataattatttttatattaacactagcatttcatatcttaaagcaactgatgtttaggaattactacacgtggtggctcatgcctgtaatcccagcactttgggaggcccgaggctggtggatcacatgaggtcgggagttcgagaccagcctgaccaacatggagaaaccccagctgtactaaaaatacaaaattagcaaggtgtggtgacacatgcctgtratccctgctactccagaggctaaggcaagagaatcgcatgaacccaggaggcagaggttgcactgagccaagatcgtgctattgcagtccagctttggcaacaagagcgaaatc

SEQ ID NO: 669302 - DNA, 658 bp, Homo sapiens
attctgaagcttggcggagaggggtgtgtgagtggacaccagtgaagtaacggtttttgtgttacgatgatttctgttttcctctgctgccctgtaatggcaggaactcggatagtctggtcttcagaccaggaggactcccaggtatggcaaatcttagattaggtaaaactttaggcatcagaatcaacctccttggctgttaattttgagcaacttgcctcagtttctcagcttaaaaatgaagatgaaaaatgagggtgcctgtcttgtgggatttagaggggcagccaacacacagcagcaattcgctggaacgttatatgttcattattttatctttttttttttttttttttgaratggagtttcgctcttgttgcccaggcttgagtgcagtggcgctatttccggcttattgcaacctccacttcctgggttcaagcgattctcctgcctcagcctcccaagtagctgggactacaggcatgtgccaccacatgtggctgattttgtgtttttcatagagacggggtttcttcatgttggtcaggctggtcttgaactcccattctcacgtgatccatccacctcagcctcccaaagtgctgggatgacaggcgtgagccacggagcccagccaagctttggagtttta

SEQ ID NO: 669303 - DNA, 619 bp, Homo sapiens
ttttttttttttttttagacagagtctcactctgtcacccagactggagtgcagtggcatgatctcggctcactgcaagctctacctcccgggttcgcgccattctcctgcctcagcctcccgagtagctgggactacaggtgcccgccaccacgcccagctaatttttcgtatttttagtagagatggggtttcaccgtgttagccaggatggtctcgatctcctgacctcatgatccacccgccccggcctcccaaagtgctgggattacaggcatragccaccgtgcccagccgtagcttgcattttcatggagaaaaccttagtgaccgtgagtctggcaaacaaacactctgaggggacacacagagacctggcctcccaggtggatgcctcagcctgggcccaaccctccatatgaactctgctgtgttttcaggcccttggcctgctctgcttctctctgacccagggccgactcacggaccctttcgttcttcactctggcctcatctctggggcctggagctgggcctcacctccagggtgacttcctgggccccacaaagtctggaaacccaggtaaaggcacaacaaaaggcacgatgactcgcaaag

SEQ ID NO: 669304 - DNA, 596 bp, Homo sapiens
cagcactttggaagtctgcggcaagcagattgcttgagcccaggagttcgagaccagcctcggcaacatggggaaaccccatctctatatctaaaaaagcgtataaagaaaaaaattaatttcgtaaaaaaaataaaggtaggttgtggagaagctaaggctcaggaggggcgggcaggttgcctggaggctcctgggatgtccacacagctctgccacatgtcatgtgcagggtcccacggccacccgccttgaaggcgatgccgaaaygggcatataattgagactggccccccagtgccctcccgaggtcctccttcacagccgcctggcagccggtaacaacacagaccaaggctaagcacctccgccatccagctagctcctgtgctgtaaatcagatggcggcagctgtggaagggccccggccctctgctttctgggcccgctcccagcctcatcactcctgagcagcccctgctccagcgaggagctctgtggagccagctgtggttgcaggcagggccatctgctttggggattgctgctcctttaggaggatgagctgcctgtggtttttacccagagatccagct

SEQ ID NO: 669305 - DNA, 2434 bp, Homo sapiens
taacatcctccaatcacaatttaatacaattttactaacaacatgcggaaataaatggtttgggctgatataacagaaaaaccatagactgggtggcttaaccaatagaaatttatttctcaaagctcttgaggctaggaagtccaagatcaaaatgccagcatatccaatgtctagtgagggcccaacttcttggattgcagatggccttttcattgtttcctcacatgggtgaagaacagagagagtgagggcaaactctcacacctcttcttataagagcactaattcccattcatgaggactcaccttcatgacctagctgcttcccaaaagccctacctcctaataccaccacgatgggggttaggattttaacaagtgaatttggagggagacaaacattcagttcataaaatacccttatggcttaaaaaaaactaaaaatcatattaagtaaaaatcaaattatctttagaatatggtacattctaaatataaaatattgattgttttatattatattataataaatctatgggatatatattataataaatatatattatattataataaatttatgggataaaaataaagcattgctcaaagaaatgctcagagtcttaatagctttaagaaaataggataataagcaaactctacattctactcacaaagttaaaaaatatactcaaaatacccataaaaaaaataatgaggattttaggtagaatgtgcacaagagatatttgcacaaaatgggaaaagacaatagatggaacattatctaaataattaatgaaaaataatatcaatatacaaaaaaatgataataatcctaaaagtaaaataatcacagacatagaggtcatacaactactcaactttctccctctttctttctgtcttatttttgtaactaagtttatttcatttacatttactgaattacaagtgttatggttttagtcctgactaaacaaattttaattttacatctttagttctttatggttatttggtttatatctagtatattacagtctgattttactttccctgtgtgtgtgctgtgtcgttgtgggtgtcctgcagttaaagaaaatacataattataataaattcagttgtaatagttataatgtcatttacactctattatttagactacctattggattctcactaagcacaagaacaaatttaatatcgttctgattgcttcaaattkatttcccactctatcctctaccacataatttaaatgcaattgttattatttgttaataatttttctattgttaattcagatcttttgaggagcagctgcttaaatgggataaatatgcaagaatcagaggggaaaaactttgaagaatagagaggaggcagcaagataaaagtgggggtgaacagagccgttagatcacaagtcatgtctaattcctgtgaatgagagaaggaagatgtggcaagaaatgtcttagaatgcagaggagctctaatgaagtttcagtcagagcaaggggaaattttgggacagtcactccttaagggagtcccacattttgcaggaaaagggcctgcactgttactctacagtgctcaggtatttgctggaaaatcctgcaggaagcatgaacttggcatggatgtaggatacagagcaaccacagctaaggtcatcagctgcttcccatagcaggagaactgactggcctcttttcttggccactacatgctcaaataaatacacttaaacctttatcttagtaatatctaaactttaaattatatttgttgaccaacaatgtgattataaaagatatgctaccttctacttattaaaatttagttattttatgttgtgatttttgtttgtatttttaattcagtcttgagatctctctggaaatgtggccataagccaggatagccactctctaggagagctctgaccagaggaaagtgaggttcaggtgcatgtgtcagatgagacacaatgaggaggtgaaagcaaaatacatgaaacaagaaatttattactcacaggtaccagagaggttatgggaagtccagaagtgacagggagctcagccagtgggtggggagtgagaaaaagagagggcctgtgggatgatgccgttatcaaggtttgtaggtattatcctttaggctttgtatctgaggctgtggattggctagcttaaagaaaaccacaagaagaggggactcatttaaatcactctggtgtggaccattaggtttcatcatggtcagcagctgaaaggtgtgttgggtttgggggtcagtggagtgaaaaacaaacatagacagtgccataaacaatcacataggaagttttaatgaggccaaagatgatgggatataaatgatgggtttgaaacaacttatgtaaggcctaaaaatg

SEQ ID NO: 669306 - DNA, 2434 bp, Homo sapiens
taacatcctccaatcacaatttaatacaattttactaacaacatgcggaaataaatggtttgggctgatataacagaaaaaccatagactgggtggcttaaccaatagaaatttatttctcaaagctcttgaggctaggaagtccaagatcaaaatgccagcatatccaatgtctagtgagggcccaacttcttggattgcagatggccttttcattgtttcctcacatgggtgaagaacagagagagtgagggcaaactctcacacctcttcttataagagcactaattcccattcatgaggactcaccttcatgacctagctgcttcccaaaagccctacctcctaataccaccacgatgggggttaggattttaacaagtgaatttggagggagacaaacattcagttcataaaatacccttatggcttaaaaaaaactaaaaatcatattaagtaaaaatcaaattatctttagaatatggtacattctaaatataaaatattgattgttttatattatattataataaatctatgggatatatattataataaatatatattatattataataaatttatgggataaaaataaagcattgctcaaagaaatgctcagagtcttaatagctttaagaaaataggataataagcaaactctacattctactcacaaagttaaaaaatatactcaaaatacccataaaaaaaataatgaggattttaggtagaatgtgcacaagagatatttgcacaaaatgggaaaagacaatagatggaacattatctaaataattaatgaaaaataatatcaatatacaaaaaaatgataataatcctaaaagtaaaataatcacagacatagaggtcatacaactactcaactttctccctctttctttctgtcttatttttgtaactaagtttatttcatttacatttactgaattacaagtgttatggttttagtcctgactaaacaaattttaattttacatctttagttctttatggttatttggtttatatctagtatattacagtctgattttactttccctgtgtgtgtgctgtgtcgttgtgggtgtcctgcagttaaagaaaatacataattataataaattcagttgtaatagttataatgtcatttacactctattatttagactacctattggattctcactaagcacaagaacaaatttaatatcgttctgattgcttcaaatttatttcccactctatcctctaccacataatttaaatgcaattgttattatttgttaataatttttctattgttaattcagatcttttgaggagcagctgcttaaatgggataaatatgcaagaatcagaggggaaaaactttgaagaatagagaggaggcagcaagataaaagtgggggtgaacagagccgttagatcacaagtcatgtctaaytcctgtgaatgagagaaggaagatgtggcaagaaatgtcttagaatgcagaggagctctaatgaagtttcagtcagagcaaggggaaattttgggacagtcactccttaagggagtcccacattttgcaggaaaagggcctgcactgttactctacagtgctcaggtatttgctggaaaatcctgcaggaagcatgaacttggcatggatgtaggatacagagcaaccacagctaaggtcatcagctgcttcccatagcaggagaactgactggcctcttttcttggccactacatgctcaaataaatacacttaaacctttatcttagtaatatctaaactttaaattatatttgttgaccaacaatgtgattataaaagatatgctaccttctacttattaaaatttagttattttatgttgtgatttttgtttgtatttttaattcagtcttgagatctctctggaaatgtggccataagccaggatagccactctctaggagagctctgaccagaggaaagtgaggttcaggtgcatgtgtcagatgagacacaatgaggaggtgaaagcaaaatacatgaaacaagaaatttattactcacaggtaccagagaggttatgggaagtccagaagtgacagggagctcagccagtgggtggggagtgagaaaaagagagggcctgtgggatgatgccgttatcaaggtttgtaggtattatcctttaggctttgtatctgaggctgtggattggctagcttaaagaaaaccacaagaagaggggactcatttaaatcactctggtgtggaccattaggtttcatcatggtcagcagctgaaaggtgtgttgggtttgggggtcagtggagtgaaaaacaaacatagacagtgccataaacaatcacataggaagttttaatgaggccaaagatgatgggatataaatgatgggtttgaaacaacttatgtaaggcctaaaaatg

SEQ ID NO: 669307 - DNA, 538 bp, Homo sapiens
cattcataatgcatatacatatataatgtatatatatatcccttgtatatatatataaatgtgactttttcataaattaagttttctgctgatgtcacrtcagcaatttaggaagctgatttatatttaacttaaaggaagtggaaaaatactactttccaatggtataaagacacaatatgataattagggacacttcataatagaatatggaatatttgcaaagataagtgacactagagaagaaagaggctgcctaatgacaaaaggttaatataagcattgaatcaggaatcataagactatagttcttgaccttaccctgctggtacttaaactacctaaacagaaattatcttaagctctccaggtctctatttccacttgaataaaaaaagaaaatttgatgtagtagtttcttcagtatgttcaacgtatgaagtttaatgtttctatataaagtaatgacaaatatacaagcactattgctaccaagctgataattctggatgaattcagattacacagtcaaaaagat

SEQ ID NO: 669308 - DNA, 586 bp, Homo sapiens
taagggcttactgtacattaaaactggattcattgctactggtaaaaatgaatttgacctacccaatcacattaaattccacagataccaaatatattggtaagttttgtttcttccccctttctgctagtggtaaacttttccaagagtttattgcacagatgagaaaaaaataaaaacagtcttcattaatcctgttgtcacttttctcacaaatttcttcttatgtatagaaagcaaaagtgttgctatatcatttgtggtcgytattgagctgaagtttagtttttatatgttcctattagagattcatggatcagctaaaaataacaaataataaataaatgagatactattttaaaaaacataaatcatttctgattggtccttgcaggtaacaggagaaaaaaaagattctttaatagttgtcatcatcatttctagccagtggaattgctgtatgttgttgacccttccaccacaccaagaggttaagtagaggttgcttctggctattggcagagttcatgtctcactaattatgttgaagctgcactctgcagagattatgctgtgtgaaaatgga

SEQ ID NO: 669309 - DNA, 1316 bp, Homo sapiens
atccttgaaagatattctccttttaattcatatatactaaatacacatggaatatttataaaatattctaaatattagaaatgcaaaatgcaaatacaacagttagcatataaatcagagagctgagtccaaactagaagtaatctaccagtgatcaccaaaaaaatgtgtcctcattggtacttatttattccatgtagatagtacaggcctgcatcaaatattacctactgtgctcctcagaacatgcagttgtccatgagtctttaacataaaattctatcctttcttcccccacaggattagcagataaccaaatgaccataacttaaataatttactacctaaagttacctcccctctatttctagttttgttttcccctctgtatcttcacagtctcctttttcttcttcagtcactggggaggaagcaacccttaaatatctctgatatttcctttgcaccccccactcaccttggacacattttcagtctcatattcacatgcacacacacatttttagtatcctatttaacacacagacacaaacatctcaacatgtatctttaatttgtaataaattcraatatttatttccaaacatcattactgcataagtcttacaccacccacttccaattcttcatctccttaactgctcacatcacttatgtgaaactgcactcccaaagggcacaaatatccttactctcagaagttgatggattttttctgtccttgtttttcttttttttacagcagggttccctgctcattaactttggtttctatgccctgtcactgtcttggctgccttccttattcgaaatttaaaatgtagaaattcccaaatgcctgaaattgattctcttctcttttgtatattccctccattgttgatgttacccaattctttggtaccatttcctttttgcaaatgactcccacatctctatccctaactatggcctttcttctaactccttccttgataggaatgccccatgagaatattagaataagcaaattctctcactcagaatttgctcagtctaaacatttggttcttagaataaagccctctgattacaatttttttatatttgtggtatttcttttcttctaggttacctaaaatcaaaattttggaacatatatggtggccaactaattatcttaatcagatcttttgaaataatctattgcttaatttatctttatgttattttccattcctctcaatttctgtactttagtttcactaccttatgcctatactattaccatgaccttttatttagttttcccaagg

SEQ ID NO: 669310 - DNA, 1294 bp, Homo sapiens
taatgcaaaaagaaaacaaaactagtctctcatggccctccttaccctgtaacatataaggaaaagaattctgggaaatgtaatttggcctagtcaaatctctatgattctttgttatctcatcatatgccatctgcaagtcccatgaaattaagaattgaaatcaggatcttgaagagatatatattatcacttctatgttcactgcagcacagtttacaataaccaagatgtggaaacaatctaaacctccatctgtgcgtgaatggataagaaaaggtgatatacaatggaatgttatgcagccttaaaaaagaaggaaatcctgcaatatgtgacaacatggatgaaccttgaggaaattatgctaagtgaaatatatcagtcccagaattctccgtaatcccacttctatgaggtagcaaaagttgtcaacctcacagaagcaaaatggaatggttgttaccaggagctgaatggagggggacagagggaattgctaatcaatgggcataaagttttagttatgtaagataaataaattctagagatctcctgtacaacattgtgcctgtagtcaacaacactgtattgtacacttaaaaatctgttaagagagtagatctcatgttgtgttcttaccacaataaaataaaaaaataaattaaatgttagaaaatatctttcctggcctggtgcagtcgctcacgcctgtaatcccagcactttgggaggccgaggcaggcggatcacaaggtcgggcgatagagaccatcctggctaatgcggtgaaaccccgtctctactaaaaatacaaaaaaattagccgggcgtggtggcgggcacctatagtccagctactcgggaggctgaggcaggagaatggcgtgaacccggaaggcggaggttgcagtgagccgagatcgcaccactgcactccaacstgggtgacagagagagactctgtctcaaaaataaaaaataaataaaaaaaaataaaaaaaaaagaatatctttcctatggcaaggaaaatggtgaatctgctataagaatgaatatatcccccaccccaccttagaatttctaccttactttgacctctcctcaaaacttcaaaaatcactttcaaccaattgacaagacacatatagtatatcaaccagggtcctggcaggaaacagatggcaccctcaaattaggaagatttgaagacaatttacaaagggactattttaaaagcagtgggcaggatataagcaggccacaggaacagtcagtgttctgtagctaaaa

SEQ ID NO: 669311 - DNA, 638 bp, Homo sapiens
cagctggaactgtagaaaaaggaaaggggtcaggccagcacttgttgaagatttcttgttgccattgtcctagtaaaagagacttgatgctggtgaatgtggactattcaatgtattagggaggaggaaagggaggcttagtacctagtttaataattattatgatattttagtttaaccactctttagaaggttaatacaaaaaatcaaatgccatcctaataaagatgtgcagggctttttctccttaaaaagaaactaggtacagcaaataatggcactgtgaaaattytgaggcacaaattcgccccttttttttttgcatgctaatatactgaaaaagaaagaaagctgcagtaggattggcaggttatgattctcataaaaaataacaaatttttaaacaagaaaataaagaatactttgaaaaaattgtacattactcagcatcgaaaaatggaaatcatttaatcttgtgccttcttctcctctgtggaaactagggttctaaataggaaactactttcaaatggtaaactgtttacaaatttgataaaaagagcccattaattaaaatctgattcccacattcaagtgacaattttctttatgaatacatgcattaattcataggtttt

SEQ ID NO: 669312 - DNA, 628 bp, Homo sapiens
ttcatataaaacaaacagcagagaagcaaataataaaaaagaaacatgcaataaagaaataataataagaaacatgcaataaagtacccaaatgggtggtgtattaaaggaaaaagtaaaagcagagctccctttccaaatcaaagtgcgtgcacaacaccaacatagaaaacagagaaatgcgatcttttgttactgtaattttgtcatgcaagttcaaatgtatataacatttactcaagaaattattcaggaaatgaggccgtttttaagtagcaaagggactggtctgtgggaaggactcaataaatgttaaatactgttgttggtattacttatatattatgtgctttggatagccatggcaacatgtcattagcctcagctttcastttgtttctgtattttgttcaggctgcatattgtagagaagaattttgattcacacagataagtggttgtatgttgtaaggttttgtttcgttttaacagcttgctctgctaacgtcacattgtgatagtcttcagttaaataagagggcaagaagagtttcttttaagcagcacccccacgcacacccaacagaggaaacaacaacaacaaaaacttagtggcacaagttaaata

SEQ ID NO: 669313 - DNA, 1346 bp, Homo sapiens
ggatatttctttccaggctgtagatcatgaggcttgtagagcatcccatacaatgtaaatccagtagtactttcaaaagagaaaatttctggaggagtatagtcaggaagaggacctgtgaataggtaacataacagagtctacaaaagagttcttatgggagtgctacaatctgggaacaagaaacaagatattaaaagtcagccccgccaacacaaactgaccacccctctttcagatgataagctagaatttaagcaagagtatattcatctttaaaaacaaaactaggccgggcgcagtggctcatgcctgtaatcccwgcactttgggaggccgaggcaggtggatcacaaggtcaggagtttgagaccatcctggctaacacggtgaaaccccgcctctactaaaaatacaaaaaattagctgggcatggtggcgggcgcctgtagccccagctactcgggaggctgaggcaggagaagggtgtgaacccgggaggtggagcttgcagtgagctgagatcacgccactgcactccagcctgggtgacagagcgagactccatctcaaaaaaataaataaataatttaaaaaaaacaaaactaggccaggcacggtggctcacacctacaatcctagcattttgggaggctgaggtgggtggattgcttgagcccaagagtttgtgaccagcctgggtggcatggcaaaaccctgtctctacaaaaaaatacaaaaattacccaggcatggaggtgtgctcctgtagtcccagctactcaggaggctgaggcaggaagattgactgagcccaggaggttgaggctacattgagctgtgccctgtgactgcgccactgcactccagcctgagcgacagaacaagacactgtctcgacaacaacaaaaacccaccaaataaagaacaacaacaaaacaaacatatcaaattatttcagaagcagacacagagtgttaccaataatccttggagcctaggaaatgtctatgtgcagaactatacagatactttatgctcaatataacttattgttgattaaaccatatatctggttagaaacagataaagctgggtgggggggtgaggtaaattattagtcaatttaatttttcagggtaggtgaccaaaaacatttgcttctgatcattagaaaataagcctaaccagaactcagaaaaaagtcatcattagcttttggttcaccaaagctatacagacctctcctaagtgtttgtgtacagcagataatttacagtctaagcagagatcatcaccatattacaagttctgattctgcttgtggacattaaaacacacttata

SEQ ID NO: 669314 - DNA, 584 bp, Homo sapiens
gtggggcaggagctgctctgaccctccaagggctttagtctyggcactcagttgaggacagatgttctcagggattgttgtgcccacttgtggccaccgtaagatttcagaggatcctgagggagcagtgaggagggaggggactgagaaggaaggtggtatgggagtgggaggcaggtcaaaagagttctggccagggaaccaggaggcctggctcccttcctgggtaagccattgcccagctatgggacttggactaaatcacttcctcccttcagacctcagtgtcttcatctataaaaacgacactgggacaagaaaaagcgagatgcggaaagctgtgtgtggccacccacttgtgaacatcgagaagtcagaggcagaacaacctcggacttgagagccctcatcttcccacaccccaacttcagcaagcctccagtgaccccagacaagtcactcgggcaagtcgcgtaactcctctgagtgttcccttccccatctgaagtggatcctaatagcacctgcttcggagggttgtcatgaggatcagaaaaaacgatgcatgtagcgcccacagtgca

SEQ ID NO: 669315 - DNA, 584 bp, Homo sapiens
gtggggcaggagctgctctgaccctccaagggctttagtctcggcactcagttgaggacagatgttctcagggattgttgtgcccacwtgtggccaccgtaagatttcagaggatcctgagggagcagtgaggagggaggggactgagaaggaaggtggtatgggagtgggaggcaggtcaaaagagttctggccagggaaccaggaggcctggctcccttcctgggtaagccattgcccagctatgggacttggactaaatcacttcctcccttcagacctcagtgtcttcatctataaaaacgacactgggacaagaaaaagcgagatgcggaaagctgtgtgtggccacccacttgtgaacatcgagaagtcagaggcagaacaacctcggacttgagagccctcatcttcccacaccccaacttcagcaagcctccagtgaccccagacaagtcactcgggcaagtcgcgtaactcctctgagtgttcccttccccatctgaagtggatcctaatagcacctgcttcggagggttgtcatgaggatcagaaaaaacgatgcatgtagcgcccacagtgca

SEQ ID NO: 669316 - DNA, 632 bp, Homo sapiens
tcctctttcgccttgtcattttacagataaggaaagcaaggcccacagaggagtgggtcttgaccaagatagctcatgagtcattgcccaggtggggctggaactcaagtctttgtcctccatgccctttcccatccacatggaagctgagctggaggagactagagggcagcrgcagagttcatcttgttctctggcctccatcgtcagtcagggaagcatgtcagtacccaagtggccttggtgagccagccctgtctgctcttagcctcaccctcccactcaggctctgtgcttgctttgccattatcctctgtctgggccttgagaattcaggcctcccacccccaccccaggtctccaggccccacaactgctcttgatattaacatggcaacttatgttgcacacctgcaatcctgagtccttggggatacagaaggagcccccatttcctgagtgacttctctgtgctgggcacctgacatgcacattctaatctaatctccacaactcactgaggaacagatgtaggaggaatctgaggctcagagagatcaattaacttgccatatccccacagtgaattgaggccaaagatctgaagctgggctgtcttactccaacaccca

SEQ ID NO: 669317 - DNA, 2203 bp, Homo sapiens
ctctgatgcagatggatctcagcagagctgattaatgtccctatgccaagtactccccatacttggccctggataagttaaatgagggataaacagatactatcaggctcatctgtcattgccaaaagaaaaaacaagcacctataccatatttagttataaataataaaatggatgaatttatatatatatatatatatatatatatatatatatatacacatacatatatatatatgtatttttttaagcatgcttagaactttttcctttttttaaattgagatggggtggtggtgaggagtctcattatcttgcctaggctggacttgaacccatgattctctcaactcagcctcagtaggtgggactacaggcatgcaacactgggcctggcacttagaacttgtgatggaaaatggaatggaaaagtttttcttccatttgaattatgcaaatcctgagtatttttctatactctatgtatgataaaatagttttctaaggaagaagctctatcagatgactaatttcattgatatagctcaaaacttgcagaaaaaataattgcacttgggatgagacaaaagttttcagccaacatgtaaacatcttaaatcttttgataaataatattattgtaattttattcataatacttaatgacttggtttatatcatagttatatcttagtatagaaagaaatttaaatgatggtatgatgtgcaaaagtgcaaaaatttgtatatatatttatttaagtctgtccatgttattaattaattcctatattcaaggcagatgttgacctttgcatttgtggccaaatttccattcaaccattcttcagatttcaactctcagtgaatctaagttattctttgaagattctttctgggtctactagtttgatcatgatgctataaagaaaattcagcttaaaggcaatagttggaaagctattgaacttcctagaattaattttcatggtaatttttatagtgcatgactggaaagccattcggaaagtagtatcagatcattagtattctctcttatgcactagtttatttctatggtwggacagagggcaagaatgttgacctttagaaaatgtggtctgtagttcagtgttgggcataccatagatttcaatatattcgtcaaattcgaactggataagatgaaaatttttatttcttaaggtgttctttaaaagtaagtcaattaaaaaaatttagctctccctttatatataaatatttgaaactattctaatatgttgaatacattttttttataaaattaaattgtgcttattaaagaaactttggacattgcagaaaaatagaaaggcaaaaaacagtagataataatgtcatacaaaggcaaacacataagactatataaaaactatttcctgcaattttccttttaatgcatagatttaaaaatgcttgaaaatgtgaactttataattttgtatcctttttcacttaaatcaagtacctgtattatctcaatgatcgtcatctttatcttcatgccttatcaccaaaaatagcatttattgttgcataccagtcgactgactagataaaccagttactttcacaactgtagtattgttgcataagctggattgagtatgttcttaattaaaacgtaacaatggcttaacaatgttgaaaagaatataagaatgtaatagtttttttttctaatacattttcaatgtttttaatttaagggagtatatttgggagttcagaaaggtcaagggatgaactactttttagatttttaaaaggaaaagtcaattagaatctttttttttttttttttttgccaaaaataatatcatatgctatttgggatgctggaaatttttcttctattatttgataaaaatcaaagatttattcaaaaaatttttctcaatgttaaatatttatgaagaaattataagttttaaagtttcccttagaaatttatgcatccacagtgttgatctccaggacaaggattgaatacattatttagacatcagtttcttgatgttttcagtaatatagtctggcaatttcttctgtttcttagcctgtttataatacttggatattttccatcttattgaaatgcaaatttattgaaagaatactggcacatccactgagatttacagtgtatcagttttggaaa

SEQ ID NO: 669318 - DNA, 2203 bp, Homo sapiens
ctctgatgcagatggatctcagcagagctgattaatgtccctatgccaagtactccccatacttggccctggataagttaaatgagggataaacagatactatcaggctcatctgtcattgccaaaagaaaaaacaagcacctataccatatttagttataaataataaaatggatgaatttatatatatatatatatatatatatatatatatatatacacatacatatatatatatgtatttttttaagcatgcttagaactttttcctttttttaaattgagatggggtggtggtgaggagtctcattatcttgcctaggctggacttgaacccatgattctctcaactcagcctcagtaggtgggactacaggcatgcaacactgggcctggcacttagaacttgtgatggaaaatggaatggaaaagtttttcttccatttgaattatgcaaatcctgagtatttttctatactctatgtatgataaaatagttttctaaggaagaagctctatcagatgactaatttcattgatatagctcaaaacttgcagaaaaaataattgcacttgggatgagacaaaagttttcagccaacatgtaaacatcttaaatcttttgataaataatattattgtaattttattcataatacttaatgacttggtttatatcatagttatatcttagtatagaaagaaatttaaatgatggtatgatgtgcaaaagtgcaaaaatttgtatatatatttatttaagtctgtccatgttattaattaattcctatattcaaggcagatgttgacctttgcatttgtggccaaatttccattcaaccattcttcagatttcaactctcagtgaatctaagttattctttgaagattctttctgggtctactagtttgatcatgatgctataaagaaaattcagcttaaaggcaatagttggaaagctattgaacttcctagaattaattttcatggtaatttttatagtgcatgactggaaagccattcggaaagtagtatcagatcattagtattctctcttatgcactagtttatttctatggtaggacagagggcaagaatgttgacctttagaaaatgtggtctgtagttcagtgttgggcataccatagatttcaatatattcgtcaaattcgaactggataagatgaaaatttttatttcttaaggtgttctttaaaagtaagtcaattaaaaaaatttagctctccctttatatataaatatttgaaactattctaatatgttgaatacattttttttataaaattaaattgtgcttattaaagaaactttggacattgcagaaaaatagaaaggcaaaaaacagtagataataatgtcatacaaaggcaaacacataagactatataaaaactatttcctgcaattttccttttaatgcatagatttaaaaatgcttgaaaatgtgaactttataattttgtatcctttttcacttaaatcaagtacctgtattatctcaatgatcgtcatctttatcttcatgccttatcaccaaaaatagcatttattgttgcataccagtcgactgactagataaaccagttactttcacaactgtagtattgttgcataagctggattgagtatgttcttaattaaaacgtaacaatggcttaacaatgttgaaaagaatataagaatgtaatagtttttttttctaatacattttcaatgtttttaatttaagggagtatatttgggagttcagaaaggtcaagggatgaactactttttagatttttaaaaggaaaagtcaattagaatctttttttttttttttttttgccaaaaataatatcatatgctatttgggatgctggaaatttttcttctattatttgataaaaatcaaagatttattcaaaaaatttttctcaatgttaaatatttatgaasaaattataagttttaaagtttcccttagaaatttatgcatccacagtgttgatctccaggacaaggattgaatacattatttagacatcagtttcttgatgttttcagtaatatagtctggcaatttcttctgtttcttagcctgtttataatacttggatattttccatcttattgaaatgcaaatttattgaaagaatactggcacatccactgagatttacagtgtatcagttttggaaa

SEQ ID NO: 669319 - DNA, 1075 bp, Homo sapiens
gtgtgggtgtgaacacatatgttcagtgggactcaaaaatcccacacagggtatagcgttgtcrctcactgattttgcccaattatactgtgaatttgataataatttaccaacactttgaagtcctacagatgctctgaaacaacaatataatcagcttttatttgaatatctaatatgacaactcactctaatatcatgggacttattttgttccaccgacattaaaatgtcacattctagaaatgtgaagtttgtcacctcatcaaaaatagatactagatggtgaatttgaatgtatttaatgccattgaactgtatgcttgagaatgctcaaaacggcataatatgcagctgtaaaaaacaatgagattatgtgccttgtagcaacatggatggagctggaggcattatcctaagtgaaataactcagaaacagaaaatttaataccatatgttcccacttacacagagatagaagcaatagatactgagggttgaaaagcaatacacacttttcacaacccccttcccacctcttcccacttgtggagaggtaggaaggggatgagggttgaaaacttacctattgggtacaatggtcactatttgagtgatgggtacagtagaagcccaaatcccaccattatgtaatatatccatgtaaaaaacatgtatgtataccctctgaatctaaaataaattaaaagaatggttaaaatgctaaattttgtattatactgtatacattttaccatcactaaaaaaaatagatactagatcaaataaaatgtaactattttatctccatagatgattcccttaaaatttctgtttagtatcgagccacaagcaaagcaaacacagcgataattatttggaaattgctgtaattattgcaggccactaggattccactttgcatattaaaatggctattttaatacacaaaatggcatgaaatactatacagccataaaatagaatgagatcatatcctttgcagtgtgtcctttgttttttgcacaaagtgtattaggccactaggattccactttgtgtgttgaaatagtca

SEQ ID NO: 669320 - DNA, 1075 bp, Homo sapiens
gtgtgggtgtgaacacatatgttcagtgggactcaaaaatcccacacagggtatagcgttgtcgctcactgattttgcccaattatactgtgaatttgataataatttaccaacactttgaagtcctacagatgctctgaaacaacaatataatcagcttttatttgaatatctaatatgacaactcactctaatatcatgggacttattttgttccaccgacattaaaatgtcacattctagaaatgtgaagtttgtcacctcatcaaaaatagatactagatggtgaatttgaatgtatttaatgccattgaactgtatgcttgagaatgytcaaaacggcataatatgcagctgtaaaaaacaatgagattatgtgccttgtagcaacatggatggagctggaggcattatcctaagtgaaataactcagaaacagaaaatttaataccatatgttcccacttacacagagatagaagcaatagatactgagggttgaaaagcaatacacacttttcacaacccccttcccacctcttcccacttgtggagaggtaggaaggggatgagggttgaaaacttacctattgggtacaatggtcactatttgagtgatgggtacagtagaagcccaaatcccaccattatgtaatatatccatgtaaaaaacatgtatgtataccctctgaatctaaaataaattaaaagaatggttaaaatgctaaattttgtattatactgtatacattttaccatcactaaaaaaaatagatactagatcaaataaaatgtaactattttatctccatagatgattcccttaaaatttctgtttagtatcgagccacaagcaaagcaaacacagcgataattatttggaaattgctgtaattattgcaggccactaggattccactttgcatattaaaatggctattttaatacacaaaatggcatgaaatactatacagccataaaatagaatgagatcatatcctttgcagtgtgtcctttgttttttgcacaaagtgtattaggccactaggattccactttgtgtgttgaaatagtca

SEQ ID NO: 669321 - DNA, 1075 bp, Homo sapiens
gtgtgggtgtgaacacatatgttcagtgggactcaaaaatcccacacagggtatagcgttgtcgctcactgattttgcccaattatactgtgaatttgataataatttaccaacactttgaagtcctacagatgctctgaaacaacaatataatcagcttttatttgaatatctaatatgacaactcactctaatatcatgggacttattttgttccaccgacattaaaatgtcacattctagaaatgtgaagtttgtcacctcatcaaaaatagatactagatggtgaatttgaatgtatttaatgccattgaactgtatgcttgagaatgctcaaaacggcrtaatatgcagctgtaaaaaacaatgagattatgtgccttgtagcaacatggatggagctggaggcattatcctaagtgaaataactcagaaacagaaaatttaataccatatgttcccacttacacagagatagaagcaatagatactgagggttgaaaagcaatacacacttttcacaacccccttcccacctcttcccacttgtggagaggtaggaaggggatgagggttgaaaacttacctattgggtacaatggtcactatttgagtgatgggtacagtagaagcccaaatcccaccattatgtaatatatccatgtaaaaaacatgtatgtataccctctgaatctaaaataaattaaaagaatggttaaaatgctaaattttgtattatactgtatacattttaccatcactaaaaaaaatagatactagatcaaataaaatgtaactattttatctccatagatgattcccttaaaatttctgtttagtatcgagccacaagcaaagcaaacacagcgataattatttggaaattgctgtaattattgcaggccactaggattccactttgcatattaaaatggctattttaatacacaaaatggcatgaaatactatacagccataaaatagaatgagatcatatcctttgcagtgtgtcctttgttttttgcacaaagtgtattaggccactaggattccactttgtgtgttgaaatagtca

SEQ ID NO: 669322 - DNA, 1075 bp, Homo sapiens
gtgtgggtgtgaacacatatgttcagtgggactcaaaaatcccacacagggtatagcgttgtcgctcactgattttgcccaattatactgtgaatttgataataatttaccaacactttgaagtcctacagatgctctgaaacaacaatataatcagcttttatttgaatatctaatatgacaactcactctaatatcatgggacttattttgttccaccgacattaaaatgtcacattctagaaatgtgaagtttgtcacctcatcaaaaatagatactagatggtgaatttgaatgtatttaatgccattgaactgtatgcttgagaatgctcaaaacggcataatatgcagctgtaaaaaacaatgagattatgtgccttgtagcaacatggatggagctggaggcattatcctaagtgaaataactcagaaacagaaaatttaataccatatgttcccacttacacagagatagaagcaatagayactgagggttgaaaagcaatacacacttttcacaacccccttcccacctcttcccacttgtggagaggtaggaaggggatgagggttgaaaacttacctattgggtacaatggtcactatttgagtgatgggtacagtagaagcccaaatcccaccattatgtaatatatccatgtaaaaaacatgtatgtataccctctgaatctaaaataaattaaaagaatggttaaaatgctaaattttgtattatactgtatacattttaccatcactaaaaaaaatagatactagatcaaataaaatgtaactattttatctccatagatgattcccttaaaatttctgtttagtatcgagccacaagcaaagcaaacacagcgataattatttggaaattgctgtaattattgcaggccactaggattccactttgcatattaaaatggctattttaatacacaaaatggcatgaaatactatacagccataaaatagaatgagatcatatcctttgcagtgtgtcctttgttttttgcacaaagtgtattaggccactaggattccactttgtgtgttgaaatagtca

SEQ ID NO: 669323 - DNA, 3092 bp, Homo sapiens
tttttcaaacatggaaatgtaaataagggatttcaaattgtttgattttcttctaggtccctgtctatgacatctaaattacatattaggatgatargtatatacaattttctgtggcctctaaaggaaattacttttaattttgtataaatgtgagaacaatatgtgtttccttctgtgtgtccatctctgcctctttctctctttctttttgtatttataggggtaaatttttcatctgacagattaaaaacattagattacatcccgcttacagtaattacagcttactggtgatactgtcattagctgagcaattttaatgtctaatttatagcaatataacgagtgattaattcaagatgaaatttatcataaagtgtaatcacgatgaaatggataggtactcaatacagaagcttttagcagtcatatgtgaggcagtacccaaaaaacatttaaatagtttaaatttcaaaaatccagcagatgaggtccacatggatataatgagctgatcgaagttttctgtcaaaaataaccaaagcaactggtagttcggatggctcatgtataccttctatttgaaacaggcagagatcttagcccatctttgtgtccttggtgtccaaaacatggtagatctaacattcttttttaaaattaattaatgggggaatgaataaataacaactgagttaccctggcttataaagcccgacattatcccagctgaaaactattgactttcttttgcattattcaccacctcaaccacattcagccagagtgttcagctttcctttccttgatcatgccaatctctttcccacctatcacagcaatttctctccctataatcctcttcccctaaaagtagtcagagcatggttgtgtctttctcatcattcaagtctctcctattcaaagaagccttccagaccaccttaacttcaactatcattttctgaaatgtttgtgcattatatacttgaatattaactataagttgggtgcagtggcccatgcccatgatctcagcattttgggagaccaaggcagaactacatgaggccaggaattcaagaccagcctgagcaaccaatatagtgagaccccgtctccacaaaaaaattaaaaaaaaaaaatagccaggcttggtggttcatgcctgtattcctagctacttggaagactgaggcaggaggattgcttgagcccaggagctcaagtttgtggtgagctgtgatcgtgccactctactccagcatgggtgacagagtgagactctgtctctaaaaaagaacaaaaaaaccataatgtctataaactatatatataatatattaagtacattatacggacacacacacacacacacacacacactttctctctctctctcatttagaatgttcatcttcctcttccacaggagtttaagctccataaggacagcacttttgttattttattcacgttgaatgcagaacagggcttggcttacagtatttaggtgtttcataagaacgtagtgaataaatgaatactttggaagtgtttccaaaatttgttctcaagtgtatcacattgatcactcctattgaaaagaattaaacattataatgtgaataggtgagatatatgtttcagatatatatttattttagtttattttaaataaaaaagaaatacatagtgaacaacaggaattattttaaaaagcattaacagatggcattcaattattaaattatagttcatctttcatagtagagaaatatgaagttgttcaatgcttggaaattgttgtatgcattacatgtgataaaagaaaaaaatagcactaccaaggggcaggggaaaataatctttactagattttacagtttaaaattaggttgctgaaatgtatatggcaaaggtgtgtgtgtgtaattgtgcttatatattgtgtttataactttagtgacaggaaacaatataaaatcatatgaataacttgtgataacatcagcacataatgatccctttcttatctggtgttttattgtactattcaaaagtgctaaataaaaaattcttctaaacatttttttcattaagatggatggatatgtattttctccttctctccccctacaccccatttctctccctttttcattttttaaaacatgtattaggtaaacagaatgttggtagatagaaatatacagatagatagaaacaaaaagtcttctctcctggagttgcgatgcctggtttaacattctgacttggtcactaacttgttttgcttttttatttttttgttttataattgttaactatgttttatttactttttttttttaaaagaactaaataacttcaatggtcatttagccactgggattctctgattctttttttttctgttaatgtaacaagttaaaaggttaagtaaatctttaggcctcagattttttattttgttttggtttgttttgcatatgaaaattataacttaacctagaaggtccctaacatgatgcaattattattctattaaatacagttgagttaattgattacaatttgttttaagttagttaccagaagtttaaaaaccatgtcctggtatttatgccagctgtacattcagggttctctttggctatgacatcagggcagagtactgacactcatgagtcaaggagcagggaagagggtataggaagccaataatttagaaacttaatgacttacactccactttcgaaaccggcaaatattagaattttttttaactcaactttccaaggtaataattttaagttttcagagttcagtgacttagagacacattgcaacaaaatgtacaaaagtcttcttggctccatactgtgaaagacaggggaaagaatattgtctaatgttttctatggataaaatggttgcttaatttaaatgaaaatgttttttactaccttgaggggctctttttcctgtgagtttctttggtgtttcagagagagtaagtcctattcaattaaatgtatagtgaaatttgcgtataaaaagaaataaactctccaataaatctgtgg

SEQ ID NO: 669324 - DNA, 3092 bp, Homo sapiens
tttttcaaacatggaaatgtaaataagggatttcaaattgtttgattttcttctaggtccctgtctatgacatctaaattacatattaggatgataagtatatacaattttctgtggcctctaaaggaaattacttttaattttgtataaatgtgagaacaatatgtgtttccttctgtgtgtccatctcygcctctttctctctttctttttgtatttataggggtaaatttttcatctgacagattaaaaacattagattacatcccgcttacagtaattacagcttactggtgatactgtcattagctgagcaattttaatgtctaatttatagcaatataacgagtgattaattcaagatgaaatttatcataaagtgtaatcacgatgaaatggataggtactcaatacagaagcttttagcagtcatatgtgaggcagtacccaaaaaacatttaaatagtttaaatttcaaaaatccagcagatgaggtccacatggatataatgagctgatcgaagttttctgtcaaaaataaccaaagcaactggtagttcggatggctcatgtataccttctatttgaaacaggcagagatcttagcccatctttgtgtccttggtgtccaaaacatggtagatctaacattcttttttaaaattaattaatgggggaatgaataaataacaactgagttaccctggcttataaagcccgacattatcccagctgaaaactattgactttcttttgcattattcaccacctcaaccacattcagccagagtgttcagctttcctttccttgatcatgccaatctctttcccacctatcacagcaatttctctccctataatcctcttcccctaaaagtagtcagagcatggttgtgtctttctcatcattcaagtctctcctattcaaagaagccttccagaccaccttaacttcaactatcattttctgaaatgtttgtgcattatatacttgaatattaactataagttgggtgcagtggcccatgcccatgatctcagcattttgggagaccaaggcagaactacatgaggccaggaattcaagaccagcctgagcaaccaatatagtgagaccccgtctccacaaaaaaattaaaaaaaaaaaatagccaggcttggtggttcatgcctgtattcctagctacttggaagactgaggcaggaggattgcttgagcccaggagctcaagtttgtggtgagctgtgatcgtgccactctactccagcatgggtgacagagtgagactctgtctctaaaaaagaacaaaaaaaccataatgtctataaactatatatataatatattaagtacattatacggacacacacacacacacacacacacactttctctctctctctcatttagaatgttcatcttcctcttccacaggagtttaagctccataaggacagcacttttgttattttattcacgttgaatgcagaacagggcttggcttacagtatttaggtgtttcataagaacgtagtgaataaatgaatactttggaagtgtttccaaaatttgttctcaagtgtatcacattgatcactcctattgaaaagaattaaacattataatgtgaataggtgagatatatgtttcagatatatatttattttagtttattttaaataaaaaagaaatacatagtgaacaacaggaattattttaaaaagcattaacagatggcattcaattattaaattatagttcatctttcatagtagagaaatatgaagttgttcaatgcttggaaattgttgtatgcattacatgtgataaaagaaaaaaatagcactaccaaggggcaggggaaaataatctttactagattttacagtttaaaattaggttgctgaaatgtatatggcaaaggtgtgtgtgtgtaattgtgcttatatattgtgtttataactttagtgacaggaaacaatataaaatcatatgaataacttgtgataacatcagcacataatgatccctttcttatctggtgttttattgtactattcaaaagtgctaaataaaaaattcttctaaacatttttttcattaagatggatggatatgtattttctccttctctccccctacaccccatttctctccctttttcattttttaaaacatgtattaggtaaacagaatgttggtagatagaaatatacagatagatagaaacaaaaagtcttctctcctggagttgcgatgcctggtttaacattctgacttggtcactaacttgttttgcttttttatttttttgttttataattgttaactatgttttatttactttttttttttaaaagaactaaataacttcaatggtcatttagccactgggattctctgattctttttttttctgttaatgtaacaagttaaaaggttaagtaaatctttaggcctcagattttttattttgttttggtttgttttgcatatgaaaattataacttaacctagaaggtccctaacatgatgcaattattattctattaaatacagttgagttaattgattacaatttgttttaagttagttaccagaagtttaaaaaccatgtcctggtatttatgccagctgtacattcagggttctctttggctatgacatcagggcagagtactgacactcatgagtcaaggagcagggaagagggtataggaagccaataatttagaaacttaatgacttacactccactttcgaaaccggcaaatattagaattttttttaactcaactttccaaggtaataattttaagttttcagagttcagtgacttagagacacattgcaacaaaatgtacaaaagtcttcttggctccatactgtgaaagacaggggaaagaatattgtctaatgttttctatggataaaatggttgcttaatttaaatgaaaatgttttttactaccttgaggggctctttttcctgtgagtttctttggtgtttcagagagagtaagtcctattcaattaaatgtatagtgaaatttgcgtataaaaagaaataaactctccaataaatctgtgg

SEQ ID NO: 669325 - DNA, 3092 bp, Homo sapiens
tttttcaaacatggaaatgtaaataagggatttcaaattgtttgattttcttctaggtccctgtctatgacatctaaattacatattaggatgataagtatatacaattttctgtggcctctaaaggaaattacttttaattttgtataaatgtgagaacaatatgtgtttccttctgtgtgtccatctctgcctctttctctctttctttttgtatttataggggtaaatttttcatctgacagattaaaaacattagattacatcccgcttacagtaattacagcttactggtgatactgtcattagctgagcaattttaatgtctaatttatagcaatataacgagtgattaattcaagatgaaatttatcataaagtgtaatcacgatgaaatggataggtactcaatacagaagcttttagcagtcatatgtgaggcagtacccaaaaaacatttaaatagtttaaatttcaaaaatccagcagatgaggtccacatggatataatgagctgatcgaagttttctgtcaaaaataaccaaagcaactggtagttcggatggctcatgtataccttctatttgaaacaggcagagatcttagcccatctttgtgtccttggtgtccaaaacatggtagatctaacattcttttttaaaattaattaatgggggaatgaataaataacaactgagttaccctggcttataaagcccgacattatcccagctgaaaactattgactttcttttgcattattcaccacctcaaccacattcagccagagtgttcagctttcctttccttgatcatgccaatctctttcccacctatcacagcaatttctctccctataatcctcttcccctaaaagtagtcagagcatggttgtgtctttctcatcattcaagtctctcctattcaaagaagccttccagaccaccttaacttcaactatcattttctgaaatgtttgtgcattatatacttgaatattaactataagttgggtgcagtggcccatgcccatgatctcagcattttgggagaccaaggcagaactacatgaggccaggaattcaagaccagcctgagcaaccaatatagtgagaccccgtctccacaaaaaaattaaaaaaaaaaaatagccaggcttggtggttcatgcctgtattcctagctacttggaagactgaggcaggaggattgcttgagcccaggagctcaagtttgtggtgagctgtgatcrtgccactctactccagcatgggtgacagagtgagactctgtctctaaaaaagaacaaaaaaaccataatgtctataaactatatatataatatattaagtacattatacggacacacacacacacacacacacacactttctctctctctctcatttagaatgttcatcttcctcttccacaggagtttaagctccataaggacagcacttttgttattttattcacgttgaatgcagaacagggcttggcttacagtatttaggtgtttcataagaacgtagtgaataaatgaatactttggaagtgtttccaaaatttgttctcaagtgtatcacattgatcactcctattgaaaagaattaaacattataatgtgaataggtgagatatatgtttcagatatatatttattttagtttattttaaataaaaaagaaatacatagtgaacaacaggaattattttaaaaagcattaacagatggcattcaattattaaattatagttcatctttcatagtagagaaatatgaagttgttcaatgcttggaaattgttgtatgcattacatgtgataaaagaaaaaaatagcactaccaaggggcaggggaaaataatctttactagattttacagtttaaaattaggttgctgaaatgtatatggcaaaggtgtgtgtgtgtaattgtgcttatatattgtgtttataactttagtgacaggaaacaatataaaatcatatgaataacttgtgataacatcagcacataatgatccctttcttatctggtgttttattgtactattcaaaagtgctaaataaaaaattcttctaaacatttttttcattaagatggatggatatgtattttctccttctctccccctacaccccatttctctccctttttcattttttaaaacatgtattaggtaaacagaatgttggtagatagaaatatacagatagatagaaacaaaaagtcttctctcctggagttgcgatgcctggtttaacattctgacttggtcactaacttgttttgcttttttatttttttgttttataattgttaactatgttttatttactttttttttttaaaagaactaaataacttcaatggtcatttagccactgggattctctgattctttttttttctgttaatgtaacaagttaaaaggttaagtaaatctttaggcctcagattttttattttgttttggtttgttttgcatatgaaaattataacttaacctagaaggtccctaacatgatgcaattattattctattaaatacagttgagttaattgattacaatttgttttaagttagttaccagaagtttaaaaaccatgtcctggtatttatgccagctgtacattcagggttctctttggctatgacatcagggcagagtactgacactcatgagtcaaggagcagggaagagggtataggaagccaataatttagaaacttaatgacttacactccactttcgaaaccggcaaatattagaattttttttaactcaactttccaaggtaataattttaagttttcagagttcagtgacttagagacacattgcaacaaaatgtacaaaagtcttcttggctccatactgtgaaagacaggggaaagaatattgtctaatgttttctatggataaaatggttgcttaatttaaatgaaaatgttttttactaccttgaggggctctttttcctgtgagtttctttggtgtttcagagagagtaagtcctattcaattaaatgtatagtgaaatttgcgtataaaaagaaataaactctccaataaatctgtgg

SEQ ID NO: 669326 - DNA, 3092 bp, Homo sapiens
tttttcaaacatggaaatgtaaataagggatttcaaattgtttgattttcttctaggtccctgtctatgacatctaaattacatattaggatgataagtatatacaattttctgtggcctctaaaggaaattacttttaattttgtataaatgtgagaacaatatgtgtttccttctgtgtgtccatctctgcctctttctctctttctttttgtatttataggggtaaatttttcatctgacagattaaaaacattagattacatcccgcttacagtaattacagcttactggtgatactgtcattagctgagcaattttaatgtctaatttatagcaatataacgagtgattaattcaagatgaaatttatcataaagtgtaatcacgatgaaatggataggtactcaatacagaagcttttagcagtcatatgtgaggcagtacccaaaaaacatttaaatagtttaaatttcaaaaatccagcagatgaggtccacatggatataatgagctgatcgaagttttctgtcaaaaataaccaaagcaactggtagttcggatggctcatgtataccttctatttgaaacaggcagagatcttagcccatctttgtgtccttggtgtccaaaacatggtagatctaacattcttttttaaaattaattaatgggggaatgaataaataacaactgagttaccctggcttataaagcccgacattatcccagctgaaaactattgactttcttttgcattattcaccacctcaaccacattcagccagagtgttcagctttcctttccttgatcatgccaatctctttcccacctatcacagcaatttctctccctataatcctcttcccctaaaagtagtcagagcatggttgtgtctttctcatcattcaagtctctcctattcaaagaagccttccagaccaccttaacttcaactatcattttctgaaatgtttgtgcattatatacttgaatattaactataagttgggtgcagtggcccatgcccatgatctcagcattttgggagaccaaggcagaactacatgaggccaggaattcaagaccagcctgagcaaccaatatagtgagaccccgtctccacaaaaaaattaaaaaaaaaaaatagccaggcttggtggttcatgcctgtattcctagctacttggaagactgaggcaggaggattgcttgagcccaggagctcaagtttgtggtgagctgtgatcgtgccactctactccagcatgggtgacagagtgagactctgtctctaaaaaagaacaaaaaaaccataatgtctataaactatatatataatatattaagtacattatacggacacacacacacacacacacacacactttctctctctctctcatttagaatgttcatcttcctcttccacaggagtttaagctccataaggacagcacttttgttattttattcacgttgaatgcagaacagggcttggcttacagtatttargtgtttcataagaacgtagtgaataaatgaatactttggaagtgtttccaaaatttgttctcaagtgtatcacattgatcactcctattgaaaagaattaaacattataatgtgaataggtgagatatatgtttcagatatatatttattttagtttattttaaataaaaaagaaatacatagtgaacaacaggaattattttaaaaagcattaacagatggcattcaattattaaattatagttcatctttcatagtagagaaatatgaagttgttcaatgcttggaaattgttgtatgcattacatgtgataaaagaaaaaaatagcactaccaaggggcaggggaaaataatctttactagattttacagtttaaaattaggttgctgaaatgtatatggcaaaggtgtgtgtgtgtaattgtgcttatatattgtgtttataactttagtgacaggaaacaatataaaatcatatgaataacttgtgataacatcagcacataatgatccctttcttatctggtgttttattgtactattcaaaagtgctaaataaaaaattcttctaaacatttttttcattaagatggatggatatgtattttctccttctctccccctacaccccatttctctccctttttcattttttaaaacatgtattaggtaaacagaatgttggtagatagaaatatacagatagatagaaacaaaaagtcttctctcctggagttgcgatgcctggtttaacattctgacttggtcactaacttgttttgcttttttatttttttgttttataattgttaactatgttttatttactttttttttttaaaagaactaaataacttcaatggtcatttagccactgggattctctgattctttttttttctgttaatgtaacaagttaaaaggttaagtaaatctttaggcctcagattttttattttgttttggtttgttttgcatatgaaaattataacttaacctagaaggtccctaacatgatgcaattattattctattaaatacagttgagttaattgattacaatttgttttaagttagttaccagaagtttaaaaaccatgtcctggtatttatgccagctgtacattcagggttctctttggctatgacatcagggcagagtactgacactcatgagtcaaggagcagggaagagggtataggaagccaataatttagaaacttaatgacttacactccactttcgaaaccggcaaatattagaattttttttaactcaactttccaaggtaataattttaagttttcagagttcagtgacttagagacacattgcaacaaaatgtacaaaagtcttcttggctccatactgtgaaagacaggggaaagaatattgtctaatgttttctatggataaaatggttgcttaatttaaatgaaaatgttttttactaccttgaggggctctttttcctgtgagtttctttggtgtttcagagagagtaagtcctattcaattaaatgtatagtgaaatttgcgtataaaaagaaataaactctccaataaatctgtgg

SEQ ID NO: 669327 - DNA, 643 bp, Homo sapiens
tctctgaattttacataaacaaaatattgagaataccctattttgttgaagatcttatagatctgtaagaggtatctgtttattctataaattttggcatatataattcaacatttgtcattttactctratagttacctgttattgcaatgactaattgaatatgcaacagaggaaggttggtaaatagaaggtgatataaaccatagtattcctattagacgtagcttagccatagctgaataaggacttatgaaggagaactaaatgacacatatagctaaagtcacagaattgtacttaaataaattgttagttgttgttcactctataaatgagtattcttagtagcttgttttggtattaagatctgagcttaggaaccgcttaaaaaaattgaaatgggcagactcttctatctgacaaaatcgcatacacataatcataagattcctttcttctatgattgtattgagatgtactttaaaaatgttagtattcacttcagtattcctgatcatacttaaaaagtagcttttacctaagacattgaattattttaatcttgagacccttttacaatgaggatttgtatcaaaaaattacttttagctttatgattctatagggcaaactgtacatg

SEQ ID NO: 669328 - DNA, 911 bp, Homo sapiens
cttgcctctggcttttgtttctctcttgtttctggcttcagtgaccttgagtaccctggaatcttccatattgagaaagaaatgatagaggggaggggacatggaaaaaagaattaaatatatctatttttaaaaagaaagaaaattttagaatggacatgtctagaaggaggaggaaacagaggagggggacaggtataaaaactggacttctctgaatatactctgctttgaaggtttgactttggaatcatctacatattttatctaatacaagaatatcgaaacttaaatggcaatcccaaaaatctaaaaggaatagaaatcaaattagcctctgtaataaatgggttgtataaccacacaaaggactatttgaaatgactttcaaagagtaatttgagaatacttccttmttggaatataacctaaaaacagaagaattgcaaactgttttcaatgttttcagtaatcatattgagactttaatacatatattgtgggataaaggaaatgaatgttggtgtcactgatagagataagaaataaaagttcaggtaaaaattctgtaaatcctaaatttgaattggaattttatattttatttttaaaatacctttttctacccccatccactgaaaagccctagaaatattggccaacctagtagaaatgatttccctctcacccgggatattatctctaaatataatttaccaaagtcttattgaagaaattgctgtttctgagcttgaagcaactatacaaatgtacctggaagattttaccatactggaaaaaagcagcttgacaaagactactgaagtcatgtcaaaaaaaacaaagaagtcaacttgaaggggctttctcttggcaaagatgggaaaatgtgaaccttgataaaaaataat

SEQ ID NO: 669329 - DNA, 595 bp, Homo sapiens
tggttgttcagaatttcagcatgactgtgaattaatgaatttggtaaactatagatgtagagaaaaagtgacagcatcaaatgtacactgaaggtacaaacgtgtcattcattgaacccacctaaagaacaaaatgaccttttcctcttttccctggtgaggatgaggcaatatatttttttaacttgcattttaggttcaggagtacatgtgcaggtttttatataggtaaacttcatatcatgagggtttggtgtagagattatttcatcacccagataataagcgcaatacccaataggtaytttttctgatcctctcccctctcccaccatccaccctcaaataggccctaacatctgttatttccctctttgtgtccatgaggtctcatcatttagcccccacttacaagtgagaacatgtggttatgtggtttcctgcttctgtattagtttgcttaggataatggcctccagctcaatctgtgttgctgcaaaggacatgatctcattcttttttatgtctgcatagtattccatggtgtatatgtaccacattttctttatccaggctactattgatgggcacttaa

SEQ ID NO: 669330 - DNA, 649 bp, Homo sapiens
taatgtggtgaatatagtgatggtaatgtattgtacatttcaaaattgctaggagaataaatttaaaatgttctcactacaaaaataataaatacttgaagtgatgggtatgtaaattagttagatttaattattccacattgtattcatgaatgataacttcattttgtatcccgtgaatatgtaattaaaaattgtcaatttacaataaagttaaaaagagaaaatatttatacgagtcaactttgtattaggaagccctctttttcatttttatttcttaactgctktttaaattttaggtgatcttttctattttaatgatttaaaaagtatctgtcattcattttatttcccctatcctggaaagcatccaaacagtacaatagtaatttatggcctttcaagctctgtatgatccagttaaattcctgtgccctctgattcaaataattgttattttgtattttgattgacaggttttcaagtatctcaaaagagggaggtaagaaaaaaaaagtgataaaattaaaacagtagatttttttaagtgtgaacggaaccaggtttagcattagtgtgttgcagaacttttagcattttgaatagaagtttatgccactatgggaagtcttttatgttcacaatg

SEQ ID NO: 669331 - DNA, 1346 bp, Homo sapiens
gaatagggaattatttggaaaataaaattaacataaaagaaataattaaaaacatactaccagcgccggaagtagctttagagcaggggtccgcgagctccagggcatggactggtaccaggtccatggcctgttaggaactggctgcaccgcagaagatgagccacaagccacggggagcattaccacctaagctccgcctcctgtcagatcagcacttgcattagattcaggaacattggagcacaaacactattgtgacctgtgcatgcgagggatctaggttgtgcactccttatgagaatctaatgcctgatgatctgtcactgtctcccatcatccccagatgggactgtctagttgcaggaaaacaagctcagggctcccactgattctacattacggtgacttgtataattatgtcattatatattacgatataataataataaaaataaagcacgcacttgaatcatcccaaaaccatctccccacccccagtggtctgtggaacagttgtcttccatgaaaccagtccctggtgccaaaaaggttagggacagaatatccagcctctactctcatcccctctggactggagccactttatatctagaaaggcgatttatttgttttgttctctgcagtgcctggtagaaagtaatccactcaatatatgtttaataaataaatgaaagaaacaggaaagtataaacccaagtaactgatttaatgacttgcctgaggtcaccctgaagtggccaaaccccaggttccctgttcagctatgaccagagcccattcttcattcattgttaaacataaactagatgttttatccacacagagatagctatctagagatatgaacttccagaaagttgaccgtattttttgtttacatgtggatatctgatrtcttgaaaatatacacatttagtcattaagtttaaaattaaaatataggcctaaaattttttggagccatacttccaataataatattatatggatgcacaagctatattacatattaggaaaaacaataaagccccaaacctacagatttctctctctcacacacacacacacacacacacacacacacacacacactgctcaccaagattgttgattctccagttttccaaacactttgtttctctactgtagctctaggtgaaacaagactgatcctgagtttatagctgctgaagctgggtgatgactccatggcttctcattagaccatggcctcttcatctgtatatttttcaattgcccattaaaaaatgtttttaaattgagagccaaaaaagagtatccattaacaaataaatgtatca

SEQ ID NO: 669332 - DNA, 1346 bp, Homo sapiens
gaatagggaattatttggaaaataaaattaacataaaagaaataattaaaaacatactaccagcgccggaagtagctttagagcaggggtccgcgagctccagggcatggactggtaccaggtccatggcctgttaggaactggctgcaccgcagaagatgagccacaagccacggggagcattaccacctaagctccgcctcctgtcagatcagcacttgcattagattcaggaacattggagcacaaacactattgtgacctgtgcatgcgagggatctaggttgtgcactccttatgagaatctaatgcctgatgatctgtcactgtctcccatcatccccagatgggactgtctagttgcaggaaaacaagctcagggctcccactgattctacattacggtgacttgtataattatgtcattatatattacgatataataataataaaaataaagcacgcacttgaatcatcccaaaaccatctccccacccccagtggtctgtggaacagttgtcttccatgaaaccagtccctggtgccaaaaaggttagggacagaatatccagcctctactctcatcccctctggactggagccactttatatctagaaaggcgatttatttgttttgttctctgcagtgcctggtagaaagtaatccactcaatatatgtttaataaataaatgaaagaaacaggaaagtataaacccaagtaactgatttaatgacttgcctgaggtcaccctgaagtggccaaaccccaggttccctgttcagctatgaccagagcccattcttcattcattgttaaacataaactagatgttttatccacacagagatagctatctagagatatgaacttccagaaagttgaccgtattttttgtttacatgtggatatctgatatcttgaaaatatacacatttagtcattaagtttaaaattaaaatataggcctaaaattttttggagccatacttccaataataatattatatggatgcacaagctatattacatattaggaaaaacaataaagccccaaacctacagatttctctctctcacacacacacacacacacacacacacacacacacacacwgctcaccaagattgttgattctccagttttccaaacactttgtttctctactgtagctctaggtgaaacaagactgatcctgagtttatagctgctgaagctgggtgatgactccatggcttctcattagaccatggcctcttcatctgtatatttttcaattgcccattaaaaaatgtttttaaattgagagccaaaaaagagtatccattaacaaataaatgtatca

SEQ ID NO: 669333 - DNA, 631 bp, Homo sapiens
tgcctggctaatttttgtattttagcagagacaggwttttgtcatgttggccaggctggtcttaaactcctggcctcaagtgatctgctcacctcggctgcccaaagtgctgggatttcaggcatgagccactgtgcccagccaggccaagagatatttcatacaactaagtaagaaacaacatgccagtacctcatcgataccccccagagattctctccttcctttgaaattgaagttttcttccgcgagtcctgtcccccttatcctccttctgggtttttcttcaattgttagccggtttccagcactgccagagcctcacgtgcctgtggtccaagtaattctccaacatcgatttcaccaatttcagcaaatcctgcatcttttgcaacctttgcaattttacttttcagtgtatttacatcctgttagtattttaaacattttacacacctaagagtcaggaggagggaccgacttgacactgctatggagtgggagggtatcaggatgacatttggttaaaacagacataagatccataataaacagtggcttaagcaaaagaggatgcatattttctctctctcaagagattcaccgagcaggtatggggcaaagatccagg

SEQ ID NO: 669334 - DNA, 631 bp, Homo sapiens
tgcctggctaatttttgtattttagcagagacaggattttgtcatgttggccaggctggtcttaaactcctggcctcaagtgatctgctcacctcrgctgcccaaagtgctgggatttcaggcatgagccactgtgcccagccaggccaagagatatttcatacaactaagtaagaaacaacatgccagtacctcatcgataccccccagagattctctccttcctttgaaattgaagttttcttccgcgagtcctgtcccccttatcctccttctgggtttttcttcaattgttagccggtttccagcactgccagagcctcacgtgcctgtggtccaagtaattctccaacatcgatttcaccaatttcagcaaatcctgcatcttttgcaacctttgcaattttacttttcagtgtatttacatcctgttagtattttaaacattttacacacctaagagtcaggaggagggaccgacttgacactgctatggagtgggagggtatcaggatgacatttggttaaaacagacataagatccataataaacagtggcttaagcaaaagaggatgcatattttctctctctcaagagattcaccgagcaggtatggggcaaagatccagg

SEQ ID NO: 669335 - DNA, 593 bp, Homo sapiens
taagcatatgacacttgccactttcttctaatcaagtgtgtaagaagaatgaaacacctgtaagcatcatttctttgaactgactaccacctttgcagtmtgcaatacgagctccctttgccctgtagggaaatgtcaagaatacatagccgttttcaggttcctgtcatctgtgttatccagtaactgaggcattgtcatctcatcagcaatgtcgattcctctttttctaacaacattataattgtcgctttcctgacagacatcttaggaaattcacatacttgccaaattttagacagaactactttaaaacctcagtgttgcaaagaagactcattctaaaacagagaagtggacaaaatgcccttcatatgtcttaataacagctgtttggaatagttgtgtgtcttgagaaaaccatggagcctggtagagggaggatccaaaagtgctaaaagtagactccttcctttggatcaggaaggctctcctgttactgtttcagcagccagacaggcattttaaatcaaaactgaggcatatgacctagattacttcaactaatatttatttgacataatttgaatatg

SEQ ID NO: 669336 - DNA, 593 bp, Homo sapiens
taagcatatgacacttgccactttcttctaatcaagtgtgtaagaagaatgaaacacctgtaagcatcatttctttgaactgactaccacctttgcagtctgcaatacgagctccctttgccctgtagggaaatgtcaagaatacatagccgttttcaggttcctgtcatctgtgttatccagtaactgaggcattgtcatctcatcagcaatgtcgattcctctttttctaasaacattataattgtcgctttcctgacagacatcttaggaaattcacatacttgccaaattttagacagaactactttaaaacctcagtgttgcaaagaagactcattctaaaacagagaagtggacaaaatgcccttcatatgtcttaataacagctgtttggaatagttgtgtgtcttgagaaaaccatggagcctggtagagggaggatccaaaagtgctaaaagtagactccttcctttggatcaggaaggctctcctgttactgtttcagcagccagacaggcattttaaatcaaaactgaggcatatgacctagattacttcaactaatatttatttgacataatttgaatatg

SEQ ID NO: 669337 - DNA, 593 bp, Homo sapiens
taagcatatgacacttgccactttcttctaatcaagtgtgtaagaagaatgaaacacctgtaagcatcatttctttgaactgactaccacctttgcagtctgcaatacgagctccctttgccctgtagggaaatgtcaagaatacatagccgttttcaggttcctgtcatctgtgttatccagtaactgaggcattgtcatctcatcagcaatgtcgattcctctttttctaacaacattataattgtcrctttcctgacagacatcttaggaaattcacatacttgccaaattttagacagaactactttaaaacctcagtgttgcaaagaagactcattctaaaacagagaagtggacaaaatgcccttcatatgtcttaataacagctgtttggaatagttgtgtgtcttgagaaaaccatggagcctggtagagggaggatccaaaagtgctaaaagtagactccttcctttggatcaggaaggctctcctgttactgtttcagcagccagacaggcattttaaatcaaaactgaggcatatgacctagattacttcaactaatatttatttgacataatttgaatatg

SEQ ID NO: 669338 - DNA, 613 bp, Homo sapiens
cctcttgcttctctctgctctacttgctccttctttgctggatcctcttcctgggtaaacccttaaatgtgttacattctttaggatctgtccttgtctgtctttgattctgcctgctcttctcggtgatcgcagacactcttgtgtcctcagttaccatctatctgacactggctcctaaatccattatctttaacttaactttctcacttaactgccagatctcattgcctcttgaatatctctgcctgtttcccacaggtacttcaaaaattgtatccacaaatgagattacsagtcccccttccacacacacacacacacacacacacacacacacacacacacactttgtcttccttttatagcctaaattaatcaagcattctcagctccttgcccaagttccatatctatccagttttcaaatcatttttattttatcttgaaatatctcttgaacccagcacatcgctttcctattttactgatacagttgcgtcagttcagcactcatcttttttcaccatagcttcctaacttttctctgtggcctagttctctccattctatctaatcttccctctgtattctgccacagataactttcaaa

SEQ ID NO: 669339 - DNA, 588 bp, Homo sapiens
gaagcagaacaattatcattctttataccttgtattgtgcagtttctattacttggcattaatattctactaagatgactagtttgaggcaatttaaggacaaaaatacttcagttttctgaatttacttatgtagagataagttgaagggataaaagacaaatatggcacccaaagcacattatttgtctctaatgatccaatgtcatcttttcacatatttaacccttataataaatattcttccaacaagaggtaaaggaattacttataggtaatggaagattcatgaaatatacagcatcaagtccttttggtgaaataatcaaagattaggagagggcaatccaaagataatttktttgtgagcagaagcaattttattgggaagacagccatacatgtgtctgtgcaaggtgtggtgtctgtgtgtgtgtgtatgtgtgtgtgtgtgtgtgtgtgtgtgataatgaatatccatggacagaattgaagtaagaaagctatctctgtttattttcatatccattttagaaaaacaaatcttccaaagtcccatctttttaactcagaaagagaagatgaaaa

SEQ ID NO: 669340 - DNA, 588 bp, Homo sapiens
gaagcagaacaattatcattctttataccttgtattgtgcagtttctattacttggcattaatattctactaagatgactagtttgaggcaatttaaggacaaaaatacttcagttttctgaatttacttatgtagagataagttgaagggataaaagacaaatatggcacccaaagcacattatttgtctctaatgatccaatgtcatcttttcacatatttaacccttataataaatattcttccaacaagaggtaaaggaattacttataggtaatggaagattcatgaaatatacagcatcaagtccttttggtgaaataatcaaagattaggagagggcaatccaaagataatttttttgtragcagaagcaattttattgggaagacagccatacatgtgtctgtgcaaggtgtggtgtctgtgtgtgtgtgtatgtgtgtgtgtgtgtgtgtgtgtgtgataatgaatatccatggacagaattgaagtaagaaagctatctctgtttattttcatatccattttagaaaaacaaatcttccaaagtcccatctttttaactcagaaagagaagatgaaaa

SEQ ID NO: 669341 - DNA, 1441 bp, Homo sapiens
aaatactttgaaaatcccttaaagctactgtacagggcaggtagctaggcatgaggtaattataaataaaatataatgacttgaagatgaacccagttctcctcaaagtttaaaactatctctttcagagaagttgaaccttaaaaktcatgtttaaatttataaattaataatatgtatttttccaataaaatgtacaacagaggtctaaaatctgaaacagtttggtaatgtatttatctacataaatgagctacaagaaaaatttatatttcaagttaattaaaaatgagtaatatcaatagcgcggaaatcaagagtacttatatcgctacggcttttacatacaacaagtatagaaagtggcctagaaaatgacactggacctttaataaataaaatatctttccaggcatggtatctgaactatccactcagtaacatgtaaaagaattttaaaattcaacaccaagataattaacgttcagtgtatctttttataggttctcccctccatcaatctgccaacttatatgaatcaatgttgtacccaagctagatgtgctagataaagaggccagaagatgaaaagctagacagaagatgaatactgaactctcttcagtaactaacttctttacttatgctgcaatgtctttatttacatacttaaatttttcaatgctattccacaggatctctttcttttctatacttggaaaaatctactttcatttataattgtttggttggtttttttttttttttttttttttggttttttttgttgttgtttttgctttgttgaaggtgaatcatatctctattcaaggaacctatcttttatagcaatcatctggtctaaataatataatcactacaataatataatcactaatggatcacgtaatactgagcaaagaggattatggctgttgagcagaggagttggggcaagagtctggaatttggatacctgaaggactagggaagtcacaagagtaaaaatctgtgggacagttagcatttctctctccaactaagcacctatgatgtgcataacatatagaacactagaaaaggagtgaaataactttggtgagccatttgaactttctaccactttgagataaagtagtagctcatttgagtggtttctgaatagttaacactgtgagacttaaagaaggcctgtgcttatgtgacgctcactggacttttgactacacacccctatctcctaagtgtactcaccatcagcatcggctttacccatataatgccaaaacaactattctatcaaatcaggcaaactacaaatcaatcctaacgtagggatgggagatctgtttaatagtttattgaactgaattgaatacttcagtaaaaagagttatatccatagcccttagcagacatgggttgtttttactaaaggaca

SEQ ID NO: 669342 - DNA, 646 bp, Homo sapiens
gaaaggtcaagggtcttgcctgaagttagacaacaataggaccatctgaaaacaaccacccaacccttgccgagaacctgggggttggccactgccacacttctcccctaggaccctagcagggaactctctccccctcagccttctcttgatgagccaccctgtctagggtagcctggcctaggatctctgtcagatcccagcataaatcactcaccaagctgtgttttctccagaatgaacatggcaggtgacctgtgaggtgtgccttggatggatgtcggaggaagggcatgttgggctagggcctcgttctcttatgcacatactgctcttgcttggcaggattcttcacttcttctcagctctaaaggaaacaaaatattctggcctttattctcacgcattcatttcacraatgaataaatatggatatataaaatatggatatgtgtatccatcatttatttattaaataaaataatggtggggcagtacctgctacatagtttgggttcagtaaacatcagtttcctctttccttttcaacacatttccaaactttctctccccactttccctgccctctgctcagggagcacaagcttatatcaagacgagaaaaacacgaatgcaatttagcaag

SEQ ID NO: 669343 - DNA, 1413 bp, Homo sapiens
aattgttatccccaaatgccaagttttaggactaaagtcccaatgtgtaggattttcctatttattcaaggtttgtcaagatgctgtcaagctcagaggtagggcttccccatgaaggtaagaaacatattcagctgccagttctcttcctcccaaactgagcaggaatatttttatttcctattttcccacccccaatcagacatgtagcacctcttagccttgtcgtattgaatgattttagcagtttccaaaacaaaattaaatacagctccagcttgagaaatgttccacctcctggagtcatggcatttagtattattattcacttattattattcaaaacaaataaggatgataaaacatcagttggagccactccaggacagaaggaactggaatatctaataaaaaccatagtattccacaaatagaaagtgttagaaaatgcagaaaaacaatgacaaaggacattctgcaccttctcctcaaaacacagawcacctgaaacaatagagcagctctaaatgaccagtgaatctgacacagagagaactgtttagggtactcccagttcagacctcagaaagatcaaatcgatgggaagcatgcagcacagagtaggtcatgatttttactttccttccctctcttgtgaatttcaacggaacttccttcaaaaagtctaaactccctgcagctaaggagaaaaggttatcgcattcaggaatttgctctccactagaaaacatccaatgacccccacgttcaggaagtctcagagcctttaaagcacatttcagcctgagcaaatgtttaactccaacttgggaaaagtcacaggatgttgcaaaccaccaacatcccaagacgggccttcccagacttaccttcccagaggagaatgtggcagattagtggtttggcgactcttacttggtccccagtgcaaggtggtcaggaatgttacacagattgagaagccaacctttgctgaggtccccccgaccacaagccctccacctcattcttcttctccctgattgtctccagtcctgtattatctcgcactacttcctccagcttcatctgaagagagcctcattcctgagatgcctaactttgggggtgttgattgttacaaagtagcagggtttacttgtatggttcactctacctagatctatttccagaaagaaaataggcagagacaaggcaaacctggagccccaggggaccccctaattgtctgtctgcccactctctgcactgcacaaccatcaactcctactgccatttccagttagagaaggatagaaagggaaagagaagcagagcaggaggcaaaatcggaggaacggtttgcatcaattttgaaataggatgaggaactgtgggaccaaatcttttttt

SEQ ID NO: 669344 - DNA, 1413 bp, Homo sapiens
aattgttatccccaaatgccaagttttaggactaaagtcccaatgtgtaggattttcctatttattcaaggtttgtcaagatgctgtcaagctcagaggtagggcttccccatgaaggtaagaaacatattcagctgccagttctcttcctcccaaactgagcaggaatatttttatttcctattttcccacccccaatcagacatgtagcacctcttagccttgtcgtattgaatgattttagcagtttccaaaacaaaattaaatacagctccagcttgagaaatgttccacctcctggagtcatggcatttagtattattattcacttattattattcaaaacaaataaggatgataaaacatcagttggagccactccaggacagaaggaactggaatatctaataaaaaccatagtattccacaaatagaaagtgttagaaaatgcagaaaaacaatgacaaaggacattctgcaccttctcctcaaaacacagaacacctgaaacaatagagcagctctaaatgaccagtgaatctgacacagagagaactgtttagggtactcccagttcagacctcagaaagatcaaatcgatgggaagcatgcagcacagagtaggtcatgatttttactttccttccctctcttgtgaatttcaacggaacttccttcaaaaagtctaaactccctgcagctaaggagaaaaggttatcgcattcaggaatttgctctccactagaaaacatccaatgacccccacgttcaggaagtctcagagcctttaaagcacatttcagcctgagcaaatgtttaactccaacttgggaaaagtcacaggatgttgcaaaccaccaacatcccaagacgggccttcccagacttaccttcccagaggagaatgtggcagattagtggtttggcgactcttacttggtccccagtgcaaggtggtcaggaatgttacacagattgagaagccaacctttgctgaggtccccccgaccacaagccctccacctcattcttcttctccctgattgtctccagtcctgtattatctcgcactacttcctccagcttcatctgaagagagcctcattcctgagatgcctaactttgggggtgttgattgttacaaagtagcagggtttacttgtatggttcactctacctagatctatttccagaaagaaaataggcagagacaaggcaaacctggagccccaggggaccccctaattgtctgtctgcccactctctgcactgcacaaccatcaactcctactgccatttccagttagagaaggatagaaagggaragagaagcagagcaggaggcaaaatcggaggaacggtttgcatcaattttgaaataggatgaggaactgtgggaccaaatcttttttt

SEQ ID NO: 669345 - DNA, 2550 bp, Homo sapiens
  misc_feature 916, 934, 935, 936, 937, 938, 939, 940, 941, 942, 943, 944,945, 946, 947, 948, 949, 950, 951, 952, 953, 954, 955, 956,957, 958, 959, 960, 961, 962, 963, 964, 965, 966, 967, 968,969, 970, 971, 972, 973, 974, 975, 976, 977, 978, 979: n = A,T,C or G
  misc_feature 980, 981, 982, 983, 984, 985, 986, 987, 988, 989, 990, 991,992, 993, 994, 995, 996, 997, 998, 999, 1000, 1001, 1002,1003, 1004, 1005, 1006, 1007, 1008, 1009, 1010, 1011, 1012,1013, 1014, 1015, 1016, 1017, 1018, 1019, 1020, 1021: n = A,T,C or G
  misc_feature 1022, 1023, 1024, 1025, 1026, 1027, 1028, 1029, 1030, 1031,1032, 1033: n = A,T,C or G
acaattctgaagacatttctatttttattttatcaatactttttaaattatttgtatttataaaagaactcttttgtctgggcacagtggttcatgcctgtatcccagcagtttgagaggctgcggcaagaggatcacttgagctcaggagtttgagaccagcctgggcaacatagtgagacccaatctctactaagaataagataaacaattaccaggcatggtggtgcatgcctattgtcccctctactagagaggatgaggcaggaggattgcttgagcctgggagtttgagataacagtgagctatgatcccactactgcactccagtctggggaacagattgagaccttagagtgagaccttgtctcaaaaagasaaaaaaataaagaattgtttcattcttttgtttttcttcagccaagtaaccttgaattggtaacaccacagacagtaagtcttatctcaacaccagtagacaaatcagcagattcaaagtaggcagggaaaaaaaaagataggcaaaagaactgagactttttcattttagggtttttaaaaatagtaactatttgagttctgaattttctttcatgtaatttggccgtcaggtttaaagtgtgcactagaggtcaggtgcagtggctcattcatgtaatcccaacactacgggaggctgaggcaggtggatcacttgaggcctggagtttgagaccagcctggccaacgtgacaaaaccccatctctactgaaaatacaaaaattaactgggtgtggtggtgtgcaccctgtagtctcagctattcaggaagctgaggaaggataatcgctcaaacctgggaggcggaggttgcagtgagccgcgattgtaccaccatactccatcctgggcaacagaacaagactctgtgtcanaaagaaaagatatatatnnnnnnnnnnnnnnnnnnnnnnnnnnnnnnnnnnnnnnnnnnnnnnnnnnnnnnnnnnnnnnnnnnnnnnnnnnnnnnnnnnnnnnnnnnnnnnnnnnnntgtgtggctagaatggtccataatatatagccagctccagtcccagaaaacctagcaagcttaaggttagagcttctcattttggccttttcaagattaattctcctttaataagcccttcccctctagggaggtacttgccggagcgctgcctgaagttggttttctgatgccctgttgtttctgttctgaatggtttatttctcagtataagagctcagcaaagcaggcagagttaaaaagcagagacatgaaggctttaaaatcatggacttcactcctacactgaatctcaggtccccagaaagacagaaacaccatgggaccacagcaaaggcagaaggaggaatgagagagggaggtggacagaacaacaaacaggagttggctctcaatttttcaaatgtgccattttctttaggtttttctagtttatggagtctctttgttccagttgagcacacagataaactagagatctcacaaggcttttgctgagaacatcaaagcctttaacctctgttgggccaaatatttagaccaaaaatacagatagacacacaaaagccagaaccagaccagattgagtatctcagtggctacagcctttattccctttattctttaggattcgaactcaaaccagattcaggattctaacccaaccaggacacccctggggtgaaactgaaaccccacagtctagacaaggttgggggtctttttttattttttatttttttgagatggagtttcactcttgttgcccaggctggagtgcaaaggtgcaatatcacctcactgcaacctctgtctctcaggtttaagaacttatcctgcctcagtctcccaagctgggattagaggcttgtgccaccacgcccagctcattttgcatttttagtagagacggggtttctcaatgttggtcaggctggtctcgaactcccaacctcaggtgatccacacacctaagcctcccaaagtgttggcattacaggcatgagccaccgcgcccggcctgcttgttcttttcatttcatccttatctccgaatacaggagagtagctgatttggtgttcactaacaagcacagaagctttgttacatttacagtgtcattcttgggaaaacctgaagttttgcctcccgggttcacaccattctcctgcctcagcctcctgagtagctgggactataggcgcccgccacctcacccagctaattttttgtatttttagtagagacggggtttcaccgtgttagccaggatggtctcgatctcctgaccttgtgatccacccacctcggcctcccagagtgctgggattacaggcttgagacaccacgcccagccagaggttctaatttcaatgatgattgtgctttttatctcttcctcagcatctggttcatgataaaatttcaggcatcttgatggtatctaaatcaattgttgattctgtcctggagaaacacaagcataacctctatgccaagttataattttacctat

SEQ ID NO: 669346 - DNA, 2550 bp, Homo sapiens
  misc_feature 916, 934, 935, 936, 937, 938, 939, 940, 941, 942, 943, 944,945, 946, 947, 948, 949, 950, 951, 952, 953, 954, 955, 956,957, 958, 959, 960, 961, 962, 963, 964, 965, 966, 967, 968,969, 970, 971, 972, 973, 974, 975, 976, 977, 978, 979: n = A,T,C or G
  misc_feature 980, 981, 982, 983, 984, 985, 986, 987, 988, 989, 990, 991,992, 993, 994, 995, 996, 997, 998, 999, 1000, 1001, 1002,1003, 1004, 1005, 1006, 1007, 1008, 1009, 1010, 1011, 1012,1013, 1014, 1015, 1016, 1017, 1018, 1019, 1020, 1021: n = A,T,C or G
  misc_feature 1022, 1023, 1024, 1025, 1026, 1027, 1028, 1029, 1030, 1031,1032, 1033: n = A,T,C or G
acaattctgaagacatttctatttttattttatcaatactttttaaattatttgtatttataaaagaactcttttgtctgggcacagtggttcatgcctgtatcccagcagtttgagaggctgcggcaagaggatcacttgagctcaggagtttgagaccagcctgggcaacatagtgagacccaatctctactaagaataagataaacaattaccaggcatggtggtgcatgcctattgtcccctctactagagaggatgaggcaggaggattgcttgagcctgggagtttgagataacagtgagctatgatcccactactgcactccagtctggggaacagattgagaccttagagtgagaccttgtctcaaaaagagaaaaaaataaagaattgtttcattcttttgtttttcttcagccaagtaaccttgaattggtaacaccacagacagtaagtcttatctcaacaccagtagacaaatcagcagattcaaagtaggcagggaaawaaaaagataggcaaaagaactgagactttttcattttagggtttttaaaaatagtaactatttgagttctgaattttctttcatgtaatttggccgtcaggtttaaagtgtgcactagaggtcaggtgcagtggctcattcatgtaatcccaacactacgggaggctgaggcaggtggatcacttgaggcctggagtttgagaccagcctggccaacgtgacaaaaccccatctctactgaaaatacaaaaattaactgggtgtggtggtgtgcaccctgtagtctcagctattcaggaagctgaggaaggataatcgctcaaacctgggaggcggaggttgcagtgagccgcgattgtaccaccatactccatcctgggcaacagaacaagactctgtgtcanaaagaaaagatatatatnnnnnnnnnnnnnnnnnnnnnnnnnnnnnnnnnnnnnnnnnnnnnnnnnnnnnnnnnnnnnnnnnnnnnnnnnnnnnnnnnnnnnnnnnnnnnnnnnnnntgtgtggctagaatggtccataatatatagccagctccagtcccagaaaacctagcaagcttaaggttagagcttctcattttggccttttcaagattaattctcctttaataagcccttcccctctagggaggtacttgccggagcgctgcctgaagttggttttctgatgccctgttgtttctgttctgaatggtttatttctcagtataagagctcagcaaagcaggcagagttaaaaagcagagacatgaaggctttaaaatcatggacttcactcctacactgaatctcaggtccccagaaagacagaaacaccatgggaccacagcaaaggcagaaggaggaatgagagagggaggtggacagaacaacaaacaggagttggctctcaatttttcaaatgtgccattttctttaggtttttctagtttatggagtctctttgttccagttgagcacacagataaactagagatctcacaaggcttttgctgagaacatcaaagcctttaacctctgttgggccaaatatttagaccaaaaatacagatagacacacaaaagccagaaccagaccagattgagtatctcagtggctacagcctttattccctttattctttaggattcgaactcaaaccagattcaggattctaacccaaccaggacacccctggggtgaaactgaaaccccacagtctagacaaggttgggggtctttttttattttttatttttttgagatggagtttcactcttgttgcccaggctggagtgcaaaggtgcaatatcacctcactgcaacctctgtctctcaggtttaagaacttatcctgcctcagtctcccaagctgggattagaggcttgtgccaccacgcccagctcattttgcatttttagtagagacggggtttctcaatgttggtcaggctggtctcgaactcccaacctcaggtgatccacacacctaagcctcccaaagtgttggcattacaggcatgagccaccgcgcccggcctgcttgttcttttcatttcatccttatctccgaatacaggagagtagctgatttggtgttcactaacaagcacagaagctttgttacatttacagtgtcattcttgggaaaacctgaagttttgcctcccgggttcacaccattctcctgcctcagcctcctgagtagctgggactataggcgcccgccacctcacccagctaattttttgtatttttagtagagacggggtttcaccgtgttagccaggatggtctcgatctcctgaccttgtgatccacccacctcggcctcccagagtgctgggattacaggcttgagacaccacgcccagccagaggttctaatttcaatgatgattgtgctttttatctcttcctcagcatctggttcatgataaaatttcaggcatcttgatggtatctaaatcaattgttgattctgtcctggagaaacacaagcataacctctatgccaagttataattttacctat

SEQ ID NO: 669347 - DNA, 2550 bp, Homo sapiens
  misc_feature 916, 934, 935, 936, 937, 938, 939, 940, 941, 942, 943, 944,945, 946, 947, 948, 949, 950, 951, 952, 953, 954, 955, 956,957, 958, 959, 960, 961, 962, 963, 964, 965, 966, 967, 968,969, 970, 971, 972, 973, 974, 975, 976, 977, 978, 979: n = A,T,C or G
  misc_feature 980, 981, 982, 983, 984, 985, 986, 987, 988, 989, 990, 991,992, 993, 994, 995, 996, 997, 998, 999, 1000, 1001, 1002,1003, 1004, 1005, 1006, 1007, 1008, 1009, 1010, 1011, 1012,1013, 1014, 1015, 1016, 1017, 1018, 1019, 1020, 1021: n = A,T,C or G
  misc_feature 1022, 1023, 1024, 1025, 1026, 1027, 1028, 1029, 1030, 1031,1032, 1033: n = A,T,C or G
acaattctgaagacatttctatttttattttatcaatactttttaaattatttgtatttataaaagaactcttttgtctgggcacagtggttcatgcctgtatcccagcagtttgagaggctgcggcaagaggatcacttgagctcaggagtttgagaccagcctgggcaacatagtgagacccaatctctactaagaataagataaacaattaccaggcatggtggtgcatgcctattgtcccctctactagagaggatgaggcaggaggattgcttgagcctgggagtttgagataacagtgagctatgatcccactactgcactccagtctggggaacagattgagaccttagagtgagaccttgtctcaaaaagagaaaaaaataaagaattgtttcattcttttgtttttcttcagccaagtaaccttgaattggtaacaccacagacagtaagtcttatctcaacaccagtagacaaatcagcagattcaaagtaggcagggaaaaaaaaagataggcaaaagaaytgagactttttcattttagggtttttaaaaatagtaactatttgagttctgaattttctttcatgtaatttggccgtcaggtttaaagtgtgcactagaggtcaggtgcagtggctcattcatgtaatcccaacactacgggaggctgaggcaggtggatcacttgaggcctggagtttgagaccagcctggccaacgtgacaaaaccccatctctactgaaaatacaaaaattaactgggtgtggtggtgtgcaccctgtagtctcagctattcaggaagctgaggaaggataatcgctcaaacctgggaggcggaggttgcagtgagccgcgattgtaccaccatactccatcctgggcaacagaacaagactctgtgtcanaaagaaaagatatatatnnnnnnnnnnnnnnnnnnnnnnnnnnnnnnnnnnnnnnnnnnnnnnnnnnnnnnnnnnnnnnnnnnnnnnnnnnnnnnnnnnnnnnnnnnnnnnnnnnnntgtgtggctagaatggtccataatatatagccagctccagtcccagaaaacctagcaagcttaaggttagagcttctcattttggccttttcaagattaattctcctttaataagcccttcccctctagggaggtacttgccggagcgctgcctgaagttggttttctgatgccctgttgtttctgttctgaatggtttatttctcagtataagagctcagcaaagcaggcagagttaaaaagcagagacatgaaggctttaaaatcatggacttcactcctacactgaatctcaggtccccagaaagacagaaacaccatgggaccacagcaaaggcagaaggaggaatgagagagggaggtggacagaacaacaaacaggagttggctctcaatttttcaaatgtgccattttctttaggtttttctagtttatggagtctctttgttccagttgagcacacagataaactagagatctcacaaggcttttgctgagaacatcaaagcctttaacctctgttgggccaaatatttagaccaaaaatacagatagacacacaaaagccagaaccagaccagattgagtatctcagtggctacagcctttattccctttattctttaggattcgaactcaaaccagattcaggattctaacccaaccaggacacccctggggtgaaactgaaaccccacagtctagacaaggttgggggtctttttttattttttatttttttgagatggagtttcactcttgttgcccaggctggagtgcaaaggtgcaatatcacctcactgcaacctctgtctctcaggtttaagaacttatcctgcctcagtctcccaagctgggattagaggcttgtgccaccacgcccagctcattttgcatttttagtagagacggggtttctcaatgttggtcaggctggtctcgaactcccaacctcaggtgatccacacacctaagcctcccaaagtgttggcattacaggcatgagccaccgcgcccggcctgcttgttcttttcatttcatccttatctccgaatacaggagagtagctgatttggtgttcactaacaagcacagaagctttgttacatttacagtgtcattcttgggaaaacctgaagttttgcctcccgggttcacaccattctcctgcctcagcctcctgagtagctgggactataggcgcccgccacctcacccagctaattttttgtatttttagtagagacggggtttcaccgtgttagccaggatggtctcgatctcctgaccttgtgatccacccacctcggcctcccagagtgctgggattacaggcttgagacaccacgcccagccagaggttctaatttcaatgatgattgtgctttttatctcttcctcagcatctggttcatgataaaatttcaggcatcttgatggtatctaaatcaattgttgattctgtcctggagaaacacaagcataacctctatgccaagttataattttacctat

SEQ ID NO: 669348 - DNA, 2550 bp, Homo sapiens
  misc_feature 916, 934, 935, 936, 937, 938, 939, 940, 941, 942, 943, 944,945, 946, 947, 948, 949, 950, 951, 952, 953, 954, 955, 956,957, 958, 959, 960, 961, 962, 963, 964, 965, 966, 967, 968,969, 970, 971, 972, 973, 974, 975, 976, 977, 978, 979: n = A,T,C or G
  misc_feature 980, 981, 982, 983, 984, 985, 986, 987, 988, 989, 990, 991,992, 993, 994, 995, 996, 997, 998, 999, 1000, 1001, 1002,1003, 1004, 1005, 1006, 1007, 1008, 1009, 1010, 1011, 1012,1013, 1014, 1015, 1016, 1017, 1018, 1019, 1020, 1021: n = A,T,C or G
  misc_feature 1022, 1023, 1024, 1025, 1026, 1027, 1028, 1029, 1030, 1031,1032, 1033: n = A,T,C or G
acaattctgaagacatttctatttttattttatcaatactttttaaattatttgtatttataaaagaactcttttgtctgggcacagtggttcatgcctgtatcccagcagtttgagaggctgcggcaagaggatcacttgagctcaggagtttgagaccagcctgggcaacatagtgagacccaatctctactaagaataagataaacaattaccaggcatggtggtgcatgcctattgtcccctctactagagaggatgaggcaggaggattgcttgagcctgggagtttgagataacagtgagctatgatcccactactgcactccagtctggggaacagattgagaccttagagtgagaccttgtctcaaaaagagaaaaaaataaagaattgtttcattcttttgtttttcttcagccaagtaaccttgaattggtaacaccacagacagtaagtcttatctcaacaccagtagacaaatcagcagattcaaagtaggcagggaaaaaaaaagataggcaaaagaactgagactttttcattttagggtttttaaaaatagtaactatttgagttctgaattttctttcatgtaatttggccgtcaggtttaaagtgtgcactagaggycaggtgcagtggctcattcatgtaatcccaacactacgggaggctgaggcaggtggatcacttgaggcctggagtttgagaccagcctggccaacgtgacaaaaccccatctctactgaaaatacaaaaattaactgggtgtggtggtgtgcaccctgtagtctcagctattcaggaagctgaggaaggataatcgctcaaacctgggaggcggaggttgcagtgagccgcgattgtaccaccatactccatcctgggcaacagaacaagactctgtgtcanaaagaaaagatatatatnnnnnnnnnnnnnnnnnnnnnnnnnnnnnnnnnnnnnnnnnnnnnnnnnnnnnnnnnnnnnnnnnnnnnnnnnnnnnnnnnnnnnnnnnnnnnnnnnnnntgtgtggctagaatggtccataatatatagccagctccagtcccagaaaacctagcaagcttaaggttagagcttctcattttggccttttcaagattaattctcctttaataagcccttcccctctagggaggtacttgccggagcgctgcctgaagttggttttctgatgccctgttgtttctgttctgaatggtttatttctcagtataagagctcagcaaagcaggcagagttaaaaagcagagacatgaaggctttaaaatcatggacttcactcctacactgaatctcaggtccccagaaagacagaaacaccatgggaccacagcaaaggcagaaggaggaatgagagagggaggtggacagaacaacaaacaggagttggctctcaatttttcaaatgtgccattttctttaggtttttctagtttatggagtctctttgttccagttgagcacacagataaactagagatctcacaaggcttttgctgagaacatcaaagcctttaacctctgttgggccaaatatttagaccaaaaatacagatagacacacaaaagccagaaccagaccagattgagtatctcagtggctacagcctttattccctttattctttaggattcgaactcaaaccagattcaggattctaacccaaccaggacacccctggggtgaaactgaaaccccacagtctagacaaggttgggggtctttttttattttttatttttttgagatggagtttcactcttgttgcccaggctggagtgcaaaggtgcaatatcacctcactgcaacctctgtctctcaggtttaagaacttatcctgcctcagtctcccaagctgggattagaggcttgtgccaccacgcccagctcattttgcatttttagtagagacggggtttctcaatgttggtcaggctggtctcgaactcccaacctcaggtgatccacacacctaagcctcccaaagtgttggcattacaggcatgagccaccgcgcccggcctgcttgttcttttcatttcatccttatctccgaatacaggagagtagctgatttggtgttcactaacaagcacagaagctttgttacatttacagtgtcattcttgggaaaacctgaagttttgcctcccgggttcacaccattctcctgcctcagcctcctgagtagctgggactataggcgcccgccacctcacccagctaattttttgtatttttagtagagacggggtttcaccgtgttagccaggatggtctcgatctcctgaccttgtgatccacccacctcggcctcccagagtgctgggattacaggcttgagacaccacgcccagccagaggttctaatttcaatgatgattgtgctttttatctcttcctcagcatctggttcatgataaaatttcaggcatcttgatggtatctaaatcaattgttgattctgtcctggagaaacacaagcataacctctatgccaagttataattttacctat

SEQ ID NO: 669349 - DNA, 2550 bp, Homo sapiens
  misc_feature 916, 934, 935, 936, 937, 938, 939, 940, 941, 942, 943, 944,945, 946, 947, 948, 949, 950, 951, 952, 953, 954, 955, 956,957, 958, 959, 960, 961, 962, 963, 964, 965, 966, 967, 968,969, 970, 971, 972, 973, 974, 975, 976, 977, 978, 979: n = A,T,C or G
  misc_feature 980, 981, 982, 983, 984, 985, 986, 987, 988, 989, 990, 991,992, 993, 994, 995, 996, 997, 998, 999, 1000, 1001, 1002,1003, 1004, 1005, 1006, 1007, 1008, 1009, 1010, 1011, 1012,1013, 1014, 1015, 1016, 1017, 1018, 1019, 1020, 1021: n = A,T,C or G
  misc_feature 1022, 1023, 1024, 1025, 1026, 1027, 1028, 1029, 1030, 1031,1032, 1033: n = A,T,C or G
acaattctgaagacatttctatttttattttatcaatactttttaaattatttgtatttataaaagaactcttttgtctgggcacagtggttcatgcctgtatcccagcagtttgagaggctgcggcaagaggatcacttgagctcaggagtttgagaccagcctgggcaacatagtgagacccaatctctactaagaataagataaacaattaccaggcatggtggtgcatgcctattgtcccctctactagagaggatgaggcaggaggattgcttgagcctgggagtttgagataacagtgagctatgatcccactactgcactccagtctggggaacagattgagaccttagagtgagaccttgtctcaaaaagagaaaaaaataaagaattgtttcattcttttgtttttcttcagccaagtaaccttgaattggtaacaccacagacagtaagtcttatctcaacaccagtagacaaatcagcagattcaaagtaggcagggaaaaaaaaagataggcaaaagaactgagactttttcattttagggtttttaaaaatagtaactatttgagttctgaattttctttcatgtaatttggccgtcaggtttaaagtgtgcactagaggtcaggtgcagtggctcattcatgtaatcccaacactacgggaggctgaggcaggtggatcacttgaggcctggagtttgagaccagcctggccaacgtgacaaaaccccatctctactgaaaatacaaaaattaactgggtgtggtggtgtgcaccctgtagtctcagctattcaggaagctgaggaaggataatcgctcaaacctgggaggcggaggttgcagtgagccgcgattgtaccaccatactccatcctgggcaacagaacaagactctgtgtcanaaagaaaagatatatatnnnnnnnnnnnnnnnnnnnnnnnnnnnnnnnnnnnnnnnnnnnnnnnnnnnnnnnnnnnnnnnnnnnnnnnnnnnnnnnnnnnnnnnnnnnnnnnnnnnntgtgtggctagaatggtccataatatatagccagctccagtcccagaaaacctagcaagcttaaggttagagcttctcattttggccttttcaagattaattctcctttaataagcccttcccctctagggaggtacttgccggagcgctgcctgaagttggttttctgatgccctgttgtttctgttctgaatggtttatttctcagtataagagctcagcaaagcaggcagagttaaaaagcagagacatgaaggctttaaaatcatggacttcactcctacactgaatctcaggtccccagaaagacagaaacaccatgggaccacagcaaaggcagaaggaggaatgagagagggaggtggacagaacaacaaacaggagttggctctcaatttttcaaatgtgccattttctttaggtttttctagtttatggagtctctttgttccagttgagcacacagataaactagagatctcacaaggcttttgctgagaacatcaaagcctttaacctctgttgggccaaatatttagaccaaaaatacagatagacacacaaaagccagaaccagaccagattgagtatctcagtggctacagcctttattccctttattctttaggattcgaactcaaaccagattcaggattctaacccaaccaggacacccctggggtgaaactgaaaccccacagtctagacaaggttgggggtctttttttattttttatttttttgagatggagtttcactcttgttgcccaggctggagtgcaaaggtgcaatatcacctcactgcaacctctgtctctcaggtttaagaacttatcctgcctcagtctcccaagctgggattagaggcttgtgccaccacgcccagctcattttgcatttttagtagagacggggtttctcaatgttggtcaggctggtctcgaactcccaacctcaggtgatccacacacctaagcctcccaaagtgttggcattacaggcatgagccaccgcgcccggcctgcttgttcttttcatttcatcctyatctccgaatacaggagagtagctgatttggtgttcactaacaagcacagaagctttgttacatttacagtgtcattcttgggaaaacctgaagttttgcctcccgggttcacaccattctcctgcctcagcctcctgagtagctgggactataggcgcccgccacctcacccagctaattttttgtatttttagtagagacggggtttcaccgtgttagccaggatggtctcgatctcctgaccttgtgatccacccacctcggcctcccagagtgctgggattacaggcttgagacaccacgcccagccagaggttctaatttcaatgatgattgtgctttttatctcttcctcagcatctggttcatgataaaatttcaggcatcttgatggtatctaaatcaattgttgattctgtcctggagaaacacaagcataacctctatgccaagttataattttacctat

SEQ ID NO: 669350 - DNA, 815 bp, Homo sapiens
ttctgaagtcagcagagaaaggagagacaaaaatggtaaggggaaaatagtatgaagtaataatatgaatgaagagctttctaaagtataacacatgtaagttgtgttaaatgtaaactatcatgattatatcattactgtctgactgatacaactatatccacctcagttagccacataagatcaattttcctataccttagagaataccagtaacctccagttcagaaacagcataaatatctatccacagctgagcagacacatacagctagctaccagatgaaatgggctatatcttcaaatactattsttttccgttttttaactgtggcaaaacacactcaacaatttgcatcttaaccactgttaagtatacaattcagtgtcattaaatgtattcacaatgttgtgcaagcatcaccaccacccatctccataattctttttgtcttgtaaaattgaaatcctgtacccattaaaaagtgactccccattccccgccctcccagggcaactacagctttactttctgtcttgatgaatcatacaatatcaaatggaatttttaagatatttaaaatattttgtctggaagtgaagtggaagttaatatcaatggctatgccttcagtgagttctcagaccatattacaatgtagttaactatttatcttttattacgttctagacctattatttctttctggcacaaaaatatcttctttgtagattatggcatttacctctatctccacacctttttgtttctgtcatccacagatcatcagcctcttgcttagtctccatttaat

SEQ ID NO: 669351 - DNA, 815 bp, Homo sapiens
ttctgaagtcagcagagaaaggagagacaaaaatggtaaggggaaaatagtatgaagtaataatatgaatgaagagctttctaaagtataacacatgtaagttgtgttaaatgtaaactatcatgattatatcattactgtctgactgatacaactatatccacctcagttagccacataagatcaattttcctataccttagagaataccagtaacctccagttcagaaacagcataaatatctatccacagctgagcagacacatacagctagctaccagatgaaatgggctatatcttcaaatactattgttttccgttttttaactgtggcaaaacacactcaacaatttgcatcttaaccactgttaagtatacaattcagtgtcattaaatgtattcacaatgttgtgcaagcatcaccaccacccatctccataattctttttgtcttgtaaaattgaaatcctgtacccattaaaaagtgactccccattccccgccctcccagggcaactacagctttactttctgtcttgatgaatcatacaatatcaaatggaatttttaagatatttaaaatmttttgtctggaagtgaagtggaagttaatatcaatggctatgccttcagtgagttctcagaccatattacaatgtagttaactatttatcttttattacgttctagacctattatttctttctggcacaaaaatatcttctttgtagattatggcatttacctctatctccacacctttttgtttctgtcatccacagatcatcagcctcttgcttagtctccatttaat

SEQ ID NO: 669352 - DNA, 2837 bp, Homo sapiens
tatcttcttttgtgatacattcagaaaatttgctgcctggaaaagccatattttaaaattaccacctgtttgatgattttttttatactttaagttttagagcacatgtgcacaacgtgtagtttagttacatatgtatacatgtgccatgttggtgtgctgcacccattaactcatcatttatcattaggtatgtctccaaatgctatccctcccccctcccctaccccacaactggccctggtgtgtaatgttccccttcctgtgtgcatatgttctcattgttcaattcacacctataagtgagaacatgcagtgtttcatttgcacttaagtatctatctctctttgtcctttattttcacttccatcctggytctatcccttgtctccttcgtgtgtctcaggataagtgccctataacattttatatttctggaaacccttcaatataatgttattacatgtaaaaataaaaagtctgttttagtgaactttttcttcacaaattgtcttttcctacttccctattagacaatttctgtaggctccatatgctattaatttatattcacttttagaagaattttaatcaaaagcaaaattcttatgtaaattgattatatgctatttgtacttctgtgtatatatacacacatagccacatacacatatgtaactccggaggcctgcctagactgtttaataacagtattgaacaagagcaagaaaaagctgttcaaatttcaaacaaaaagttgaactgaagagctcatatttttgaacgaaatatacactagtagcctttaaaaattaaacatttctactgttttaaaaaattatagccatcatagtatgaggaaaaaatgtaataatcctttttaattcttaccattttattaactacggagtccttatgccctaacttcattggtacccctttgagattaaacagaacacttaatttaaaattctgataaataaattaattacaccacttacttgaggtactctttcacctttcaagaaatattttgagaattcattggctaaatattgctataatgcaggctagtaataaatggaaataatgagttcattgtaaagtttaaactaatgatggtatgatctggaatttttgttaacctagaagacataattagctctagaggtgaaatgaaagacaaaatcacctcacatattagtaaaaaacaaataatataactttataagctgctgctgttcttttgctattaaaaaccattgacatctgtaattagggaagattatggaaaggttaaaggtgagaatacatgcagtctatctacaggaaacctaaactgtttaggttaaggaaatgtctgcgaaagtcatattaattagcaggttcacaggaaactaacatttattgtataaattccatggtaaaatgtattagggctccacgcacacaactgtgtgccatctacgttaccacacagtgcttacttctttcagtttgtattcatttctctcctaacggtctgtatggtattattgcatagttctaaaaaccttccatgaggcagaaatttcatttaatgatatagcttcgaaaacaatgaaaaacagtagaaactttctatttttttatgaagcagaattgttgaattttcagtttcatttatttaatgttacaagatgacaaacatatttctttaattccctcttgttatttttgtctaacatcaagcaaagccatttctttcatttgaaggtgaaaactgctcatcaaaatccagtttaagctgagaaacaaagaactaaattttgcatgagagattatacactgcataagtataaaagaggaccagaaacaatggtggattagcaatttttgaaaagacaaaagcaggttatcatcaaatcaattgttaccaacaccccaattccacctctaggccagaaaattagccacttacccacgggaaaacaatgattgaagacaaagttcaccagtgaaagttggttatttttttccatccttgcatcaactaaaatgatatctactgttcctcttaacacttttcttactttcaaatatgtgggtatgcttaattagctgaggtcatgttccatatgtacatctggctacaagggaaactgggaatgtgagccccaatacttatgtttgtagaatatttagaaatttgagaattccctccaaataaagagttttttaaaacattgttagacaaaaagtttgaattacaaaatgtggcagtagctcaggtctaactcaaatgcagggaaaaaaactattagctctaaaaaaattaaatacacatttgatggtaatgagaaacagaaaacaggcagaaatagtagaatattcaaccactgatgaagtattcgaccattgaataaagaaaattgcaatgatttaaatttgcatcaaggcaacttcacacctgatgacacttcccagtctgtgcaaaattaggtgtctacgagtaaagtggtgagttttactagcttgaggaataagagcacagagttccaggctgacagaaaagaagaactgggaaatttgaatgacatgggaggaaatctcacaaaactgaaagtcacagaggagaatgtcacagagtaaaaatctaaaatcagcacttaaacttcattcagatatatgatggctgctacatttcacattcataaaaagagactccatagaatccagcagaaaacaacagctaaattgctagaacagagcagagatttcaaccattgcatatagctcaggagtgaaggtttggtgtttgactacagaaagaagactaatgttagaaaagagtcac

SEQ ID NO: 669353 - DNA, 2837 bp, Homo sapiens
tatcttcttttgtgatacattcagaaaatttgctgcctggaaaagccatattttaaaattaccacctgtttgatgattttttttatactttaagttttagagcacatgtgcacaacgtgtagtttagttacatatgtatacatgtgccatgttggtgtgctgcacccattaactcatcatttatcattaggtatgtctccaaatgctatccctcccccctcccctaccccacaactggccctggtgtgtaatgttccccttcctgtgtgcatatgttctcattgttcaattcacacctataagtgagaacatgcagtgtttcatttgcacttaagtatctatctctctttgtcctttattttcacttccatcctggttctatcccttgtctccttcgtgtgtctcaggataagtgccctataacattttatatttctggaaacccttcaatataatgttattacatgtaaaaataaaaagtctgttttagtgaactttttcttcacaaattgtcttttcctacttccctattagacaatttctgtaggctccatatgctattaatttatattcacttttagaagaattttaatcaaaagcaaaattcttatgtaaattgattatatgctatttgtacttctgtgtatatatacacacatagccacatacacatatgtaactccggaggcctgcctagactgtttaataacagtattgaacaagagcaagaaaaagctgttcaaatttcaaacaaaaagttgaactgaagagctcatatttttgaacgaaatatacactagtagcctttaaaaattaaacatttctactgttttaaaaaattatagccatcatagtatgaggaaaaaatgtaataatcctttttaattcttaccattttattaactacggagtccttatgccctaacttcattggtacccctttgagattaaacagaacacttaatttaaaattctgataaataaattaattacaccacttacttgaggtactctttcacctttcaagaaatattttgagaattcattggctaaatattgctataatgcaggctagtaataaatggaaataatgagttcattgtaaagtttaaactaatgatggtatgatctggaatttttgttaacctagaagacataattagctctagaggtgaaatgaaagacaaaatcacctcacatattagtaaaaaacaaataatataactttataagctgctgctgttcttttgctattaaaaaccattgacatctgtaattagggaagattatggaaaggttaaaggtgagaatacatgcagtctatctacaggaaacctaaactgtttaggttaaggaaatgtctgcgaaagtcatattaattagcaggttcacaggaaactaacatttattgtataaattccatggtaaaatgtattagggctccacgcacacaactgtgtgccatctacgttaccacacagtgcttacttctttcagtttgtattcatttctctcctaacggtctgtatggtattattgcatagttctaaaaaccttccatgaggcagaaatttcatttaatgatatagcttcgaaaacaatgaaaaacagtagaaactttctatttttttatgaagcagaattgttgaattttcagtttcatttatttaatgttacaagatgacaaacatatttctttaattccctcttgttatttttgtctaacatcaagcaaagccatttctttcatttgaaggtgaaaactgctcatcaaaatccagtttaagctgagaaacaaagaactaaattttgcatgagagattatacactgcataagtataaaagaggaccagaaacaatggtggattagcaatttttgaaaagacaaaagcaggttatcatcaaatcaattgttaccaacaccccaattccacctctaggccagaaaattagccacttacccacgggaaaacaatgattgaagacaaagttcaccagtgaaagttggttatttttttccatccttgcatcaactaaaatgatatctactgttcctcttaacacttttcttactttcaaatatgtgggtatgcttaattagctgaggtcatgttccatatgtacatctggctacaagggaaactgggaatgtgagccccaatacttatgtttgtagaatatttagaaatttgagaattccctccaaataaagagttttttaaaacattgttagacaaaaagtttgaattacaaaatgtggcagtagctcaggtctaactcaaatgcagggaaaaaaactattagctctaaaaaaattaaatacacatttgatggtaatgagaaacagaaaacaggcagaaatagtagaatattcaaccactgatgaagtattcgaccattgaataaagaaaattgcaatgatttaaatttgcatcaaggcaacttcacacctgatgacacttcccagtctgtgcaaaattaggtgtctacgagtaaagtggtgagttttactagcttgaggaataagagcacagagttccaggctgacagaaaagaagaactgggaaatttgaatgacatgggaggaaatctcacaaaactgaaagtcacagaggagaatgtcacagagtaaaaatctaaaatcagcacttaaacttcattcagatatatgatggctgctacatttcacattcataaaaagagactccatagaatccagcagaaaacarcagctaaattgctagaacagagcagagatttcaaccattgcatatagctcaggagtgaaggtttggtgtttgactacagaaagaagactaatgttagaaaagagtcac

SEQ ID NO: 669354 - DNA, 2837 bp, Homo sapiens
tatcttcttttgtgatacattcagaaaatttgctgcctggaaaagccatattttaaaattaccacctgtttgatgattttttttatactttaagttttagagcacatgtgcacaacgtgtagtttagttacatatgtatacatgtgccatgttggtgtgctgcacccattaactcatcatttatcattaggtatgtctccaaatgctatccctcccccctcccctaccccacaactggccctggtgtgtaatgttccccttcctgtgtgcatatgttctcattgttcaattcacacctataagtgagaacatgcagtgtttcatttgcacttaagtatctatctctctttgtcctttattttcacttccatcctggttctatcccttgtctccttcgtgtgtctcaggataagtgccctataacattttatatttctggaaacscttcaatataatgttattacatgtaaaaataaaaagtctgttttagtgaactttttcttcacaaattgtcttttcctacttccctattagacaatttctgtaggctccatatgctattaatttatattcacttttagaagaattttaatcaaaagcaaaattcttatgtaaattgattatatgctatttgtacttctgtgtatatatacacacatagccacatacacatatgtaactccggaggcctgcctagactgtttaataacagtattgaacaagagcaagaaaaagctgttcaaatttcaaacaaaaagttgaactgaagagctcatatttttgaacgaaatatacactagtagcctttaaaaattaaacatttctactgttttaaaaaattatagccatcatagtatgaggaaaaaatgtaataatcctttttaattcttaccattttattaactacggagtccttatgccctaacttcattggtacccctttgagattaaacagaacacttaatttaaaattctgataaataaattaattacaccacttacttgaggtactctttcacctttcaagaaatattttgagaattcattggctaaatattgctataatgcaggctagtaataaatggaaataatgagttcattgtaaagtttaaactaatgatggtatgatctggaatttttgttaacctagaagacataattagctctagaggtgaaatgaaagacaaaatcacctcacatattagtaaaaaacaaataatataactttataagctgctgctgttcttttgctattaaaaaccattgacatctgtaattagggaagattatggaaaggttaaaggtgagaatacatgcagtctatctacaggaaacctaaactgtttaggttaaggaaatgtctgcgaaagtcatattaattagcaggttcacaggaaactaacatttattgtataaattccatggtaaaatgtattagggctccacgcacacaactgtgtgccatctacgttaccacacagtgcttacttctttcagtttgtattcatttctctcctaacggtctgtatggtattattgcatagttctaaaaaccttccatgaggcagaaatttcatttaatgatatagcttcgaaaacaatgaaaaacagtagaaactttctatttttttatgaagcagaattgttgaattttcagtttcatttatttaatgttacaagatgacaaacatatttctttaattccctcttgttatttttgtctaacatcaagcaaagccatttctttcatttgaaggtgaaaactgctcatcaaaatccagtttaagctgagaaacaaagaactaaattttgcatgagagattatacactgcataagtataaaagaggaccagaaacaatggtggattagcaatttttgaaaagacaaaagcaggttatcatcaaatcaattgttaccaacaccccaattccacctctaggccagaaaattagccacttacccacgggaaaacaatgattgaagacaaagttcaccagtgaaagttggttatttttttccatccttgcatcaactaaaatgatatctactgttcctcttaacacttttcttactttcaaatatgtgggtatgcttaattagctgaggtcatgttccatatgtacatctggctacaagggaaactgggaatgtgagccccaatacttatgtttgtagaatatttagaaatttgagaattccctccaaataaagagttttttaaaacattgttagacaaaaagtttgaattacaaaatgtggcagtagctcaggtctaactcaaatgcagggaaaaaaactattagctctaaaaaaattaaatacacatttgatggtaatgagaaacagaaaacaggcagaaatagtagaatattcaaccactgatgaagtattcgaccattgaataaagaaaattgcaatgatttaaatttgcatcaaggcaacttcacacctgatgacacttcccagtctgtgcaaaattaggtgtctacgagtaaagtggtgagttttactagcttgaggaataagagcacagagttccaggctgacagaaaagaagaactgggaaatttgaatgacatgggaggaaatctcacaaaactgaaagtcacagaggagaatgtcacagagtaaaaatctaaaatcagcacttaaacttcattcagatatatgatggctgctacatttcacattcataaaaagagactccatagaatccagcagaaaacaacagctaaattgctagaacagagcagagatttcaaccattgcatatagctcaggagtgaaggtttggtgtttgactacagaaagaagactaatgttagaaaagagtcac

SEQ ID NO: 669355 - DNA, 2837 bp, Homo sapiens
tatcttcttttgtgatacattcagaaaatttgctgcctggaaaagccatattttaaaattaccacctgtttgatgattttttttatactttaagttttagagcacatgtgcacaacgtgtagtttagttacatatgtatacatgtgccatgttggtgtgctgcacccattaactcatcatttatcattaggtatgtctccaaatgctatccctcccccctcccctaccccacaactggccctggtgtgtaatgttccccttcctgtgtgcatatgttctcattgttcaattcacacctataagtgagaacatgcagtgtttcatttgcacttaagtatctatctctctttgtcctttattttcacttccatcctggttctatcccttgtctccttcgtgtgtctcaggataagtgccctataacattttatatttctggaaacccttcaatataatgttattacatgtaaaaataaaaagtctgttttagtgaactttttcttcacaaattgtcttttcctacttccctattagacaatttctgtaggctccatatgctattaatttatattcacttttagaagaattttaatcaaaagcaaaattcttatgtaaattgattatatgctatttgtacttctgtgtatatatacacacatagccacatacacatatgtaactccggaggcctgcctagactgtttaataacagtattgaacaagagcaagaaaaagctgttcaaatttcaaacaaaaagttgaactgaagagctcatatytttgaacgaaatatacactagtagcctttaaaaattaaacatttctactgttttaaaaaattatagccatcatagtatgaggaaaaaatgtaataatcctttttaattcttaccattttattaactacggagtccttatgccctaacttcattggtacccctttgagattaaacagaacacttaatttaaaattctgataaataaattaattacaccacttacttgaggtactctttcacctttcaagaaatattttgagaattcattggctaaatattgctataatgcaggctagtaataaatggaaataatgagttcattgtaaagtttaaactaatgatggtatgatctggaatttttgttaacctagaagacataattagctctagaggtgaaatgaaagacaaaatcacctcacatattagtaaaaaacaaataatataactttataagctgctgctgttcttttgctattaaaaaccattgacatctgtaattagggaagattatggaaaggttaaaggtgagaatacatgcagtctatctacaggaaacctaaactgtttaggttaaggaaatgtctgcgaaagtcatattaattagcaggttcacaggaaactaacatttattgtataaattccatggtaaaatgtattagggctccacgcacacaactgtgtgccatctacgttaccacacagtgcttacttctttcagtttgtattcatttctctcctaacggtctgtatggtattattgcatagttctaaaaaccttccatgaggcagaaatttcatttaatgatatagcttcgaaaacaatgaaaaacagtagaaactttctatttttttatgaagcagaattgttgaattttcagtttcatttatttaatgttacaagatgacaaacatatttctttaattccctcttgttatttttgtctaacatcaagcaaagccatttctttcatttgaaggtgaaaactgctcatcaaaatccagtttaagctgagaaacaaagaactaaattttgcatgagagattatacactgcataagtataaaagaggaccagaaacaatggtggattagcaatttttgaaaagacaaaagcaggttatcatcaaatcaattgttaccaacaccccaattccacctctaggccagaaaattagccacttacccacgggaaaacaatgattgaagacaaagttcaccagtgaaagttggttatttttttccatccttgcatcaactaaaatgatatctactgttcctcttaacacttttcttactttcaaatatgtgggtatgcttaattagctgaggtcatgttccatatgtacatctggctacaagggaaactgggaatgtgagccccaatacttatgtttgtagaatatttagaaatttgagaattccctccaaataaagagttttttaaaacattgttagacaaaaagtttgaattacaaaatgtggcagtagctcaggtctaactcaaatgcagggaaaaaaactattagctctaaaaaaattaaatacacatttgatggtaatgagaaacagaaaacaggcagaaatagtagaatattcaaccactgatgaagtattcgaccattgaataaagaaaattgcaatgatttaaatttgcatcaaggcaacttcacacctgatgacacttcccagtctgtgcaaaattaggtgtctacgagtaaagtggtgagttttactagcttgaggaataagagcacagagttccaggctgacagaaaagaagaactgggaaatttgaatgacatgggaggaaatctcacaaaactgaaagtcacagaggagaatgtcacagagtaaaaatctaaaatcagcacttaaacttcattcagatatatgatggctgctacatttcacattcataaaaagagactccatagaatccagcagaaaacaacagctaaattgctagaacagagcagagatttcaaccattgcatatagctcaggagtgaaggtttggtgtttgactacagaaagaagactaatgttagaaaagagtcac

SEQ ID NO: 669356 - DNA, 2837 bp, Homo sapiens
tatcttcttttgtgatacattcagaaaatttgctgcctggaaaagccatattttaaaattaccacctgtttgatgattttttttatactttaagttttagagcacatgtgcacaacgtgtagtttagttacatatgtatacatgtgccatgttggtgtgctgcacccattaactcatcatttatcattaggtatgtctccaaatgctatccctcccccctcccctaccccacaactggccctggtgtgtaatgttccccttcctgtgtgcatatgttctcattgttcaattcacacctataagtgagaacatgcagtgtttcatttgcacttaagtatctatctctctttgtcctttattttcacttccatcctggttctatcccttgtctccttcgtgtgtctcaggataagtgccctataacattttatatttctggaaacccttcaatataatgttattacatgtaaaaataaaaagtctgttttagtgaactttttcttcacaaattgtcttttcctacttccctattagacaatttctgtaggctccatatgctattaatttatattcacttttagaagaattttaatcaaaagcaaaattcttatgtaaattgattatatgctatttgtacttctgtgtatatatacacacatagccacatacacatatgtaactccggaggcctgcctagactgtttaataacagtattgaacaagagcaagaaaaagctgttcaaatttcaaacaaaaagttgaactgaagagctcatatttttgaacgaaatatacactagtagcctttaaaaattaaayatttctactgttttaaaaaattatagccatcatagtatgaggaaaaaatgtaataatcctttttaattcttaccattttattaactacggagtccttatgccctaacttcattggtacccctttgagattaaacagaacacttaatttaaaattctgataaataaattaattacaccacttacttgaggtactctttcacctttcaagaaatattttgagaattcattggctaaatattgctataatgcaggctagtaataaatggaaataatgagttcattgtaaagtttaaactaatgatggtatgatctggaatttttgttaacctagaagacataattagctctagaggtgaaatgaaagacaaaatcacctcacatattagtaaaaaacaaataatataactttataagctgctgctgttcttttgctattaaaaaccattgacatctgtaattagggaagattatggaaaggttaaaggtgagaatacatgcagtctatctacaggaaacctaaactgtttaggttaaggaaatgtctgcgaaagtcatattaattagcaggttcacaggaaactaacatttattgtataaattccatggtaaaatgtattagggctccacgcacacaactgtgtgccatctacgttaccacacagtgcttacttctttcagtttgtattcatttctctcctaacggtctgtatggtattattgcatagttctaaaaaccttccatgaggcagaaatttcatttaatgatatagcttcgaaaacaatgaaaaacagtagaaactttctatttttttatgaagcagaattgttgaattttcagtttcatttatttaatgttacaagatgacaaacatatttctttaattccctcttgttatttttgtctaacatcaagcaaagccatttctttcatttgaaggtgaaaactgctcatcaaaatccagtttaagctgagaaacaaagaactaaattttgcatgagagattatacactgcataagtataaaagaggaccagaaacaatggtggattagcaatttttgaaaagacaaaagcaggttatcatcaaatcaattgttaccaacaccccaattccacctctaggccagaaaattagccacttacccacgggaaaacaatgattgaagacaaagttcaccagtgaaagttggttatttttttccatccttgcatcaactaaaatgatatctactgttcctcttaacacttttcttactttcaaatatgtgggtatgcttaattagctgaggtcatgttccatatgtacatctggctacaagggaaactgggaatgtgagccccaatacttatgtttgtagaatatttagaaatttgagaattccctccaaataaagagttttttaaaacattgttagacaaaaagtttgaattacaaaatgtggcagtagctcaggtctaactcaaatgcagggaaaaaaactattagctctaaaaaaattaaatacacatttgatggtaatgagaaacagaaaacaggcagaaatagtagaatattcaaccactgatgaagtattcgaccattgaataaagaaaattgcaatgatttaaatttgcatcaaggcaacttcacacctgatgacacttcccagtctgtgcaaaattaggtgtctacgagtaaagtggtgagttttactagcttgaggaataagagcacagagttccaggctgacagaaaagaagaactgggaaatttgaatgacatgggaggaaatctcacaaaactgaaagtcacagaggagaatgtcacagagtaaaaatctaaaatcagcacttaaacttcattcagatatatgatggctgctacatttcacattcataaaaagagactccatagaatccagcagaaaacaacagctaaattgctagaacagagcagagatttcaaccattgcatatagctcaggagtgaaggtttggtgtttgactacagaaagaagactaatgttagaaaagagtcac

SEQ ID NO: 669357 - DNA, 2837 bp, Homo sapiens
tatcttcttttgtgatacattcagaaaatttgctgcctggaaaagccatattttaaaattaccacctgtttgatgattttttttatactttaagttttagagcacatgtgcacaacgtgtagtttagttacatatgtatacatgtgccatgttggtgtgctgcacccattaactcatcatttatcattaggtatgtctccaaatgctatccctcccccctcccctaccccacaactggccctggtgtgtaatgttccccttcctgtgtgcatatgttctcattgttcaattcacacctataagtgagaacatgcagtgtttcatttgcacttaagtatctatctctctttgtcctttattttcacttccatcctggttctatcccttgtctccttcgtgtgtctcaggataagtgccctataacattttatatttctggaaacccttcaatataatgttattacatgtaaaaataaaaagtctgttttagtgaactttttcttcacaaattgtcttttcctacttccctattagacaatttctgtaggctccatatgctattaatttatattcacttttagaagaattttaatcaaaagcaaaattcttatgtaaattgattatatgctatttgtacttctgtgtatatatacacacatagccacatacacatatgtaactccggaggcctgcctagactgtttaataacagtattgaacaagagcaagaaaaagctgttcaaatttcaaacaaaaagttgaactgaagagctcatatttttgaacgaaatatacactagtagcctttaaaaattaaacatttctactgttttaaaaaattatagccatcatagtatgaggaaaaaatgtaataatcctttttaattcttaccattttattaactacggagtccttatgccctaacttcattggtacccctttgagattaaacagaacacttaatttaaaattctgataaataaattaattacaccacttacttgaggtactctttcacctttcaagaaatattttgagaattcattggctaaatattgctataatgcaggctagtaataaatggaaataatgagttcattgtaaagtttaaactaatgatggtatgatctggaatttttgttaacctagaagacataattagctctagaggtgaaatgaaagacaaaatcacctcacatattagtaaaaaacaaataatataactttataagctgctgctgttcttttgctattaaraaccattgacatctgtaattagggaagattatggaaaggttaaaggtgagaatacatgcagtctatctacaggaaacctaaactgtttaggttaaggaaatgtctgcgaaagtcatattaattagcaggttcacaggaaactaacatttattgtataaattccatggtaaaatgtattagggctccacgcacacaactgtgtgccatctacgttaccacacagtgcttacttctttcagtttgtattcatttctctcctaacggtctgtatggtattattgcatagttctaaaaaccttccatgaggcagaaatttcatttaatgatatagcttcgaaaacaatgaaaaacagtagaaactttctatttttttatgaagcagaattgttgaattttcagtttcatttatttaatgttacaagatgacaaacatatttctttaattccctcttgttatttttgtctaacatcaagcaaagccatttctttcatttgaaggtgaaaactgctcatcaaaatccagtttaagctgagaaacaaagaactaaattttgcatgagagattatacactgcataagtataaaagaggaccagaaacaatggtggattagcaatttttgaaaagacaaaagcaggttatcatcaaatcaattgttaccaacaccccaattccacctctaggccagaaaattagccacttacccacgggaaaacaatgattgaagacaaagttcaccagtgaaagttggttatttttttccatccttgcatcaactaaaatgatatctactgttcctcttaacacttttcttactttcaaatatgtgggtatgcttaattagctgaggtcatgttccatatgtacatctggctacaagggaaactgggaatgtgagccccaatacttatgtttgtagaatatttagaaatttgagaattccctccaaataaagagttttttaaaacattgttagacaaaaagtttgaattacaaaatgtggcagtagctcaggtctaactcaaatgcagggaaaaaaactattagctctaaaaaaattaaatacacatttgatggtaatgagaaacagaaaacaggcagaaatagtagaatattcaaccactgatgaagtattcgaccattgaataaagaaaattgcaatgatttaaatttgcatcaaggcaacttcacacctgatgacacttcccagtctgtgcaaaattaggtgtctacgagtaaagtggtgagttttactagcttgaggaataagagcacagagttccaggctgacagaaaagaagaactgggaaatttgaatgacatgggaggaaatctcacaaaactgaaagtcacagaggagaatgtcacagagtaaaaatctaaaatcagcacttaaacttcattcagatatatgatggctgctacatttcacattcataaaaagagactccatagaatccagcagaaaacaacagctaaattgctagaacagagcagagatttcaaccattgcatatagctcaggagtgaaggtttggtgtttgactacagaaagaagactaatgttagaaaagagtcac

SEQ ID NO: 669358 - DNA, 2837 bp, Homo sapiens
tatcttcttttgtgatacattcagaaaatttgctgcctggaaaagccatattttaaaattaccacctgtttgatgattttttttatactttaagttttagagcacatgtgcacaacgtgtagtttagttacatatgtatacatgtgccatgttggtgtgctgcacccattaactcatcatttatcattaggtatgtctccaaatgctatccctcccccctcccctaccccacaactggccctggtgtgtaatgttccccttcctgtgtgcatatgttctcattgttcaattcacacctataagtgagaacatgcagtgtttcatttgcacttaagtatctatctctctttgtcctttattttcacttccatcctggttctatcccttgtctccttcgtgtgtctcaggataagtgccctataacattttatatttctggaaacccttcaatataatgttattacatgtaaaaataaaaagtctgttttagtgaactttttcttcacaaattgtcttttcctacttccctattagacaatttctgtaggctccatatgctattaatttatattcacttttagaagaattttaatcaaaagcaaaattcttatgtaaattgattatatgctatttgtacttctgtgtatatatacacacatagccacatacacatatgtaactccggaggcctgcctagactgtttaataacagtattgaacaagagcaagaaaaagctgttcaaatttcaaacaaaaagttgaactgaagagctcatatttttgaacgaaatatacactagtagcctttaaaaattaaacatttctactgttttaaaaaattatagccatcatagtatgaggaaaaaatgtaataatcctttttaattcttaccattttattaactacggagtccttatgccctaacttcattggtacccctttgagattaaacagaacacttaatttaaaattctgataaataaattaattacaccacttacttgaggtactctttcacctttcaagaaatattttgagaattcattggctaaatattgctataatgcaggctagtaataaatggaaataatgagttcattgtaaagtttaaactaatgatggtatgatctggaatttttgttaacctagaagacataattagctctagaggtgaaatgaaagacaaaatcacctcacatattagtaaaaaacaaataatataactttataagctgctgctgttcttttgctattaaaaaccattgacatctgtaattagggaagattatggaaaggttaaaggtgagaatacatgcagtctatctacaggaaacctawactgtttaggttaaggaaatgtctgcgaaagtcatattaattagcaggttcacaggaaactaacatttattgtataaattccatggtaaaatgtattagggctccacgcacacaactgtgtgccatctacgttaccacacagtgcttacttctttcagtttgtattcatttctctcctaacggtctgtatggtattattgcatagttctaaaaaccttccatgaggcagaaatttcatttaatgatatagcttcgaaaacaatgaaaaacagtagaaactttctatttttttatgaagcagaattgttgaattttcagtttcatttatttaatgttacaagatgacaaacatatttctttaattccctcttgttatttttgtctaacatcaagcaaagccatttctttcatttgaaggtgaaaactgctcatcaaaatccagtttaagctgagaaacaaagaactaaattttgcatgagagattatacactgcataagtataaaagaggaccagaaacaatggtggattagcaatttttgaaaagacaaaagcaggttatcatcaaatcaattgttaccaacaccccaattccacctctaggccagaaaattagccacttacccacgggaaaacaatgattgaagacaaagttcaccagtgaaagttggttatttttttccatccttgcatcaactaaaatgatatctactgttcctcttaacacttttcttactttcaaatatgtgggtatgcttaattagctgaggtcatgttccatatgtacatctggctacaagggaaactgggaatgtgagccccaatacttatgtttgtagaatatttagaaatttgagaattccctccaaataaagagttttttaaaacattgttagacaaaaagtttgaattacaaaatgtggcagtagctcaggtctaactcaaatgcagggaaaaaaactattagctctaaaaaaattaaatacacatttgatggtaatgagaaacagaaaacaggcagaaatagtagaatattcaaccactgatgaagtattcgaccattgaataaagaaaattgcaatgatttaaatttgcatcaaggcaacttcacacctgatgacacttcccagtctgtgcaaaattaggtgtctacgagtaaagtggtgagttttactagcttgaggaataagagcacagagttccaggctgacagaaaagaagaactgggaaatttgaatgacatgggaggaaatctcacaaaactgaaagtcacagaggagaatgtcacagagtaaaaatctaaaatcagcacttaaacttcattcagatatatgatggctgctacatttcacattcataaaaagagactccatagaatccagcagaaaacaacagctaaattgctagaacagagcagagatttcaaccattgcatatagctcaggagtgaaggtttggtgtttgactacagaaagaagactaatgttagaaaagagtcac

SEQ ID NO: 669359 - DNA, 2837 bp, Homo sapiens
tatcttcttttgtgatacattcagaaaatttgctgcctggaaaagccatattttaaaattaccacctgtttgatgattttttttatactttaagttttagagcacatgtgcacaacgtgtagtttagttacatatgtatacatgtgccatgttggtgtgctgcacccattaactcatcatttatcattaggtatgtctccaaatgctatccctcccccctcccctaccccacaactggccctggtgtgtaatgttccccttcctgtgtgcatatgttctcattgttcaattcacacctataagtgagaacatgcagtgtttcatttgcacttaagtatctatctctctttgtcctttattttcacttccatcctggttctatcccttgtctccttcgtgtgtctcaggataagtgccctataacattttatatttctggaaacccttcaatataatgttattacatgtaaaaataaaaagtctgttttagtgaactttttcttcacaaattgtcttttcctacttccctattagacaatttctgtaggctccatatgctattaatttatattcacttttagaagaattttaatcaaaagcaaaattcttatgtaaattgattatatgctatttgtacttctgtgtatatatacacacatagccacatacacatatgtaactccggaggcctgcctagactgtttaataacagtattgaacaagagcaagaaaaagctgttcaaatttcaaacaaaaagttgaactgaagagctcatatttttgaacgaaatatacactagtagcctttaaaaattaaacatttctactgttttaaaaaattatagccatcatagtatgaggaaaaaatgtaataatcctttttaattcttaccattttattaactacggagtccttatgccctaacttcattggtacccctttgagattaaacagaacacttaatttaaaattctgataaataaattaattacaccacttacttgaggtactctttcacctttcaagaaatattttgagaattcattggctaaatattgctataatgcaggctagtaataaatggaaataatgagttcattgtaaagtttaaactaatgatggtatgatctggaatttttgttaacctagaagacataattagctctagaggtgaaatgaaagacaaaatcacctcacatattagtaaaaaacaaataatataactttataagctgctgctgttcttttgctattaaaaaccattgacatctgtaattagggaagattatggaaaggttaaaggtgagaatacatgcagtctatctacaggaaacctaaactgtttaggttaaggaaatgtctgcgaaagtcatattaattagcaggttcacaggaaactaacatttattgtataaattccatggtaaaatgtattagggctccacgcacacaactgtgtgccatctacgttaccacacagtgcttacttctttcagtttktattcatttctctcctaacggtctgtatggtattattgcatagttctaaaaaccttccatgaggcagaaatttcatttaatgatatagcttcgaaaacaatgaaaaacagtagaaactttctatttttttatgaagcagaattgttgaattttcagtttcatttatttaatgttacaagatgacaaacatatttctttaattccctcttgttatttttgtctaacatcaagcaaagccatttctttcatttgaaggtgaaaactgctcatcaaaatccagtttaagctgagaaacaaagaactaaattttgcatgagagattatacactgcataagtataaaagaggaccagaaacaatggtggattagcaatttttgaaaagacaaaagcaggttatcatcaaatcaattgttaccaacaccccaattccacctctaggccagaaaattagccacttacccacgggaaaacaatgattgaagacaaagttcaccagtgaaagttggttatttttttccatccttgcatcaactaaaatgatatctactgttcctcttaacacttttcttactttcaaatatgtgggtatgcttaattagctgaggtcatgttccatatgtacatctggctacaagggaaactgggaatgtgagccccaatacttatgtttgtagaatatttagaaatttgagaattccctccaaataaagagttttttaaaacattgttagacaaaaagtttgaattacaaaatgtggcagtagctcaggtctaactcaaatgcagggaaaaaaactattagctctaaaaaaattaaatacacatttgatggtaatgagaaacagaaaacaggcagaaatagtagaatattcaaccactgatgaagtattcgaccattgaataaagaaaattgcaatgatttaaatttgcatcaaggcaacttcacacctgatgacacttcccagtctgtgcaaaattaggtgtctacgagtaaagtggtgagttttactagcttgaggaataagagcacagagttccaggctgacagaaaagaagaactgggaaatttgaatgacatgggaggaaatctcacaaaactgaaagtcacagaggagaatgtcacagagtaaaaatctaaaatcagcacttaaacttcattcagatatatgatggctgctacatttcacattcataaaaagagactccatagaatccagcagaaaacaacagctaaattgctagaacagagcagagatttcaaccattgcatatagctcaggagtgaaggtttggtgtttgactacagaaagaagactaatgttagaaaagagtcac

SEQ ID NO: 669360 - DNA, 617 bp, Homo sapiens
tatcagcaggaaaaccgtaaaagaaatacaatttatgttttgaaattttaaaatggattccaagtttctgttgacatctgcaacttttcttctgttttcatgaatgtattaatcataaagtctattatattttataaatgcaatatgtcaatcaaatgaaggtctgcttttattccttccccttggtttctttatagccgcttttgtttttatagattgccttgtaccttgtaattttgaactggatgccagatattgtaacaaaaaattctagggattctggagggggttaagctttcttttagcagccagagtaatccttatggagtatgttgtctgtttcataaattatgtgattatttgtgtgtagctctgtttctctattctgttccattggattatttgcctgtaattgcaccagtatcacactcttactattttagctttataataggtcttgatatctagtagtaaaattcctctagcactttgttcttcaagattgtctttactattctgaccctttgcttttttgtatatattttaggatcacctttccaatactcaaaaaataacattactggggttttgcttggagkgcactggatctaaagatc

SEQ ID NO: 669361 - DNA, 643 bp, Homo sapiens
tgctcggtttctggtgaggcctcaggaagcttccaatcatggtggaaggcaaatggggagctgcacgtcacatggcaagtggaagtaagagctagggagcaagagakgaaggaggaggtgccaggctcttttaaacaaccagctttcatgtgaactcattactgcagaagagcagcaaaccattcatgagggatccgcccccaagacccaaacacctcccactaggccccacttccaacattagggatcacgtttcaacatgagattttgagggaacaatatccaaaccatgttagtggccctctattgactccaacatctatgaacagggctggtgcttgccttggtcaactcttgtctcccattcccagtggggggcctggcacatgaagaagggattaaccaataataagtaataaagtaataaggtaataaaataatatttactttttttttttgagacagagtctcactctgtcacccaggctggagtgcagtggcaccatctcggctcactgcaagctctgcctcccgggttcatgccattctcctgcctcagcctcctgagtagctgggactacaggtgactgccaccacacctggctaattttttgtgtttttagtagagatggggtttcaccat

SEQ ID NO: 669362 - DNA, 620 bp, Homo sapiens
taaatttataaaatgttttcagcggtaatttcagggtgcttatgacaacctgcaaaagaagtaatgacttgaagttgtaggaaagctttaatcgacaaacatctttttggtgaaggctgtaagactgtaacttggaagaacctatatggtacacttttttaaaagtgtgctttttttctttttaaatatggattggagtttcctcaagaaatatsctagtttttctcaagaccgctattgccagtgatatttatttcttttatgactagcacaggaacatgcatacttgtcataccggattctttaaaaagtcgagaccaacctggccaacgtggggaaaccccatctctacgaaaaacacaaaaaattagccaggcgtggtggcgggcgcctgtaatcacagctactcaggagactgaagcaggagaatcgctcgagcccgggaggcggaggttgccgagccgagatagcggcattgcactccagcctgggcaacaagagcgaaactccgtctcaaaaacaacaaaaacaaaaacaaaaaacgacgtaaaaacctaagttctgagcacaatgcataatctcaagacagccacactaattttgggaataagagctagaaa

SEQ ID NO: 669363 - DNA, 620 bp, Homo sapiens
taaatttataaaatgttttcagcggtaatttcagggtgcttatgacaacctgcaaaagaagtaatgacttgaagttgtaggaaagctttaatcgacaaacatctttttggtgaaggctgtaagactgtaacttggaagaacctatatggtacacttttttaaaagtgtgctttttttctttttaaatatggattggagtttcctcaagaaatatcctagtttttctcaagaccgctattgccagtgatatttatttcttttatgactagcacaggaacatgcatacttgtcataccggattctttaaaaagtcgagaccaacctggccaacgtggggaaaccccatctctacgaaaaacacaaaaaattagccaggcgtggtggcgggcgcctgtaatcacagctactcaggagactgaagcaggagaatcgctcgagcccgrgaggcggaggttgccgagccgagatagcggcattgcactccagcctgggcaacaagagcgaaactccgtctcaaaaacaacaaaaacaaaaacaaaaaacgacgtaaaaacctaagttctgagcacaatgcataatctcaagacagccacactaattttgggaataagagctagaaa

SEQ ID NO: 669364 - DNA, 610 bp, Homo sapiens
tactcccctgtgcattgtctttttgatctcctgtgatattaaacatgtactgtacatgtacatgtatctaagtggataacaatacaattcattttgtcatgaaagagctgtgttttcaaaggcttttaataaggttaaaaaaaagataaaattcctcttagaaaataacacttagcagttaatgacatcaaagtcayattgactaaagaaggaaaatagcaaccaattgttaaagccaccttaacataaaccttattgcaagtatacacatcttttgaacacaatctatagaaaagagaataacttccaaggcattacaactttttctctggcatgttaaaaaacaactctgactaatggctaatgcattataaaatttcctatctgacaaatctttctagattatgcatagtattttacttttgaaaggtcataaaaaagatataaatcagtttccataagagctaatattggcccataacgaaagtttccttcaggttattttaatgtattaacgtaagaaaactccaggtgaagaagaatttcaagccaaaactaagcattaaaaaataggcgtttggttgaggttaattttttttttttttttttt

SEQ ID NO: 669365 - DNA, 589 bp, Homo sapiens
atacatttgtataaccaagttcaaacattgtgaacattgtgaacacacagtaagtggtgactcacaaaatgcctcaccagtgaattaccagtaacattagcagtagtacttaayattcatgtagcacccacattattgtacataatacagcaaagtaatggctccctcaaggagctgcttttctaagaaacaaaagctagtgtgtgtgtgtgtgtgtgtgtgtgtgtgtgtatccaaatacaatgttttcaaagaaatgtagaccatgggtcagatgtcacaaagacagttgactcagactattcctctcccttttatttcaggtttaaggaggcacaaatccaggtgttcccacattaccaaattactactctgtagtttgaaaggaatgacaatgacatcctgtttctggtcatggctaatttagtatacactgcacctgtaaaactccaggccatcaacatttcaggaaggctatgtaatcaaagtggtgacacttactactgagaattattggtgacttccagagtacagcacaagccctctctccacctgactttcaattacaacagagggtcagaagagtcca

SEQ ID NO: 669366 - DNA, 2692 bp, Homo sapiens
tgggaagagagagagaaggtccccttggtacctcagctcggccttatggtggcctctttccttgaagggtgcaacaaaagcaggaggaaaaaaaaaaagcaaggaaataaacttatatattcagtttccctgaattctgcgagccactctagcaaattaatcaaacccaaagagagggtgtggaaactccacattgaagctggcaggtcagaagttccacaggcccagacttgtgactgatgaggrtcaggggcggtcttgggcactgagccctcaacctgtgttttttttttctttttgagacagagtttcactcttgtcgcccaggctggggtgccatggtgcatctcggctcacggcaacctccgcctcccatgttcaggcaattctcccgcctcagcctcctaagtagctgggactacagccgcctgccaccgtgcccagctaatttttgtatttttagtagagatggggtttcaccacattggccaggctggtcttgaacccttgacctcaggtgatccacctgcctcagcctcccaaagtcttgggattacaggtgtgagccaccgcacctggcttcaacctgtggtcttatgtgcaggaaaatagtgtgagaattgacttgaattggaggacacctaggtggtttgtgctgcagaattgatggcttgcttgcttgctggtgaggagaaatccccacacattttgtcacagaaatcttctgtctgtgattattgttgttgagaggatagctcactttctcaaaaatactttgaatttctttccccactctcctgacatactttggcagattttttttagaaaatatattagaaaaatttttggagattcggagcaaattgaaaaactcacagatgaactgcatcacctagaaaagcaaaaaacttttaaaaaggtatgtcatgaatgcataaaatatatgtagacatagtctattttattatttaccatcctaaaatatacacatcttttataaaaagttaaaatttaccaaaactttccctcacacatttacagaccatacatgacaccacttgctgttgacagaaatgtaaacaaaaataaagatgccgtattcaatcataattgcataaaattcactgtagtacatatcttactactgtaacaatttcgtagccacctgctgtggctattgcagtaagctcaagtgttgtgagtatccacttaaaatgttgtgtcatgctcacacctgtaatcccagcactctgggaggctgaggtgggtagaggccaacaaggggaaatcccatctctagcaaaaaatgcaaaaattagccgggcatggtgacgcactcctggaatcccagctacttgggaggcggaggcatgagaatcacctgaaactgggaggcggaggttgcagtgagccgagactgtaccactacactccagcctgggcgacagtaaaactctggctcaaaaaaaaaaaaaaaaagtcatgtcacgctaatcactaccgtgtgagcagttgtctctccagtaaattgcgtattgcagtaaaaagtgatccctcacggttctcacttgtttttcaccatgtctactgcaataccctaaaccttgaataagaaacatgggaatcatatgaagtgccccaagtggtgctggaagagcgctcaaaaagcagagaaaagttatgacattaaaaggaaaagttgaaaatctggatatataccatagattgaggtctgaagctgtatttcaggcagactattcgtcttataaacagatgacataaccttacagtatcaatcaatacagtacagtacttatgtcatctattttctcttccttatgattttctcaataccattttcttttctctagcttactttattgtacgaatacagcatataatacaaataacatacaaattatgtgttaattttctttttgttatcagtaagacttctggccaatggtaggctattagtggttaaatttttaaggcagtgagcgaggtacggtggctcacgcctgtaatcccagcactttgggaggccgaggtgggcggatcacaaggtcagaagttcgagatcagtctggccaacatggtgaaacctcgtctctactaaaaatgcaaaaattagctgggcatggtggtgcctgcctgtagtctcagctactcaggaggctgaggcaggagaattgcttgaacccgggaggaggaggttgcagtgagccgagatcacaccactgtactctagcctgggcgacagagcgagactccatctcaaaaaaaaaaaaaaaaaaaaaattaagggagtcaaaaggtacacacagattttcaactgtgtaggggtcagtgctcctaatgccctccttgttcaagaatcaactgtactaaaagaaaatgaatgccaaccttgaaattctgtacacacagaaaatatcacttaaaagtaaaactaaataaatcttttcagaaaccaaaaaggaaagaatctgtatttagaatctgtactgagaaaatactaaagtaagttcttcagacagaagaaaaatgatcacagaccccaaaattaaagttttgctagattttaattctaatgaacctctagagattaaagaaaaaaaattagtacagaaaggataaatatgcaaaaagtaataatagtcatgtctcgaggatcttaaatgtgttgagc

SEQ ID NO: 669367 - DNA, 600 bp, Homo sapiens
tgagacagtttcgctcttgttgtccaggctggagtgcaatggcaccatctcgactcactgcaacctctgcctcccgggttcaagcgattctcctgcctcagcctcccaagtagctgggattacaggcacctgccaccacgcccggctaattttgtattttcagtagagatggggtttctccatgttggtcaaattcccgacctcaggtgatccgcccrtcttggcctcccaaagtgctaggattataggcgtgagccaccacacgtggccagtagaagaactttttatttatgtgtctaccagagtaagcacattagcaaaaaagtttttatttcatccgaatttttgtttttgattcagcagccacatttttgggctgttttgtgtcatctctgaatctagctttcctttccaaatgagctactaggctctcttgaatgccttttggttatttctggtcattgtcaacatagacaactgaaatctacagcacagtttcttataacccatacttaatttattctttcattaaacctttagaacattctacccagtttcttcaatctctggaaacctggcagaggtattagcaaccagtga

SEQ ID NO: 669368 - DNA, 1036 bp, Homo sapiens
ctcctccctccgcctcccaaagtgctaggattacaggtgtgagccaccgcgcctggccggaaacttactttttacttgacatttagcagtaaaacttaccacactgatgacagcaaggggcaaagagcatctgaaagtcatgttcacagtactttcttccttcaaactgaaagagagggtaccaccaacttacagacacgaaacaatcacaggagaaatataattatttgatgaagatatacaggaaagatgtttctaaactaagagttctactctaagaatttataactctactgggattttaaaaagcagatactcttttgcaccatccatacatctacatgttggtacaggaaagacatacggaataagtagaggctagagtgaacagtacacctacagggactggtgacctggcctctgactgtgctgaattgttttctggctcaaataccctgcctttaatgaatctgatgaaagctatggatmacctctccctccagaaaatatgcacatacatacaactctcctcccacatttttcaggtcgatatctgtaattctcactgtaacctcaaatatttacaaagggcaaatattctagcacattgtattttattatttttttaaatgggagtcttgctatgttgcctaggctagttcttggactcctggcccaaagcaatcctcccacctcagtctctcaaagcactgggaccacaggcgttagccagtacgctcagccttagcacattttaaaatgaccaaaatccattaaaaaacattctcttaacagccaagatttttacatctttcatttcttgaatgttttcattttatgtgctccaattttatcctagtatatttttgtacttgtctttaactgatcaccctatcatacttttctgcaattaaaaaatatatataacatgaaattttaaaatgtgctttctgaatccataaggctgtaaaggttaacatttattttcttctgtattatcattagaatgattagtataggacaagcaagacataaa

SEQ ID NO: 669369 - DNA, 668 bp, Homo sapiens
gtaagggttactttggcataatcggagtcagcttatgtcactctcagataattattgatgtcagcagggccttcttcagaaagagggaagtaacttcagtcagaaattgcaaaacattcaaatattttagaaagaaaattaaagattagatgccaagatggccaactagatagcttctgcacagcaaagaaactaacagagtaaacagaagacctgcaaaatggaagaatatatttgcaaactatgcatatgacaatggcctaattttcactatctacagggaacttaaacaaatcaataagcaaaaaacacataaccccattaaaaagtgggcaaagggcttcatgaacagaagacatacaagtggccaagaaayatatgaaaaatgcttacgtcactaatcatcagagaaatgcaaatcaaaaccacaataagataccatctcacaccagtcaggatggctattataaaaaagtcaaaaaatgacagatactggcgaggctgaaaagggaatgcttatacaccattggtgggaatgtaaattagtccagttattttggaaagcagtctggagatttctcaaagaacttaaaacagaattaccatttgacccagcaatcccattaccaggtatatacttccacaaaaataaataattctactaaaaa

SEQ ID NO: 669370 - DNA, 668 bp, Homo sapiens
gtaagggttactttggcataatcggagtcagcttatgtcactctcagataattattgatgtcagcagggccttcttcagaaagagggaagtaacttcagtcagaaattgcaaaacattcaaatattttagaaagaaaattaaagattagatgccaagatggccaactagatagcttctgcacagcaaagaaactaacagagtaaacagaagacctgcaaaatggaagaatatatttgcaaactatgcatatgacaatggcctaattttcactatctacagggaacttaaacaaatcaataagcaaaaaacacataaccccattaaaaagtgggcaaagggcttcatgaacagaagacatacaagtggccaagaaatatatgaaaaatgcttacrtcactaatcatcagagaaatgcaaatcaaaaccacaataagataccatctcacaccagtcaggatggctattataaaaaagtcaaaaaatgacagatactggcgaggctgaaaagggaatgcttatacaccattggtgggaatgtaaattagtccagttattttggaaagcagtctggagatttctcaaagaacttaaaacagaattaccatttgacccagcaatcccattaccaggtatatacttccacaaaaataaataattctactaaaaa

SEQ ID NO: 669371 - DNA, 644 bp, Homo sapiens
acagtaggttcctctatcagcatcttgcacagttgcctagcaacatagtttaatgtgttggaggcaagaagggaggaaattcacaccatgttcatcctactcagtgtgaactgagtctatagttgatatcctctttgtgtcactcaatgttgtcctgcctgagttcaggcttggttcttacgttgcggcagctcttttgcctttatttaggcaacagaccagaaatagaaacccttgaatttttttttttttattcctttattttccttgccagcaccttggttagatttcttaactacttttttcttgagtctttgtaaagtataattacactttacygtgcttacgatctaaagaatacttaatcagtgttattttttatttttatgttttatttttgtattgattaggtcttgccatgttgcccagactggtctcggactcctggactcaagcagtcctcccaccttggcctcccaaagtgctgggattacaggcatgggccaccacacttggcctcacttttatttcttaaagtcactgcccaataaacattccaagtttccactagtttttgtttttggacatttgttccatccaacatcgtggtggcattatattttagtagattgtccaaacatggg

SEQ ID NO: 669372 - DNA, 644 bp, Homo sapiens
acagtaggttcctctatcagcatcttgcacagttgcctagcaacatagtttaatgtgttggaggcaagaagggaggaaattcacaccatgttcatcctactcagtgtgaactgagtctatagttgatatcctctttgtgtcactcaatgttgtcctgcctgagttcaggcttggttcttacgttgcggcagctcttttgcctttatttaggcaacagaccagaaatagaaacccttgaatttttttttttttattcctttattttccttgccagcaccttggttagatttcttaactacttttttcttgagtctttgtaaagtataattacactttactgtgcttacgatctaaagaatacttaatcagtgttattttttatttttatgttttatttttgtattgattaggtcttgccrtgttgcccagactggtctcggactcctggactcaagcagtcctcccaccttggcctcccaaagtgctgggattacaggcatgggccaccacacttggcctcacttttatttcttaaagtcactgcccaataaacattccaagtttccactagtttttgtttttggacatttgttccatccaacatcgtggtggcattatattttagtagattgtccaaacatggg

SEQ ID NO: 669373 - DNA, 644 bp, Homo sapiens
acagtaggttcctctatcagcatcttgcacagttgcctagcaacatagtttaatgtgttggaggcaagaagggaggaaattcacaccatgttcatcctactcagtgtgaactgagtctatagttgatatcctctttgtgtcactcaatgttgtcctgcctgagttcaggcttggttcttacgttgcggcagctcttttgcctttatttaggcaacagaccagaaatagaaacccttgaatttttttttttttattcctttattttccttgccagcaccttggttagatttcttaactacttttttcttgagtctttgtaaagtataattacactttactgtgcttacgatctaaagaatacttaatcagtgttattttttatttttatgttttatttttgtattgattaggtcttgccatgttgcccagactggtctcggactcctggactcaagcagtcctcccaccttggcctcccaaagtgctgggattacaggcatgggccaccacacttggcctcacttttatttcttaaagtcactgcccaataaacattccaagtttccactagtttttgtttttggacatttgttccatccaacatcrtggtggcattatattttagtagattgtccaaacatggg

SEQ ID NO: 669374 - DNA, 1081 bp, Homo sapiens
gcttttattaactaaactatactacatccaaaaaagatattcttagctttatattcaaatacattttccagttgtctttatacaacttcccaatctcatctcccaggactgtgcaactctagcccagtggaaaccgccgtctttatttttttatttttttattttatatatatatatatttattayactttaagttctagggtacctgtgcacaacttgcaggtttgttacatatatatacatgtgccatgttggtgtgctgcacccattaactcatcatttacattaggtatatctcctaatgctatccctccccctcccaccaccccacaacaggccccggggtgtgatgttccccttcctgtgtccaagtgctctcattgttcaaatcccacctatgagtgagaacataaggtatttggttttttgtccttgcgatagtttgctgagaatgatggtttccagcttcatccatgtccctacaaaggacatgaactcatccttttttatggctacatagtattccatggtgtatatgtgccacattttcttaatccagtctatcattgttggacatttgggttggttacaagtctttgctattgtgagtagtgccgaaataaacatacgtgtgcatgtgtcttcatagcagcatgatttatagtcctttgggtatatacccagtaatgggatggctgggtcaaatggtatttctagttctagatcccgaggaatcgccacactgacttccacaatggttgaactagtttacagtcccaccaacagtgtaaaatgttcctatttctccacatcctcgccagcacctgttgggacaccgccctctttagacctgctttttcttctgcagctgcctgaactccttgatgatgcaggcacgtctcttcccatcctgttagcttctgatgggaagggattgggagatataaaatgagactcctcagagatgtactttcatggtttaactcaagtgtgatcatggacgtgccataataaaatttcaagaaggaatgctccagcaattaacggagtgcaaacgaaatagccgtcaatcagatggtga

SEQ ID NO: 669375 - DNA, 1081 bp, Homo sapiens
gcttttattaactaaactatactacatccaaaaaagatattcttagctttatattcaaatacattttccagttgtctttatacaacttcccaatctcatctcccaggactgtgcaactctagcccagtggaaaccgccgtctttatttttttatttttttattttatatatatatatatttattacactttaagttctagggtacctgtgcacaacttgcaggtttgttacatatatatacatgtgccatgttggtgtgctgcacccattaactcatcatttacattaggtatatctcctaatgctatccctccccctcccaccaccccacaacaggccccggggtgtgatgttccccttcctgtgtccaagtgctctcattgttcaaatcccacctatgagtgagaacatraggtatttggttttttgtccttgcgatagtttgctgagaatgatggtttccagcttcatccatgtccctacaaaggacatgaactcatccttttttatggctacatagtattccatggtgtatatgtgccacattttcttaatccagtctatcattgttggacatttgggttggttacaagtctttgctattgtgagtagtgccgaaataaacatacgtgtgcatgtgtcttcatagcagcatgatttatagtcctttgggtatatacccagtaatgggatggctgggtcaaatggtatttctagttctagatcccgaggaatcgccacactgacttccacaatggttgaactagtttacagtcccaccaacagtgtaaaatgttcctatttctccacatcctcgccagcacctgttgggacaccgccctctttagacctgctttttcttctgcagctgcctgaactccttgatgatgcaggcacgtctcttcccatcctgttagcttctgatgggaagggattgggagatataaaatgagactcctcagagatgtactttcatggtttaactcaagtgtgatcatggacgtgccataataaaatttcaagaaggaatgctccagcaattaacggagtgcaaacgaaatagccgtcaatcagatggtga

SEQ ID NO: 669376 - DNA, 1081 bp, Homo sapiens
gcttttattaactaaactatactacatccaaaaaagatattcttagctttatattcaaatacattttccagttgtctttatacaacttcccaatctcatctcccaggactgtgcaactctagcccagtggaaaccgccgtctttatttttttatttttttattttatatatatatatatttattacactttaagttctagggtacctgtgcacaacttgcaggtttgttacatatatatacatgtgccatgttggtgtgctgcacccattaactcatcatttacattaggtatatctcctaatgctatccctccccctcccaccaccccacaacaggccccggggtgtgatgttccccttcctgtgtccaagtgctctcattgttcaaatcccacctatgagtgagaacataaggtatttggttttttgtccttgcgatagtttgctgagaatgatggtttccagcttcatccatgtccctacaaaggacatgaactcatccttttttatggctacatagtattccatggtgtatatgtgccacattttcttaatccagtctatcattgttggacatttgggttggttacaagtctttgctattgtgagtagtgccgaaataaacatacgtgtgcatgtgtcttcatagcagcatgatttatagtcctttgggtatatacccagtaatgggatggctgggtcaaatggtatttctagttctagatcccgaggaatcgccacactgacttccacaatggttgaactagtttacagtcccaccaacagtgtaaaatgttcctatttctccacatcctygccagcacctgttgggacaccgccctctttagacctgctttttcttctgcagctgcctgaactccttgatgatgcaggcacgtctcttcccatcctgttagcttctgatgggaagggattgggagatataaaatgagactcctcagagatgtactttcatggtttaactcaagtgtgatcatggacgtgccataataaaatttcaagaaggaatgctccagcaattaacggagtgcaaacgaaatagccgtcaatcagatggtga

SEQ ID NO: 669377 - DNA, 1255 bp, Homo sapiens
gcaggctcaacctcccaagctcaacctatcttcccaccccagcctcttgagtagcttggactactggcatgtgccaccatgtccacctaatttttttattttttgtagagtcaggggtctccccatgtttcccaggctagtcttgaactcctaagctcaagygattctcccgcctcagctttccaaagtgctgggagcacaggtgtgagatgctgttcctggatggtaatgattgtattactttctctccataccgcaacacccgcttcttcatacctctcttgatggtctttatacactttatgttttgtatcttagccatgcacaaatatggcttctctctccaactctctttagtaatctttgatgaaagaacagtggtgtgaattgcatttgtatcctttttagtgtgtctaacacagtgttcatataatgaactctgaataattatttatagattgaatgaataaatgaacaatataaatgatgtcaccagtgctagaaaggtataatctgttaacttagacatatctcaacaagttattaatttttatattcactgagacaaattaagaaaaagtagtcgatatttgcatgcttggaagaatttaattctggtgactttttgaaacggaaattttgtaagtgccaataaatagcatttacattatttgttgtgctctacaatttcgtcatgataataaaatattgtttggatataaaaaagatctgactaaactagcctgggtggtgtccaaaccatctgtttaggtccaaaaaacacttgtagggaataaatatgtctataatgagcttgtgacttttagatttgaaaccttaagtgcagaattcaataacagtcctcagatggcagctctcagagatatctaccaaggaagaaaacagacaagttaccattgctagtcagatgcctttgccaagaaagcggaagcatggaaatgtaggtcacagatggaattccattatttcatggctatggtgtcctaagcagaaatctgaaaaccacacctggctgagttccgatcagaaggagcacccatgtccccctctgtggggcttggcctactctcaagcatggccctcttccctctcacggataggcaggaacgattttcttaatctttacttcgtctaacattatttatatcttccactgcaagccaggcactgtgcacattgttggtggttcagcagcaatccagataaacttgattcttccctccacggagatttt

SEQ ID NO: 669378 - DNA, 583 bp, Homo sapiens
tgagtctgtggctgtgtctccatcatatgatgcactctaagcactgtggctccaacgagacagaagagcatctaagtctgaggccaccatggcactagcagggagatcctgacaaaytgtgcaatggtatctgtgtttgtatgttatcagatctatggtatctgcatttgtatgtcattagatatattatttatttttaagtcaatttatcttcctatttatcattggttctggaatccttggctactgtgttaagacataatgtcttccctgggccatacaactgaccaacgacaacccatctacttttagcaagatcttctaacaatacttatcctgaggggaaaaggccacagcacatccacttttgtttttgggaaataactaatttattgagattctttctacttgtagcgcctcatacagggtgctttctgggattttcccctttaatgtttgtagaaaaagtaaacaaaactaaaatactcggcatgtaggatactctttgaatatcctttatgtgcacactcactgcaatttactgacatgttgtcagtaaatttgtcagaacaaaccatccagc

SEQ ID NO: 669379 - DNA, 678 bp, Homo sapiens
ttaatagagaaggcagacaagaaaacaagcaatataatacatgataagtctataacaggagtaatcacaggaagcacaagaaggacacacagcttaggcttgaggagtcaaaaaagaacgacaccatctaaattctgaaatatcagtaggtgatagaggagagatggaaggggattccacatgaaaggaggaacaagcacaatggatatcaccttttctttactcatcatttccttcctggacagtatcaaaagtatatttgaatatacctcaataaagttagagggaaacatatttgaaagataayagtgacaaaaggaagactggtcacttttgtcgcttttatcacaaacctcatgcttcaaacatacacacaccactgctgccgcctccacaaatctggccaaaactactttccttctctccttctcatctcagtcacttcacagaacagtcaacctgggctttttaggggtttttttgtttgtttgtttttggttggttgattatttttaatggggtggaggaggaatcatgaatgagtggataaaggaattgaaaagagaagtaaaggtgttaatcaactgtcatcagggtagtgaagcacaaggcattctgccaactgcctacactggttttgcttaacagtaggtacaattttatgaagaaaaatactga

SEQ ID NO: 669380 - DNA, 1088 bp, Homo sapiens
taaaaagcaagtaaatagggtatataggcaaaacaattgcatgctgttattaaaagctctatgagaaaaaataagaggagtgaaatataatagttgaaaggagatttattctagggagggtggtcaggaaaagtacctctttgaaggtggcatttaaaataaaggaagaggcattagtcctttgaagggtgagggaaagagcattccagacacaaggaatgccatgtgcaaaagccctgaagagagtggaaccaaagcttgttgcatgtgaggatctgaaaaaaacaaaacaaaaacaaaccagtgtggctgaggtcatgaaagaaagtaccagactgaagaaaaggcaggggcagaccggaaaaggcayaggctcacttaaagtgggggatttacgttttaagaagtccactgacttgccgtgtggagactccgggaccagggaagcccttagtccagttagaagactactgtattcactgtgacaagcgagcctggtggactgaactaaggtggtaatggggagatggagagaagagtaggtttgagatttattatgaagattggattaacataacagagctggtgatgggttagatgtttagacgtggggcagggagcagtgagggaaagcaaggaataaaaaactcttagctggagtgggtagcattgccatttactgtttgatgaagattggcatgagaataaagttcagtatttgacataattttgtgatactcataaatcttcaatatagatatgtaaattaggcagctggataagcgagtctggggctcaaagaaaataaattcaagaatcatcagtttaaagatgagatacctgaccaggcgcggtggctcacgcctgcaatctcagcactttgggaggccaaggagggaggatagcctgagctcaggagtttgcgaccagcctgggcaacacggtgaaaccccgtatctactaaaatacaaaaaattatctgtgcatggctgtgtgcgcctgtagtcccagctactcaggaggccaaggcaggagaattgcttgaacctgggaggtggaggttgcagtgagccgagactgcaccactg

SEQ ID NO: 669381 - DNA, 594 bp, Homo sapiens
aaaaaacctctgtaccaactccaaatgaaggagttgtaagcattgattctgcaatggcagccttagcaggagataactatgctccaagtctttttacatcaccttctgctaagatttttctgttagatgatggaagccagaccaaaggcaaaagatccagattaaactggttgtttcagaagacctcaaggtggccagtaccaaactgagaaaaagggaaaggcagagtgctgatggtgggaacgaacaaacgggagtcttcaggcaatatagcttagtctggagccagattgccacattaagccgattcgctgtgcaaccttgggaaattgcttaatctctccattcctcacagatttgttgagctcctrttatattaccaggcactgttcttggactgaggacaacattgcaaacataacaaaaccgaaaaataaaaacaaggtccttgctgtccagagttttgagttctagtgagaagagagaattatcaagaaaacacatttaaaagacaattttaatgacaagataatttcagatagtagaaagtggaaagaaactgaagcagggtgatagagagagggctaccagtgg

SEQ ID NO: 669382 - DNA, 1438 bp, Homo sapiens
taaacctgtaattttgacattcaatcactttttttatattgtctgttgtaagaaaatatttttccttttgttctgcagagttttatatgagagacctcatctatcaatgtgacaatctaaaaataatatatttcagacttgtamaattttcactgctaattaaataagacatatcctacaaacaaagggatttatcttttaaatctgaatgttgatcaaataataaaataacagttgattttttattaaaagtctattcctatgttttagggaatatagaattttccttgtcttcataataaaataccaattatatgaatgtcttcaatcaacaaaatgaaatcatttattttaaataagcagcccttgcatttaaattatgatctactattttacgttctgtaactctacaaattttccacttttcccatttaagagccaagtatattaaaggctgctttttctccatggcatcactttttccccctttggtgaagtagacacaaattagtctaaatgatcattaatgctcactaaaaaaatacagatatctggttttgtgcggactgacaaactaaaaacattttgagtagaacctgggtatctaagtttgtaactaccttttatgcacattacagtgtgagaatgtctgcatcactatttcctatgcatcattatagggaagattttaactattctgagatcctaaatgagacagagggaagaatattacactcagagctaaaaggcttgagttagaaatcaggctacgctattgacaagatgtatacctttaggcaacttgaactctctaattccatttccttcactataaaatacagtaataccagctttaaaaccacatttgaacaattaagttaaatgacttagataaaatgccacgaacagtgtagacagtgaacaaatgttacatgaatctgaataatcaaactgcttcagtgaatgtaacattcactctaagtagaaaaatctgttccattgacgaagtaatttcttgagttataagttttccagagtactcatgctattaattttattctagttacagattatggaaacttgcttctttttctttgactcactgacttagaagaattaatcctcatccgtatgacagcatactaattcccattacaggaatattatgcttggggcttctccttctatatattattctattatataatatgatgtgtttgatatctttttgtcctggtttttaaccacaaatttttgctgaaagagtttcatatgtttttgtgtgcttacttttaactaaaattaagaagaactatgaggtgtagaaatgaaagttaggaagaagctctctcttcatcatgcactttagggtttgcctactttattattgggaccttacctgatgtcaacatagatgtaaaatggaagtgtattttag

SEQ ID NO: 669383 - DNA, 1438 bp, Homo sapiens
taaacctgtaattttgacattcaatcactttttttatattgtctgttgtaagaaaatatttttccttttgttctgcagagttttatatgagagacctcatctatcaatgtgacaatctaaaaataatatatttcagacttgtaaaattttcactgctaattaaataagacatatcctacaaacaaagggatttatcttttaaatctgaatgttgatcaaataataaaataacagttgattttttattaaaagtctattcctatgttttagggaatatagaattttccttgtcttcataataaaataccaattatawgaatgtcttcaatcaacaaaatgaaatcatttattttaaataagcagcccttgcatttaaattatgatctactattttacgttctgtaactctacaaattttccacttttcccatttaagagccaagtatattaaaggctgctttttctccatggcatcactttttccccctttggtgaagtagacacaaattagtctaaatgatcattaatgctcactaaaaaaatacagatatctggttttgtgcggactgacaaactaaaaacattttgagtagaacctgggtatctaagtttgtaactaccttttatgcacattacagtgtgagaatgtctgcatcactatttcctatgcatcattatagggaagattttaactattctgagatcctaaatgagacagagggaagaatattacactcagagctaaaaggcttgagttagaaatcaggctacgctattgacaagatgtatacctttaggcaacttgaactctctaattccatttccttcactataaaatacagtaataccagctttaaaaccacatttgaacaattaagttaaatgacttagataaaatgccacgaacagtgtagacagtgaacaaatgttacatgaatctgaataatcaaactgcttcagtgaatgtaacattcactctaagtagaaaaatctgttccattgacgaagtaatttcttgagttataagttttccagagtactcatgctattaattttattctagttacagattatggaaacttgcttctttttctttgactcactgacttagaagaattaatcctcatccgtatgacagcatactaattcccattacaggaatattatgcttggggcttctccttctatatattattctattatataatatgatgtgtttgatatctttttgtcctggtttttaaccacaaatttttgctgaaagagtttcatatgtttttgtgtgcttacttttaactaaaattaagaagaactatgaggtgtagaaatgaaagttaggaagaagctctctcttcatcatgcactttagggtttgcctactttattattgggaccttacctgatgtcaacatagatgtaaaatggaagtgtattttag

SEQ ID NO: 669384 - DNA, 640 bp, Homo sapiens
ttaaacttaactgcctctttatgctaggaatcctttccccattgtttaacatcattatagtgattcattatgaaattttgatatgagattagctttttaatagaaagaaaagaaaaaaagctatttcataatacatcgattttatattgttaaatttttaaatggaaataagattttcacccagttctgactaygtgaaatactttaaactaatctttttatttcattacatagaattctatttcaattgccagtacatattcaacatttttagtagcataaacggggtatctgttacatctttaatattttgctgatgaaatgaaagtcttccaagcatctataataaattctatggtctctaccctgtgagaccaattaattggtacaacataaacatttaaggaaatgaagcaccattggcaaacatgaactctttcacaaaaagcttccaaatgacttagaaataggcatcatgaatttaatcaggcaagacatatgtttaaataatgtgaatattacttgtccagtaaatgtataaagaagaaacttgcttaaatgtataatttagtatattaattattaaacgtggtcattaactcattattaatatagttattaaaaattaacatatgatatc

SEQ ID NO: 669385 - DNA, 869 bp, Homo sapiens
gtaaattggattttttggccgggcatggtggctcacgcatgtacccaatgctttgggaggccaaagtgagtgaatcacccgaggtcaggagttcaagatcagcctggccaacatagtgaaaccctgactctactaaaaacaaatacaaaagttagctgggcatggtggcacgtgccattaatcacagctacacgggaggctgaggcgtgagaattgcttgaacctgggaggcggaggttgcagtgagccgagatcacgccactgtactccagcctgggtgacagagtgagactccatctcaaaaataaatttgtttttttttaagtttgggagttatgtaggaaaaaaaatatgttaatcttctttgagaaaaaaagttgaaaacttctgttaaatctttatgaacatatcaccattgtcttcatgcttataaaatgaacttatatagccatttaattagaaatttttaaaataaaagtttacctttaaaaacaaggtttttatttttcctggatgtaaaataaatacacaatagcaaaagagaatgtataaaacaagaaagtacacrgtagaaaaataaaaatcatctagtaactgggctgttatgaaataatctttattaacatttgggacttttctttctgacatttttttgtatatatacacgtgtgtgtgtgtacctgtgttcctgtatgtacatttgtgaaatggagattctgtatgatatcattttcactttattataaatattttctcattttagatttggataatactatgtttaatggtgtctgtaaggatttacttttcagattccacctagagcttaatttatgaaaacgttaatgactcttgagctgcaagaccta

SEQ ID NO: 669386 - DNA, 2202 bp, Homo sapiens
tgaagatcagttggttgtaggtttgccactttacttctgagtcctctattctgttcccactgatctatgtgtctatttttgtatcagtatcatgctattatagttggtctagcttgtaktataatttgaagtgaggcaatgtgatgtctctgggtttgttctttttgcttatgactactttagctgttcgggatcttttttggttcatctgaacttcaggattgttctttctaattctgtgaaaaatgacggtggtaatttaatagggattgtgttgaatctgtagattgctttgaaagctccttttttaaaagcattatttgtgcatgttaccagaccctccatgtgtcaagagagatttaatcttcctggaggttactgccatttggaggcaaatgccaggtggactaaacagagttaaatactattgactgactagactatagaagaatgaagaactcctatgactcagttttctttttcattctgaacaagtttttaatcatttcacccctctagaattcacatctgttcaagacataatgctgtgggtcagcctgggctctgtcaaaatgaaggcagtattaccaaatcccaaattacagtatgttttactaaccagttttatagactagacatttcactcaggcagaaaggaattcccactgcacttgaggggtagcagagccttgagaacaggctactggttctgcttggctctgtccaggcataccaaagacaaagaggcagaataaatttggtgaaagatgaaattatgaaacaagcccagcttctcagcttcttgattttaattcacttttatttgtgaatgtgacgatcttttactatgttgtagcaaagagttcagatctaaagataaaacttcttcaagacaaaaaaccagtgtcctgactgcaaaagagagggagaatctgcttccagctactaaacaaaagagaggaagtcccagttctgttttattaaaagactttttatccacaaaatactgcagaattaatataaatggtctatgcaatttaatgtatcttttttctctggctttacttagaaaaatcacagcaaaatatgcattttttaagttaactctgtcaacctagtcataattccaggcaaaattgtacatcagtaagtgatgctaaaggaaattaaaaggagacgcaagactaacaatatgacatcaaaatgcagggccttttaaacacgtttgttcatgcatttaaaaaaatgccagtagcatttaggtgtatttaggtttgtgcttaataagggtcccagaatgatggcccgagatcttttcctgctattattttgtttgctcgttgatctatttcttgataaatctggtcagcagttactgcatgtctagtacataccaggtactattctaggcacagaggatgcagcagagaatatgagagaaaaattctcctaccttcctactaagacagacaattagtaagtaaacaaacatatgtgacatcatttcaggtagaaaaaagtgctaagaagaaacataaagcaagagtaagagtataggaagttagtaaagtgggatgctgttctaggtctggtcaggaaaggtgtctgagcaggtagcatttgaacaaagggcacagactcagtctatttgctggaaaacactacagaatgtcatggatgggtcagtgaatggacacgacacactgatattgacacccagtccccaggactgtttttcttagtcaccagggcctccctaggtacttgccctgggaaaaaggcttcacgatgagagaagaaaatttaaaatgcaaaaactcaaaacgggcagcaaataggatgcagtggatgagtctgccctggggtacttgcactccacagattgtcctctaggtcagctgctcagggactcattgtgtcagagcacttgggacgtgagctacaaaaaaaaaaaaaaaagaaaaaagaaaaaaaaaagctatagtatccatgtcccccaaaatttctctttcacatccaagactagtaagagaaaacaacacttgtgtggtgtaaggacattttatttgactttatggtggtatgtgaaataacaatctcacaccttcagaagcatcaaagaatatcatcagagtgacatggtttggaaacacatttggtctctcagtcaccttctttacctcttcgtctgttaacagaacc

SEQ ID NO: 669387 - DNA, 2202 bp, Homo sapiens
tgaagatcagttggttgtaggtttgccactttacttctgagtcctctattctgttcccactgatctatgtgtctatttttgtatcagtatcatgctattatagttggtctagcttgtagtataatttgaagtgaggcaatgtgatgtctctgggtttgttctttttgcttatgactactttagctgttcgggatcttttttggttcatctgaacttcaggattgttctttctaattctgtgaaaaatgacggtggtaatttaatagggattgtgttgaatctgtagattgctttgaaagctccttttttaaaagcattatttgtgcatgttaccagaccctccatgtgtcaagagagatttaatcttcctggaggttactgccatttggaggcaaatgccaggtggactaaacagagttaaatactattgactgactagactatagaagaatgaagaactcctatgactcagttttctttttcattctgaacaagtttttaatcatttcacccctctagaattcacatctgttcaagacataatgctgtgggtcagcctgggctctgtcaaaatgaaggcagtattaccaaatcccaaattacagtatgttttactaaccagttttatagactagacatttcactcaggcagaaaggaattcccactgcacttgaggggtagcagagccttgagaacaggctactggttctgcttggctctgtccaggcataccaaagacaaagaggcagaataaatttggtgaaagatgaaattatgaaacaagcccagcttctcagcttcttgattttaattcacttttatttgtgaatgtgacgatcttttactatgttgtagcaaagagttcagatctaaagataaaacttcttcaagacaaaaaaccagtgtcctgactgcaaaagagagggagaatctgcttccagctactaaacaaaagagaggaagtcccagttctgttttattaaaagactttttatccacaaaatactgcagaattaatataaatggtctatgcaatttaatgtatcttttttctctggctttacttagaaaaatcacagcaaaatatgcattttttaagttaactctgtcaacctagtcataattccaggcaaaattgtacatcagtaagtgatgctaaaggaaattaaaaggagacgcaagactaacaatatgacatcaaaatgcagggccttttaaacacgtttgttcatgcatttaaaaaaatgccagtagcatttaggtgtatttaggtttgtgcttaataagggtcccagaatgatggcccgagatcttttcctgctattattttgtttgctcgttgatctatttcttgataaatctggtcagcagttactgcatgtctagtacataccaggtactattctaggcacagaggatgcagcagagaatatgagagaaaaattctcctaccttcctactaagacagacaattagtaagtaaacaaacatatgtgacatcatttcaggtagaaaaaagtgctaagaagaaacataaagcaagagtaagagtataggaagttagtaaagtgggatgctgttctaggtctggtcaggaaaggtgtctgagcaggtagcatttgaacaaagggcacagactcagtctatttgctggaaaacactacagaatgtcatggatgggtcagtgaatggacacgrcacactgatattgacacccagtccccaggactgtttttcttagtcaccagggcctccctaggtacttgccctgggaaaaaggcttcacgatgagagaagaaaatttaaaatgcaaaaactcaaaacgggcagcaaataggatgcagtggatgagtctgccctggggtacttgcactccacagattgtcctctaggtcagctgctcagggactcattgtgtcagagcacttgggacgtgagctacaaaaaaaaaaaaaaaagaaaaaagaaaaaaaaaagctatagtatccatgtcccccaaaatttctctttcacatccaagactagtaagagaaaacaacacttgtgtggtgtaaggacattttatttgactttatggtggtatgtgaaataacaatctcacaccttcagaagcatcaaagaatatcatcagagtgacatggtttggaaacacatttggtctctcagtcaccttctttacctcttcgtctgttaacagaacc

SEQ ID NO: 669388 - DNA, 587 bp, Homo sapiens
agggggcaggtgcatcaactctataaaggggatctgggaaaagcaccaaccgggtccaccacaatctcagtatcccagtgattatttgtcaactatttagcagagaacaatcctgttctgaacaccatgttatcacatcagatgcccagaaaatgtttaaattaggcatcataattttgggtagcccttgaaatatacccgtttgcatgactttagtaattaaactttaaaaatgagcagacagctactgtaagaacatttttaaggtgatgcatgctgtaatgcgatgttccagagtggaaacagaaggctgttaatctgtatcctcaatgtcaccagacactgcttcttctctttctactcactatctttaattgaagctatttattcatcgctcytccacttaaatacagctgctttgtattttattcaaatatatgttcctgtttcttttctattcagtaaatgctcaattcatggttaatgagcaactaaatatacatatgaatatacctaggtatattataaatatacatatatatattactgtaactgtgatacggcacttgtctccaacatttctttta

SEQ ID NO: 669389 - DNA, 587 bp, Homo sapiens
agggggcaggtgcatcaactctataaaggggatctgggaaaagcaccaaccgggtccaccacaatctcagtatcccagtgattatttgtcaactatttagcagagaacaatcctgttctgaacaccatgttatcacatcagatgcccagaaaatgtttaaattaggcatcataattttgggtagcccttgaaatatacccgtttgcatgactttagtaattaaactttaaaaatgagcagacagctactgtaagaacatttttaaggtgatgcatgctgtaatgcgatgttccagagtggaaacagaaggctgttaatctgtatcctcaatgtcaccagacactgcttcttctctttctactcactatctttaattgaagctatttattcatcgctcttccacttaaatacasctgctttgtattttattcaaatatatgttcctgtttcttttctattcagtaaatgctcaattcatggttaatgagcaactaaatatacatatgaatatacctaggtatattataaatatacatatatatattactgtaactgtgatacggcacttgtctccaacatttctttta

SEQ ID NO: 669390 - DNA, 613 bp, Homo sapiens
gagggcacttgaatggcctttacacgtggtgactraactaatgaagtagctgaggagatggggagtggagtccacaggacccaagtcaagggaaggcaatcaggatattgtttcaaggaatgaaaaacacgtgttgggtgatagttcacaaggcttcagtctgatcacctggattgggctcagtgtgaaggaaacagaaagtctgtacatccatgacatatcattttactctattttaaaacaagccaaatatacctgaaagcatagaaatttcaaagccttgaaaaaattcttctgttttcaagtttgccttagcactgacagtagatgtgaagctctgagaccacttttgaagctagaaaaggcaaggacaaaagtacagagacagtgagtttcatggacatcttatgacctttctgggcctcagttccttcatccctaaaaagatccctttcaagtctaaaattctaaaatcaatgctcagattggcaaagtttctaataatcagggaaagcagttttccaggatccagagcaccacagtgtcactgtattaaggcagcaaataaatcagccctggttgtgctggccgtggggccatggaggactccagg

SEQ ID NO: 669391 - DNA, 626 bp, Homo sapiens
cttgatgaatgtttgtttacgtattactaatcagacagccacattttttgcctttttccttgtctttcttaattttagttattgatggaggaaacaaaaattctagttggatatagtgagaattgttactcygtataaaaacaagcatttaattgataaaattccagtatactttttgtacattattaagcgatatgagatgttttaaataaatgttgtatttaagcatagaaatatattaaatatgtattatggaatataagattactatagaagaatacagttgattttccattttcccaattagattatgcaaattttggaaaatggattaataggacaaatgtctataacaatttattttttaatttagatatatctatgcacattatgtatatggaactataaataatttggcaatattatttttatctatttttacatttcatataaacattttacacaaactttttacattaatttttggcactgtcttttttattacgagagctaacttttacattgtgaaatatttttctaaggcatgtaatctttattaccacctaagttcttaaagaaactgtatatctctgaaaatcttatttataatattctttgcatagcat

SEQ ID NO: 669392 - DNA, 682 bp, Homo sapiens
tcccgtgaaacagaattagctaataaggttaacacctgtcagctgtatatgatgctgcgtctccaatctccatccggacarcaaaggggaaggcatggacaggagacctgccttcagaagagcagctgacaaaggggcccacagcctggggatggtgacggcagtagccccccgaggcctgggatcccacagcacaattgtgaagggaaagtcttacttgttgggcccagatgtgtaattttctcccaccactgtttttttgtgaaaaattcttctgaatacataattttgcccctaaataaacatggtgttggacatttttctgactaggaagttaggatatttgcttttctagcatctttattaggtgactttttatgtttgcaaagtcactcagaaaaaacttcatcctcccaacacctccctggaccacagtccccacaaatgacattgaactcacaacataaaggaactcaccactaggtaaataggtgcttgactgtgatttaacacctgaattactaaaattgatggcaataattatccaaagaaaaacagccaagtgcagcagtaacgacagcctctgaactctctccacatcttcttgtggacagcctttgagctctctccatgtcttctccgggacagcctctgaactctctgcacgtcttcttgcagacag

SEQ ID NO: 669393 - DNA, 682 bp, Homo sapiens
tcccgtgaaacagaattagctaataaggttaacacctgtcagctgtatatgatgctgcgtctccaatctccatccggacaacaaaggggaaggcatggacaggagacctgccttcagaagagcagctgacaaaggggcccacagcctggggayggtgacggcagtagccccccgaggcctgggatcccacagcacaattgtgaagggaaagtcttacttgttgggcccagatgtgtaattttctcccaccactgtttttttgtgaaaaattcttctgaatacataattttgcccctaaataaacatggtgttggacatttttctgactaggaagttaggatatttgcttttctagcatctttattaggtgactttttatgtttgcaaagtcactcagaaaaaacttcatcctcccaacacctccctggaccacagtccccacaaatgacattgaactcacaacataaaggaactcaccactaggtaaataggtgcttgactgtgatttaacacctgaattactaaaattgatggcaataattatccaaagaaaaacagccaagtgcagcagtaacgacagcctctgaactctctccacatcttcttgtggacagcctttgagctctctccatgtcttctccgggacagcctctgaactctctgcacgtcttcttgcagacag

SEQ ID NO: 669394 - DNA, 682 bp, Homo sapiens
tcccgtgaaacagaattagctaataaggttaacacctgtcagctgtatatgatgctgcgtctccaatctccatccggacaacaaaggggaaggcatggacaggagacctgccttcagaagagcagctgacaaaggggcccacagcctggggatggtgacggcagtagccccccgaggcctgggatcccacagcacaattgtgaagggaaagtcttacttgytgggcccagatgtgtaattttctcccaccactgtttttttgtgaaaaattcttctgaatacataattttgcccctaaataaacatggtgttggacatttttctgactaggaagttaggatatttgcttttctagcatctttattaggtgactttttatgtttgcaaagtcactcagaaaaaacttcatcctcccaacacctccctggaccacagtccccacaaatgacattgaactcacaacataaaggaactcaccactaggtaaataggtgcttgactgtgatttaacacctgaattactaaaattgatggcaataattatccaaagaaaaacagccaagtgcagcagtaacgacagcctctgaactctctccacatcttcttgtggacagcctttgagctctctccatgtcttctccgggacagcctctgaactctctgcacgtcttcttgcagacag

SEQ ID NO: 669395 - DNA, 682 bp, Homo sapiens
tcccgtgaaacagaattagctaataaggttaacacctgtcagctgtatatgatgctgcgtctccaatctccatccggacaacaaaggggaaggcatggacaggagacctgccttcagaagagcagctgacaaaggggcccacagcctggggatggtgacggcagtagccccccgaggcctgggatcccacagcacaattgtgaagggaaagtcttacttgttgggcccagatgtgtaattttctcccaccactgtttttttktgaaaaattcttctgaatacataattttgcccctaaataaacatggtgttggacatttttctgactaggaagttaggatatttgcttttctagcatctttattaggtgactttttatgtttgcaaagtcactcagaaaaaacttcatcctcccaacacctccctggaccacagtccccacaaatgacattgaactcacaacataaaggaactcaccactaggtaaataggtgcttgactgtgatttaacacctgaattactaaaattgatggcaataattatccaaagaaaaacagccaagtgcagcagtaacgacagcctctgaactctctccacatcttcttgtggacagcctttgagctctctccatgtcttctccgggacagcctctgaactctctgcacgtcttcttgcagacag

SEQ ID NO: 669396 - DNA, 682 bp, Homo sapiens
tcccgtgaaacagaattagctaataaggttaacacctgtcagctgtatatgatgctgcgtctccaatctccatccggacaacaaaggggaaggcatggacaggagacctgccttcagaagagcagctgacaaaggggcccacagcctggggatggtgacggcagtagccccccgaggcctgggatcccacagcacaattgtgaagggaaagtcttacttgttgggcccagatgtgtaattttctcccaccactgtttttttgtgaaaaattcttctgaatacataattytgcccctaaataaacatggtgttggacatttttctgactaggaagttaggatatttgcttttctagcatctttattaggtgactttttatgtttgcaaagtcactcagaaaaaacttcatcctcccaacacctccctggaccacagtccccacaaatgacattgaactcacaacataaaggaactcaccactaggtaaataggtgcttgactgtgatttaacacctgaattactaaaattgatggcaataattatccaaagaaaaacagccaagtgcagcagtaacgacagcctctgaactctctccacatcttcttgtggacagcctttgagctctctccatgtcttctccgggacagcctctgaactctctgcacgtcttcttgcagacag

SEQ ID NO: 669397 - DNA, 614 bp, Homo sapiens
gccaggatggtctcgatcccctgatcttgtgatctgcccgcctcgacctcccaaggtgctgagattacaggcgtgagccaccgtgcctggccgatgtcacccacgtttcttaggaaagacgttagcatcctctaaatcctcaccgactgtgcctggcgcagcattattttgcagttttctgggatttacagttggcatcatttgcacagcggcagcgtgacgtggctgtggagagcacggaagctctgtccccacggaagtgggctcttctggttgcaacatggtggaggccagcscggccgcaggtgagggaagatgccacagcaaacctctgagcaaccaagatgacaagcacctgcttggaaaaggtgacaagccacaaggccataggcccagttataaggatgaattgtgttacacgaatggttataaacctgaccgacctcagaaggtatatggaggaggcaattatcaagccccttgatggtctgtggctggatgcaccatactttgccaacggtgtgagcatggcagagaatgtaggtgtgtatataggggaaaacctccagaaagttttttctgtgggagttctttgtaaaataataacaatgcaa

SEQ ID NO: 669398 - DNA, 611 bp, Homo sapiens
cttaatgaaaacacacagcactcgtttgcttctcaacttacttctcatgaaatattactactcctccccacccaatcacaatcctttgctgccaaaaatcccttgctaccctgtacattttgcccaataagggaacccctcagcacacacacacaatggcctactcagaaggctgagtcagcagaatcacatgaaccagggagttgcaggttgcagtgagccaagatcrcgccacagtgctccaacctggcgacagagcaagactctgtctcaaaacaaacaaacaaacaaaaaacaaaaaaaatgcctcactcatctcacttatgtaatcatgacagtaccattaattgtattatccctataatacagatgacagctgccaaaaatatgcagagaagggttaattaaactgcataacattactcagagaatgcattctttttattccataggtttttctattacagtactacatacacagaggccttccattggaaataacttataggaattactgtaggtctctttgcactttcttcagctcttggtttaggtctcagattgtgagtgatttctctctttagtgaagttgtaatgcaattcattaccat

SEQ ID NO: 669399 - DNA, 652 bp, Homo sapiens
tagagatggggtttcaccatgttggccaggctggtctcaaactcctgacctcaggtcatccacctgcctcggtctcccaaagtcctgggattacagggatgagccaccacacccagcctttactgtcttcttctgaaccctccaaactattccaacctctgcctgttgcccagttccaaagtcacttccacattttagtgtatccttataacagcaccctatgtctgtggtaccaatttactgtattagtctgttttcatgctgttatgaagaactcctcaagactgggtaatttataaagaaaagaagtttaattgactcatagtttcacatggctggggatgcctcaggaaacttacaatcatggccaaaggcacctcttcacagggtggcagcagaaacaatgagwtctgagtgaaggaagaagccccttataaaaccgtcagatcttgtgagaactcactatcacaagaacagcctggagaaaaccacccctgtgattcaattatgtccatctggtcccacccttgacacataaggattatgggaattacaagattacacattaatcttaaattacacattaataagtgtgtaatgaaacatcccctttttttatttgagttcatttcaatagatatggaaataatag

SEQ ID NO: 669400 - DNA, 678 bp, Homo sapiens
cattgtcaaaactcaagttgtacacttaagatgcatttcattgtatataaatcttatctcataaaaagattataagactgtaaactaagcttccatttttttactttaatattttagacatcagttttgcattgctccctaattaaaagtacaaccaaccatttagcagcatgagaggagacaagcatctggatgtcctgaatcaagccaaatggtgaccggcgttattttccatatgttccatttttattttaaaaacacttatttgtgatcatcgcatgattatgtgttctttaatgtaaacaaaacaggctatcatatttaagtcctacaaaaccagtgagataagcaatagcaataaaaataaatctcataatgacaaagagattcctcaagaactaggcttaaaaatcactgctgtgggaaatctgaagttccctctaactgaccttacttggctaaagatggactttratcaattactggaaataaagcctgggaatttatttccatgtgtcaaataacctttggcaatatttaaataatttcagatgccgctgggctatgcagagtgtttgggagaatcctggcccacttacttgcctcttatgcttgatttaatacatctgccttgtagcttgtccacctgcttccagtcccaccctatcaactcattat

SEQ ID NO: 669401 - DNA, 678 bp, Homo sapiens
cattgtcaaaactcaagttgtacacttaagatgcatttcattgtatataaatcttatctcataaaaagattataagactgtaaactaagcttccatttttttactttaatattttagacatcagttttgcattgctccctaattaaaagtacaaccaaccatttagcagcatgagaggagacaagcatctggatgtcctgaatcaagccaaatggtgaccggcgttattttccatatgttccatttttattttaaaaacacttatttgtgatcatcgcatgattatgtgttctttaatgtaaacaaaacaggctatcatatttaagtcctacaaaaccagtgagataagcaatagcaataaaaataaatctcataatgacaaagagattcctcaagaactaggcttaaaaatcactgctgtgggaaatctgaagttccctctaactgaccttacttggctaaagatggactttgrtcaattactggaaataaagcctgggaatttatttccatgtgtcaaataacctttggcaatatttaaataatttcagatgccgctgggctatgcagagtgtttgggagaatcctggcccacttacttgcctcttatgcttgatttaatacatctgccttgtagcttgtccacctgcttccagtcccaccctatcaactcattat

SEQ ID NO: 669402 - DNA, 846 bp, Homo sapiens
tgtagtttttatagttgtttgtcctgcctcttagatgtgtgagtctgaagaataaagacagcagcacatactgtcatttttactccctttctaactttccacaccaaccaattaggtgtttgctagtgcacaatgggtatctaataaatactgcagttgatgctaagaataaaacctgaaggagacgttctgcggcaagaaactctttgaatgacactgcatgtaatagatcagattaaatattatgaaggatatgctttcaattttgtggtttcatccgagtgaaattccgtaatactctaggaataakacacctgacatctgtgctctgctctttgttttgagtgtgccatttcacagtctttgaaatattttggattgaaaatgagatttcaaggaagtatttcattagaaggggggtattattctctttgaattgcatccaagctgcagtttttcatctttttttattaactttctatcacattactcttttttctaattatacattaaccaacacactttaatgtgcagaatgaatcctgtttggtttcaacaaaaattgcaatggaagctaaagctttgaagaagtgatgcaagagtgtctttaagttaatatcacatttccttctacactgattgcatatctcagtacctacatatgcttttaagccactgctacaagttttacatttatttaaataacatgaccattatgagtaaaacttaaaaaaaattgagtggaactttaagctgcctggtttattatagttgctttatgtttataaacagattatttttaatgtctgaatgctggtattacagatcttctgcagctgttttgga

SEQ ID NO: 669403 - DNA, 805 bp, Homo sapiens
ctcctaaagaagcttatctcttacattaaaatctcaggattaagtctaaacagtgaacaaggatgcatttaaaactttagtgacttctagctagtcataaaaaccatttttatgaattatctcactttggctyaaagatgttttcagcaaaggctgtcagtttcattgtaataaagcatttagaatgaacttctgagattccaggtcttgctgtgataaatctggctttgcaaagatttataaattttactgcttatagattaattatgatcttgagcacgtttgtttccttgtgggtttactttgaatttggaaaataaattgcatcaagaggtaaatttgctggttattgccaagttcttttaaaagggctcattaaactgaaacggtgtctgtgtcttgcgacgggttgaaagtatttagatgctttctgttcctgaggtcgatcatatattttgcggtaaaaacccgggaaagttcgttatatacaaactatttgctgcaaggaattttaaatgtcttcagtctgcctaaaatatcacacacagtgatgatctggtcaccttaaaaataaaattttcagtgtatgaggtgggctttaacattagttacttgaagtttggagattgtacttgtatccttctacttagtttatatatttgttaaataagttttaaacccttgttgcatagctgtagacatgatatgatttccaacatttcttaatttgggggaaactaacgatatggtctatagtttatctcaatgaggaataaatagatgtattgccaaagtacaagctttg

SEQ ID NO: 669404 - DNA, 597 bp, Homo sapiens
tggcctttgaaacttgcttgacactgcagtcatctctcatagataaaataggtcacagtgagttttaaattctttttttttktttttgaaataaaaatgttattcaggccgggtgtggtggctcacgcctgtgatcccagcactttgggaggccaaggcgggtggatcacaaggtcaggagttcaagaccagcctagccaagatggcgaaaccccatctctactaaaaaatacaaaaatcagccaagcatggtggcaggtgcctgtaatcccagctactcgggagactgaggcagagaattgcttgaacccaggaggcagaggttgcagcgagccaagatcgcgccaccgtactccaccctgagagacagagcgagactccatctcaaaaaaaaaaaaaaaagaaaaagaaaaagaaaaagaaaaatgtttttaaaataaaattgcaggtggtatcccaatctgcaaggataaaagcagaatgactctttttgggaggagggagaagaatctcagaaccttggccacacagttcacacagagacgtcaccctgacccgtaggactccgcagaactcagtgtgaaaaacaccaaaata

SEQ ID NO: 669405 - DNA, 597 bp, Homo sapiens
tggcctttgaaacttgcttgacactgcagtcatctctcatagataaaataggtcacagtgagttttaaattcttttttttttttkttgaaataaaaatgttattcaggccgggtgtggtggctcacgcctgtgatcccagcactttgggaggccaaggcgggtggatcacaaggtcaggagttcaagaccagcctagccaagatggcgaaaccccatctctactaaaaaatacaaaaatcagccaagcatggtggcaggtgcctgtaatcccagctactcgggagactgaggcagagaattgcttgaacccaggaggcagaggttgcagcgagccaagatcgcgccaccgtactccaccctgagagacagagcgagactccatctcaaaaaaaaaaaaaaaagaaaaagaaaaagaaaaagaaaaatgtttttaaaataaaattgcaggtggtatcccaatctgcaaggataaaagcagaatgactctttttgggaggagggagaagaatctcagaaccttggccacacagttcacacagagacgtcaccctgacccgtaggactccgcagaactcagtgtgaaaaacaccaaaata

SEQ ID NO: 669406 - DNA, 597 bp, Homo sapiens
tggcctttgaaacttgcttgacactgcagtcatctctcatagataaaataggtcacagtgagttttaaattctttttttttttttttgaaataaaaatgttattcaggccgggtgtggtggctcacgcctgtgatcccagcactttgggaggccaaggcgggtggatcacaaggtcaggagttcaagaccagcctagccaagatggcgaaaccccatctctactaaaaaatacaaaaatcagccaagcatggtggcaggtgcctgtaatcccagctactcgggagactgaggcagagaattgcttgaacccaggaggcagaggttgcagcgagccaagatcgcgccacygtactccaccctgagagacagagcgagactccatctcaaaaaaaaaaaaaaaagaaaaagaaaaagaaaaagaaaaatgtttttaaaataaaattgcaggtggtatcccaatctgcaaggataaaagcagaatgactctttttgggaggagggagaagaatctcagaaccttggccacacagttcacacagagacgtcaccctgacccgtaggactccgcagaactcagtgtgaaaaacaccaaaata

SEQ ID NO: 669407 - DNA, 616 bp, Homo sapiens
tgaaaagtatactataaacagattcataataaacttcacaaaagattttcccacactgaggttattttcaaaacatatgccaaatagacgaccattcgtttttctccaataatgagcttggatttccaagttacccttgtcataagttacactttccaggaaaaggaagtgaacatgtggaaatgatatgaacgtttctaggacactggggcccatttagtgtattgaagcaatcatttatcagataggacccaagagtccasaaaggctcacggcccctttcacacatgcctgcattactcccccaagacgagcctatgaactaaaagaatctgcaccattaatttaaaaaacggcatgggctgccctaacagaagagcacccttcaggagaagagacacaaatacacacaattaaatttcaaagtgaacacttggatgagtagttttcagaattaaacacccaaagtaatgcgtgtgatttcacttacttgctaacctcgtattcgacagctgtgggaattaattctgttatttgcaccttccctcattttaatttggccaaatactctattacatcactctgtgaatcttaggttaccaaagaaaaatattgg

SEQ ID NO: 669408 - DNA, 1146 bp, Homo sapiens
gctctgtattggatagccagtgctgagttaagtgctctgcctacattctttcagttactcttaacagcaatgatgagcattataatcttcattttcatatgataagctgagatgttgaaataagtaatggacccaaagcttcatggagacaaagcacctgaaaaaattatgattgaaaaaacaccagtctagcaagtttaaacagacagttaatagacttccagtaagagagaatagagaaaaatggaaaagagaaaattgatgaggaaataatggacttaactattacagaattgaaaaagagatgataattcagagtgaaaaacccaggaagtgtatacaaaatgaccaacatgcaaatacagggactgtccaaatttcaaacacaaagaaaatgttaagaggagaaactagtaatcccaacgctttgggaggccgaggcargagtattgcttgaggccagaagttaaacactagcctgggcaacacagccagaccctgtgtctattaaaaaatataaaaaatattagctgggcatgggggtacatgcctgtagtcctagctacatgggttgctgaggccagaggatcactgaaacccaggagttcaaggctgcagtaagctatgatcatacccctgcactccagagcctggacaataaagcaagactctgtctctaaaaaagaaacagagagagagagagtgagagaaaaagaaggaaggagggagagagggagggcaggcagaacagaaactaataactgttagggcaaaaaggaagaaaaatggttcatctaagaagggagaggaatctgagtgacatcagacctcatcaacttacataattataaatctgaaagcaatttcatagtgttaacattttagaaacaatgcataggcaaaacagagacgaataaattttgttttgggataaaatgttccaacacatcattctggtcacagagagtacaggatgagaactagaaagaggagagaggatggacactggatgtcctcctccaacaaagcaggtgttcagagagttgatctaaacacaaatgaaataagagacaaagtcattatgaacaaaatgtttgtgtccctcccaaaatctatatgttgaaacctaacccccaaagtgaaaac

SEQ ID NO: 669409 - DNA, 619 bp, Homo sapiens
gaattttatgaatttttttcttttgcttaaatagcagacatgttataaaaagttgtcttaagttgtatatgcctaaatttttcacatatacatatatcatcagagaaaatgggttataaaatggagacaattatttacattttaaaatactacagttgtcttctatgaagttktgagagagaaagcaccaaatataatgagaataattatttcattaaaaaatgaaattagatgattttacactaaaaacagcatggatgtatctggaggttcttaaatgcaaataaacactgattctgaaagcgttattacatatttctaaaaggacaggtaaaatgaatttttcaaagtaatatagttctttaaataacatatgaaaaactacaggtgcagcaatcttttttttagcatttataccttcttaattgagatgctctaacaaatactgttttgttcaaatcgatgaagcccacagataagacatacttattatggctaatatttggcagcatggggggctctcaatggatagtagtcatggcttttcagataatattcctacctctggcagctcaagatctttacaataatgaactcaatttggcacaaaagtcagaaa

SEQ ID NO: 669410 - DNA, 1367 bp, Homo sapiens
atgtgggagtaaacgagagacagctcagatctgggagggagagcagagactatttaacagatggcactgggacaaatgggctgtcatctggaaaatataaaactaactttgtaccttataccaaatcaattccagatggatccgtttgatataaaaagagaatgacacaagttccataccaggcgacactgcaggggactgtcttcagaatgtacggggcgtcatgtgtattatgtatgcacaatacatgcatatgtataatatgtatgatgagaaacgcattatacattatgcattatgacacaaaacccagaagccataccaaaaaggactgataaatatagcatttaaaaaaaaagaaaagaaaacaactgcatggcaaagtcagaagacaagattaaaaacccagaaaacaaatacatgcaattcctactaaagacaatgccttgaaacttacggagtttytaaaaactaagaacccagccaggcgcagtggctcacacctggaatcccagcactttgggaggccgaggtgggtggatctcttgaagtcaggagcttgagaccagcctggtcaacatggtgaaaccccatctctactaaaaataccaaaaaaaaaaaaaaaaaaaaaaaaaaaaaaaaaaaatttggccaggcttggtggcacgtgcctgtaatcccagctacttgggtggctgaggcagaagaattgcttgaacccgggaggcaaaggttgcagtgaaccgagatcacaccagtgcactccagcctgggtgacagagtgagactctgtctcaaataaagtaaaaattaaaaaaagaaaagaccaacaactcaacagagatgagcaaaggagacaaacaactcaccaaatatcaatgaaatcgtttacttgaaacaatattcaacctttatcaactcctaagataaaaccacaccacaccagggcaagtctccacctaactgtatggccgcaaccagcaagtgctaactcgctgggctcgttaaaggttagggaaacaggccttgtatgtggctgtgggaattctaaaagcagatctcggcaacaggtaaagtaattacaaaagcacagaccatttgacccaactccacttccagatttctactccacaggtagacttacctgaatgtgaaaggtcccatctgctgtctgtaacatgtaggtgatatgtatataatatgtaaatgacagtgcactggtttgtaataatacgatggaacaaaatgttatctatagggcctgattaaataacacatttgtgccactgaacaagctctttatggactgacagagaagcctcatctggaaagactgccaagagaagaccaggaggcacctgtgtgtg

SEQ ID NO: 669411 - DNA, 1525 bp, Homo sapiens
tgtatttattttctgtatgcatgttgaaataacatttaatgtgactgagaagagaaattatttacatgttgattattttgtatatcaagatgacatcagtcactaaaaaggaatgagcaaaatactgtacatgatggtgataatttctacttacctaatgactacaatgtataaaacctattagcttgtttcccygtgtttttttcataaatcttcacaactgtcccatcagatggaagctattatcccccagttgagattcgaagatgttaagtactttgctaaggccatcctacaaagaaatacagggctggaatttaaaccaagaagtccaaagtctgtagtctttctgctaggctttgcagagcttacaaatgacctaatagattgccttgcccagcagagccagaaattgcttccagaggcatgtctatattagcagcatgagttgatccctatgtgataattgtaccattaatgtaatagaaatattgagcagctcagaacttcctgaccccaggctaaagtgtaaaaagggagaaagataatagtctcctgctggtttcaaccagggtcatttccaggacattgtctggcctagacagtaagaatcagatgcaaattgtaacaatcttctttgatctgtgtgttcagcacaaatagatttatgaattcctctcctttagcttagttagtgttttgttggagtcagatagatactttgttaaccccatcgtcagtctagagcaatgttgtcatagaggcatgaccttcctgtgatgtatcaaactcttcatttgtaatattatagtcttataatagagaacacaatattctgttccaagactcaaacctaactcttctccaggaaaacatatgcaactgactctttattagattgttttggaaactttttattttactggtcaatcaagtttagtgacctatttgatattcaggtatgtgcacaatgtagacatttttcaaattaccgtatgaatttagataatatctcctattgagaaagaaaagactatcacatggaataaccttgatttgttaatctggctagcacatttgccattgttatatctattccctgttgaaaaagccttcttgtcagacttgtcatatgctgtttgtataactggtaattacagaatcaagatgaattatcccctatttttaaaggctataaaataaataccaaccaattaatataactacaccttccattctctgaggaaaaaaaagagaaaaatcaatctcatttcaaagtcatttattgatttgcctcccccacttccacccactgccataggactacatattaaaacctgtgattcttccccctactgtttaaaagaagctgccttaacacaagtgtcatggaattcccacatgacgaaatgggagagttccctgatccccctcctcccaggacatgtgacaggggtgtggctcacctgtttgcttgctgccactgctcaaacccctgatgaagggggaaacatgcagatggaca

SEQ ID NO: 669412 - DNA, 1525 bp, Homo sapiens
tgtatttattttctgtatgcatgttgaaataacatttaatgtgactgagaagagaaattatttacatgttgattattttgtatatcaagatgacatcagtcactaaaaaggaatgagcaaaatactgtacatgatggtgataatttctacttacctaatgactacaatgtataaaacctattagcttgtttccctgtgtttttttcataaatcttcacaactgtcccatcagatggaagctattatcccccagttgagattcgaagatgttaagtactttgctaaggccatcctacaaagaaatacagggctggaatttaaaccaagaagtccaaagtctgtagtctttctgctaggctttgcagagcttacaaatgacctaatagattgccttgcccagcagagccagaaattgcttccagaggcatgtctatattagcagcatgagttgatccctatgtgataattgtaccattaatgtaatagaaatattgagcagctcagaacttcctgaccccaggctaaagtgtaaaaagggagaaagataatagtctcctgctggtttcaaccagggtcatttccaggacattgtctggcctagacagtaagaatcagatgcaaattgtaacaatcttctttgatctgtgtgttcagcacaaatagatttatgaattcctctcctttagcttagttagtgttttgttggagtcagatagatactttgttaaccccatcgtcagtctagagcaatgttgtcatagaggcatgaccttcctgtgatgtatcaaactcttcatttgtaatattatagtcttataatagagaacacaatattctgttccaagactcaaacctaactcttctccaggaaaacatatgcaactgactctttattagattgttttggaaactttttattttactggtcaatcaagtttagtgacctatttgatattcaggtatgtgcacaatgtagacatttttcaaattaccgtatgaatttagataatatctcctattgagaaagaaaagactatcacatggaataaccttgatttgttaatctggctagcacatttgccattgttatatctattccctgttgaaaaagccttcttgtcagacttgtcatatgctgtttgtataactggtaattacagaatcaagatgaattatcccctatttttaaaggctataaaatraataccaaccaattaatataactacaccttccattctctgaggaaaaaaaagagaaaaatcaatctcatttcaaagtcatttattgatttgcctcccccacttccacccactgccataggactacatattaaaacctgtgattcttccccctactgtttaaaagaagctgccttaacacaagtgtcatggaattcccacatgacgaaatgggagagttccctgatccccctcctcccaggacatgtgacaggggtgtggctcacctgtttgcttgctgccactgctcaaacccctgatgaagggggaaacatgcagatggaca

SEQ ID NO: 669413 - DNA, 1525 bp, Homo sapiens
tgtatttattttctgtatgcatgttgaaataacatttaatgtgactgagaagagaaattatttacatgttgattattttgtatatcaagatgacatcagtcactaaaaaggaatgagcaaaatactgtacatgatggtgataatttctacttacctaatgactacaatgtataaaacctattagcttgtttccctgtgtttttttcataaatcttcacaactgtcccatcagatggaagctattatcccccagttgagattcgaagatgttaagtactttgctaaggccatcctacaaagaaatacagggctggaatttaaaccaagaagtccaaagtctgtagtctttctgctaggctttgcagagcttacaaatgacctaatagattgccttgcccagcagagccagaaattgcttccagaggcatgtctatattagcagcatgagttgatccctatgtgataattgtaccattaatgtaatagaaatattgagcagctcagaacttcctgaccccaggctaaagtgtaaaaagggagaaagataatagtctcctgctggtttcaaccagggtcatttccaggacattgtctggcctagacagtaagaatcagatgcaaattgtaacaatcttctttgatctgtgtgttcagcacaaatagatttatgaattcctctcctttagcttagttagtgttttgttggagtcagatagatactttgttaaccccatcgtcagtctagagcaatgttgtcatagaggcatgaccttcctgtgatgtatcaaactcttcatttgtaatattatagtcttataatagagaacacaatattctgttccaagactcaaacctaactcttctccaggaaaacatatgcaactgactctttattagattgttttggaaactttttattttactggtcaatcaagtttagtgacctatttgatattcaggtatgtgcacaatgtagacatttttcaaattaccgtatgaatttagataatatctcctattgagaaagaaaagactatcacatggaataaccttgatttgttaatctggctagcacatttgccattgttatatctattccctgttgaaaaagccttcttgtcagacttgtcatatgctgtttgtataactggtaattacagaatcaagatgaattatcccctatttttaaaggctataaaataaataccaaccaattaatataactacaccttccattctctgaggaaaaaaaagagaaaaatcaatctcatttcaaagtcatttattgatttgcctcccccacttccacccaytgccataggactacatattaaaacctgtgattcttccccctactgtttaaaagaagctgccttaacacaagtgtcatggaattcccacatgacgaaatgggagagttccctgatccccctcctcccaggacatgtgacaggggtgtggctcacctgtttgcttgctgccactgctcaaacccctgatgaagggggaaacatgcagatggaca

SEQ ID NO: 669414 - DNA, 1525 bp, Homo sapiens
tgtatttattttctgtatgcatgttgaaataacatttaatgtgactgagaagagaaattatttacatgttgattattttgtatatcaagatgacatcagtcactaaaaaggaatgagcaaaatactgtacatgatggtgataatttctacttacctaatgactacaatgtataaaacctattagcttgtttccctgtgtttttttcataaatcttcacaactgtcccatcagatggaagctattatcccccagttgagattcgaagatgttaagtactttgctaaggccatcctacaaagaaatacagggctggaatttaaaccaagaagtccaaagtctgtagtctttctgctaggctttgcagagcttacaaatgacctaatagattgccttgcccagcagagccagaaattgcttccagaggcatgtctatattagcagcatgagttgatccctatgtgataattgtaccattaatgtaatagaaatattgagcagctcagaacttcctgaccccaggctaaagtgtaaaaagggagaaagataatagtctcctgctggtttcaaccagggtcatttccaggacattgtctggcctagacagtaagaatcagatgcaaattgtaacaatcttctttgatctgtgtgttcagcacaaatagatttatgaattcctctcctttagcttagttagtgttttgttggagtcagatagatactttgttaaccccatcgtcagtctagagcaatgttgtcatagaggcatgaccttcctgtgatgtatcaaactcttcatttgtaatattatagtcttataatagagaacacaatattctgttccaagactcaaacctaactcttctccaggaaaacatatgcaactgactctttattagattgttttggaaactttttattttactggtcaatcaagtttagtgacctatttgatattcaggtatgtgcacaatgtagacatttttcaaattaccgtatgaatttagataatatctcctattgagaaagaaaagactatcacatggaataaccttgatttgttaatctggctagcacatttgccattgttatatctattccctgttgaaaaagccttcttgtcagacttgtcatatgctgtttgtataactggtaattacagaatcaagatgaattatcccctatttttaaaggctataaaataaataccaaccaattaatataactacaccttccattctctgaggaaaaaaaagagaaaaatcaatctcatttcaaagtcatttattgatttgcctcccccacttccacccactgccataggactacatattaaaacctgtgattcttccccctactgtttaaaagaagctgycttaacacaagtgtcatggaattcccacatgacgaaatgggagagttccctgatccccctcctcccaggacatgtgacaggggtgtggctcacctgtttgcttgctgccactgctcaaacccctgatgaagggggaaacatgcagatggaca

SEQ ID NO: 669415 - DNA, 612 bp, Homo sapiens
atttcaaatgaaagaaagcttgtttttctttttttttcctgcaatgctagagggcagatgttaaaagattctggctcaatacaatagttaataattcaaagtaattaaaatgacccaggttcttcaatcgtagaagaggtaagaaaaaaaaagagggcaagtttaatttttctcaagaggtgcttgaaccaaggttacacaacaaacctgggatagcccttcctttgtgtcgggmattagttaacctcagagtctcactttcctcatctgtaaaaggagacaacaagatccccttcacagaattgttagagtagaaataacatatgaggctgggggtggtggctcatgcctgtaatcccagcactttaggaggcaaggtgggtggatctcttgagcccgagttcgagatcggcctgggcaacatggcgaaaccccgtctctacaaaaaatacaaaaaaattagcaaggtagggtggcacatgcctgtagtccggctactctggaggctgagatgggaggattgctggtgcccgggaggttgagtgggcagtgagctgtgatgacaccactgcactccagccagggtgacacagcgagaccctgtctcaaaaa

SEQ ID NO: 669416 - DNA, 627 bp, Homo sapiens
ctactcaggaggctaaggcaggagaatcacttgaacccgggaggcgtaggttgcagtgagccgagatagcacygctgcactccagcctgggcaacaagaatgaaactccgtctaaaaataaaataaagtaggaaaagtattataaaatctcttacaaattatttctttcatttcccatattagtatatctttcctgatagaaggatgttaaaaaaatgtagctattagaattcaaatgtctcattacattacagaaaattaatgtttaaatttaaaccaattttataaatatagccagccctccatatttgtggattctgaatgagtggattcagtcaactactaatagataatatttgacaaaaataactacatctgtactaaacatgtaagactttttcattgtcactacttcctaaataatacagtataacacatattttcataatatttacattgtattaggcattataagtaatccagagatgagttaaagtatatgggagcatgttcataagttatatgcaaatattacaccattcatataaaggacttgaacatctgtgaattctgatattcataggagttcctggaaccacttccccatggatacgaagggatgactgt

SEQ ID NO: 669417 - DNA, 658 bp, Homo sapiens
tatcaataaacttaaaaattttttgtaaatgtattaacacttgcattcataaagaatattattggccgggtggccgggcgtggtggctcacgcctgtaatcccagcactttgggaggccgaggctggcggatcacgaggtcaggagatcaagaccaacctggctaacacagtgaaacccatctctacagaaaatacaaaaaattagccaggcgtggtggcaggcgcctgcagtcccagctactcgggagtctgaggtaggagaatggcatgaacccgggaggcagagcttacagtgagccgagatcgcgcccctgcactccagcctgggtgacagagcaggactccgtctcaaaaaaaaaaaaaaaaaaaaaaaaaaagaatattattgttccagcatacttgcttatatttcccctgtaattttgtatggtgggtattatgatcactgttatctttgagtttcatttgataatttttatcatgagagaatttattgttcaactcataaattataaagtcagaatagaaaacagattgagtaatccagacattgtgttctttcaaatctacctaacaccctattggccaaatgtattacaacagaccrtgtattaacataaattgaaatctagcgttaactgtatacttacagcacat

SEQ ID NO: 669418 - DNA, 1769 bp, Homo sapiens
ccataacattttctaaaaactagaaaggatacattacttaaaacaggacaatgtctgttttacaaacataactatcaaaaattaatatatattaaacatctttcacgtgagataaaaatgattttagaaaagtagtttgtgtttatttgctcctgtctcttgccttctcaattacttttttaaaaatgtaattaaatgtatgttattaagcctccaggttcatgattaaataattttaacatctttttccatgctctatttcaatgattattaatgaagctagcattctattttgtaatattattttcatgtatttagaattaattccatttacaggtttcggtggtcaatgctatccattaatttcatttttctgagtctaaagttctagaattatttttgttcttgaaggtttaatcatagttttattgctttcttctaggactaaaattcaaaatgtattttattgctccttaaatctgtctttttcccagtgtatttctgcattacccataacttgactgagcgaaacatgactgtcttataatctttgcctatttctgtcttaaccccctctttttttgtcaatatgttgtagaatctagaatttcagtaaagaaagcagaaacctgacttatgtatccttctgcatttgcaactgcttgtggtttttttgttcatttttgtttaatgttccctccttttgtaatttttgaaattttgggggggattcataaaatttataattttatcagcctatgcttatttttttccttttccttgaattttaacgtggggtctttacaatctataaatctaattttccttcaaccaaaggaaagatattctgtcatttttttgtaaattgtcaatattgaacatcaacatgttgcaaatatgttctgtccttcatatttattcatatatcatcacatttgcttctatatttttaactgcattttmagagttcttgtcttttatctcagttaacaatttacccttctgttttaactgattatattacagtttttaaatttataacttatgtgtatttatccttagatttttttttttcttccaggtctcatatggtttcttgtgactgaatctagttgttcatctcttgattcagtctatactttcttgaattttactcaatttacgtatctaattctatccaaattttatttctaatttatatttttattgcattttacttcaaaggttaattttcttctatacattatcattttctcacccttcttttgtgtatattttattaccattgttattgccaaagaaggggagagtggaaaagagagagagaagaaaaggaaagctatcaatacttttatagagcaatttgcaaggattgtgtttgtaataatcaccatctacgttaaatatgtttagttttttttttttttaaggtggccagatagattaacaggctgtatatgaaagagtcagaatatcattccagtagaaactcaccttatttcattctgttagccatctatactttatagctacatagtatttgatatatggaatgtgatctataatgtgtggtgtaactatgtctactcttttttctgaacttgcttcttatctcatcaggtaaagaggtaaagagttaagaagccccatgcatacaaccttgcattctctgggcttcccttttagatgttttgttcagccttgcatccccagtgcttaaagtttccattgggtttgtgctatctgtgtcactgtctttcttctttcca

SEQ ID NO: 669419 - DNA, 1769 bp, Homo sapiens
ccataacattttctaaaaactagaaaggatacattacttaaaacaggacaatgtctgttttacaaacataactatcaaaaattaatatatattaaacatctttcacgtgagataaaaatgattttagaaaagtagtttgtgtttatttgctcctgtctcttgccttctcaattacttttttaaaaatgtaattaaatgtatgttattaagcctccaggttcatgattaaataattttaacatctttttccatgctctatttcaatgattattaatgaagctagcattctattttgtaatattattttcatgtatttagaattaattccatttacaggtttcggtggtcaatgctatccattaatttcatttttctgagtctaaagttctagaattatttttgttcttgaaggtttaatcatagttttattgctttcttctaggactaaaattcaaaatgtattttattgctccttaaatctgtctttttcccagtgtatttctgcattacccataacttgactgagcgaaacatgactgtcttataatctttgcctatttctgtcttaaccccctctttttttgtcaatatgttgtagaatctagaatttcagtaaagaaagcagaaacctgacttatgtatccttctgcatttgcaactgcttgtggtttttttgttcatttttgtttaatgttccctccttttgtaatttttgaaattttgggggggattcataaaatttataattttatcagcctatgcttatttttttccttttccttgaattttaacgtggggtctttacaatctataaatctaattttccttcaaccaaaggaaagatattctgtcatttttttgtaaattgtcaatattgaacatcaacatgttgcaaatatgttctgtccttcatatttattcatatatcatcacatttgcttctatatttttaactgcattttcagagttcttgtcttttatctcagttaacaatttacccttctgttttaactgattatattacagtttttaaatttataacttatgtgtatttatccttagatttttttttttcttccaggtctcatatggtttcttgtgaytgaatctagttgttcatctcttgattcagtctatactttcttgaattttactcaatttacgtatctaattctatccaaattttatttctaatttatatttttattgcattttacttcaaaggttaattttcttctatacattatcattttctcacccttcttttgtgtatattttattaccattgttattgccaaagaaggggagagtggaaaagagagagagaagaaaaggaaagctatcaatacttttatagagcaatttgcaaggattgtgtttgtaataatcaccatctacgttaaatatgtttagttttttttttttttaaggtggccagatagattaacaggctgtatatgaaagagtcagaatatcattccagtagaaactcaccttatttcattctgttagccatctatactttatagctacatagtatttgatatatggaatgtgatctataatgtgtggtgtaactatgtctactcttttttctgaacttgcttcttatctcatcaggtaaagaggtaaagagttaagaagccccatgcatacaaccttgcattctctgggcttcccttttagatgttttgttcagccttgcatccccagtgcttaaagtttccattgggtttgtgctatctgtgtcactgtctttcttctttcca

SEQ ID NO: 669420 - DNA, 1501 bp, Homo sapiens
caatccatgcaacaaaaataaacaagaccaaaagagacaattatgaacaattataggcctctcaacaatagaatgagtaaatacatggtgttatattaaatgtataatacattgytataaaaaagaacagtatactgatacacactgcatagatgaatttcacaggcattatattgaataatcaatgtttataaaaataaaaataaatattactctttcgatggtttactgtgatctgacatacaggtggcttctctgggttctagaaatactctattctcatctgatatggttgttacactctcatagatacttgtgcttactgagttgtaaacattaaattagtgtattttactacatgcaatttataccttagtaaaacattaaaaataaagattttgtagtataaatgccattttctagtttgcataattcatggtatcatactgacatgtatgtatttctaatagtttaccaatttaaataactggtaacaaacttttgacagagatttttgttccgcattattacaagtgttgatgttattactgttttaagccatgccaaacttagcagcaattatttttataaaagtaaatctgattgataattctaatttcatttcttaggttagtggtgaaattattttttcaactatttattagctggctatttgtatatttttgtaaaatgactgtatccttcatccattttaatttttcactgatcaataggcattattacaaataataagtgtttgtatctttgtgttacagagcttgctttcccagtttgtcttttattccttgatattctctggtgtatgtttttaacagttttattggaatataatttatgtaccatgtaatttacccatttaacatgcaaaattcaacatatttttactatttattgtgagtgagaagtgacattatgttgtggttttttgtggcacttttttacataaagaagtatatatttgtagcaacttcatatatgtttctgaaaagttaactttctatttccaaatacttcttgctatattctatagcaatgatgtattcttgcctagaatttctaattatattgatatcttcaattgattggcttttaatgtctataactttgccttgtctatgattgtgatgctaatattaaaatactggtgcttatgtattcattttttaggggtacttctgctttcatttgtttgctgtttccttgtcttccttttaaatcataaactatctaatttagtttattttgcatttccttacaacaccataacttcctttcattttctgtccctttcttttgttttctgtttccagtattgcttcttttatttttggtaataatttcttttatggtgtttccttgatttctcaccaacctgatatcctcccctagatttttgagcttatcaaactatcttttagacctattatgttgattatcatatgtttgaataaatttcatgtaagaatctattaacttccaa

SEQ ID NO: 669421 - DNA, 1501 bp, Homo sapiens
caatccatgcaacaaaaataaacaagaccaaaagagacaattatgaacaattataggcctctcaacaatagaatgagtaaatacatggtgttatattaaatgtataatacattgctataaaaaagaacagtatactgatacacactgcatagatgaatttcacaggcattatattgaataatcaatgtttataaaaataaaaataaatattactctttsgatggtttactgtgatctgacatacaggtggcttctctgggttctagaaatactctattctcatctgatatggttgttacactctcatagatacttgtgcttactgagttgtaaacattaaattagtgtattttactacatgcaatttataccttagtaaaacattaaaaataaagattttgtagtataaatgccattttctagtttgcataattcatggtatcatactgacatgtatgtatttctaatagtttaccaatttaaataactggtaacaaacttttgacagagatttttgttccgcattattacaagtgttgatgttattactgttttaagccatgccaaacttagcagcaattatttttataaaagtaaatctgattgataattctaatttcatttcttaggttagtggtgaaattattttttcaactatttattagctggctatttgtatatttttgtaaaatgactgtatccttcatccattttaatttttcactgatcaataggcattattacaaataataagtgtttgtatctttgtgttacagagcttgctttcccagtttgtcttttattccttgatattctctggtgtatgtttttaacagttttattggaatataatttatgtaccatgtaatttacccatttaacatgcaaaattcaacatatttttactatttattgtgagtgagaagtgacattatgttgtggttttttgtggcacttttttacataaagaagtatatatttgtagcaacttcatatatgtttctgaaaagttaactttctatttccaaatacttcttgctatattctatagcaatgatgtattcttgcctagaatttctaattatattgatatcttcaattgattggcttttaatgtctataactttgccttgtctatgattgtgatgctaatattaaaatactggtgcttatgtattcattttttaggggtacttctgctttcatttgtttgctgtttccttgtcttccttttaaatcataaactatctaatttagtttattttgcatttccttacaacaccataacttcctttcattttctgtccctttcttttgttttctgtttccagtattgcttcttttatttttggtaataatttcttttatggtgtttccttgatttctcaccaacctgatatcctcccctagatttttgagcttatcaaactatcttttagacctattatgttgattatcatatgtttgaataaatttcatgtaagaatctattaacttccaa

SEQ ID NO: 669422 - DNA, 1501 bp, Homo sapiens
caatccatgcaacaaaaataaacaagaccaaaagagacaattatgaacaattataggcctctcaacaatagaatgagtaaatacatggtgttatattaaatgtataatacattgctataaaaaagaacagtatactgatacacactgcatagatgaatttcacaggcattatattgaataatcaatgtttataaaaataaaaataaatattactctttcgatggtttactgtgatctgacatacaggtggcttctctgggttctagaaatactctattctcatctgatatggttgttacactctcatagatacttgtgcttactgagttgtaaacattaaattagtgtattttactacatgcaatttataccttagtaaaacattaaaaataaagattttgtagtataaatgccattttctagtttgcataattcatggtatcatactgacatgtatgtatttctaatagtttaccaatttaaataactggtaacaaacttttgacagagatttttgttccgcattattacaagtgttgatgttattactgttttaagccatgccaaacttagcagcaattatttttataaaagtaaatctgattgataattctaatttcatttcttaggttagtggtgaaattattttttcaactatttattagctggctatttgtatatttttgtaaaatgactgtatccttcatccattttaatttttcactgatcaataggcattattacaaataataagtgtttgtatctttgtgttacagagcttgctttcccagtttgtcttttattccttgatattctctggtgtatgtttttaacagttttattggaatataatttatgtaccatgtaatttacccatttaacatgcaaaattcaacatatttttactatttattgtgagtgagaagtgacattatgttgtggttttttgtggcacttttttacataaagaagtatatatttgtagcaacttcatatatgtttctgaaaagttaactttctatttccaaatacttcttgctatattctatagcaatgatgtattcttgcctagaatttctaattatattgatatcttcaattgattggcttttaatgtctataactttgccttgtctatgattgtgatgctaatattaaaatactggtgcttatgtattcattttttaggggtacttctgctttcatttgtttgctgtttccttgtcttccttttaaatcataaactatctaatttagtttattttgcatttccttacaacaccataacttcctttcattttctrtccctttcttttgttttctgtttccagtattgcttcttttatttttggtaataatttcttttatggtgtttccttgatttctcaccaacctgatatcctcccctagatttttgagcttatcaaactatcttttagacctattatgttgattatcatatgtttgaataaatttcatgtaagaatctattaacttccaa

SEQ ID NO: 669423 - DNA, 662 bp, Homo sapiens
tcctactatcattaataatatttagcagctacccttgaataactgatcatttcaatttgaaacaaaattacctaacaaaagcacatttaaaattttctttcattattgaaattttttttctactgagttagcaagattactacacaaaaatagttgaagagttttcacagctacataatagaaaacaaacacacatcgaatgaaggggccaggaagatagataaataaaaatataatgtacatttaatatatactaaactaggtaccaacaatatgtcayataaacaattccatcatttgaaataaatatgtacatttaaaaattaaaataatttattagaattcaactttcttcttaaaggttaatattaatattgccacagtccttatattttaatatatttgtaaaatagatatcatagttccaccaattattttttaatttcttaaaaattttacttatttataaattataaaaaagagtagatgattatattgaggtactcacctacactactgataaaataattaaagatatgagtaattaatgcaatgggaaagaaatagaaaaatatcaaacttgatcactaaaatgaaaaattgtttcctcgaaaatacaaaaagcattatgaaccttagacaagtctaatgaagctccaagt

SEQ ID NO: 669424 - DNA, 662 bp, Homo sapiens
tcctactatcattaataatatttagcagctacccttgaataactgatcatttcaatttgaaacaaaattacctaacaaaagcacatttaaaattttctttcattattgaaattttttttctactgagttagcaagattactacacaaaaatagttgaagagttttcacagctacataatagaaaacaaacacacatcgaatgaaggggccaggaagatagataaataaaaatataatgtacatttaatatatactaaactaggtaccaacaatatgtcatataaacaatkccatcatttgaaataaatatgtacatttaaaaattaaaataatttattagaattcaactttcttcttaaaggttaatattaatattgccacagtccttatattttaatatatttgtaaaatagatatcatagttccaccaattattttttaatttcttaaaaattttacttatttataaattataaaaaagagtagatgattatattgaggtactcacctacactactgataaaataattaaagatatgagtaattaatgcaatgggaaagaaatagaaaaatatcaaacttgatcactaaaatgaaaaattgtttcctcgaaaatacaaaaagcattatgaaccttagacaagtctaatgaagctccaagt

SEQ ID NO: 669425 - DNA, 663 bp, Homo sapiens
cgagggaacaaagatgaggacgagccgccgctgtccccagaagctcatggcagagcagggtcacatagaaactgatcattatggccgagtgaggtggcttatgcctgtaatcccagcactttcggaggctgaggtgggtgaatttaagaataaaataygaaaagtgctttagtttaaagcaaaaagtttacgggaggccaggagtttgagaccagcctggcaaagatgatgaaatcccatctctactaaaaatacaaaaattagcgtagcatggtggtgcatgcctgtaatcccagctactcgggaggctgaggcataagaatcgcttgaaccccagggatgtaggttgcagtgagctcacatcacaccactgcactccagcctgggtgacaaagtgagactttgtctcaaaaaaaaaaaaaggaaactgttcattagcacacagggtgttccgctctgtcacggcagagcacagaggacagagccaaccaagcctgagggctcagggaggacttcttggaggaggtgatgtggagacaggaagtgaacttggtggaatggagttaaatagcatcttgggtacaggacctgagagtcacactgtgagggtctgcagcgggcgtgactaggacataactgggaacccagattcctcttggtgaa

SEQ ID NO: 669426 - DNA, 663 bp, Homo sapiens
cgagggaacaaagatgaggacgagccgccgctgtccccagaagctcatggcagagcagggtcacatagaaactgatcattatggccgagtgaggtggcttatgcctgtaatcccagcactttcggaggctgaggtgggtgaatttaagaataaaatatgaaaagtgctttagtttaaagcaaaaagtttacgggaggccaggagtttgagaccagcctggcaaagatgatgaaatcccatctctactaaaaatacaaaaattagcgtagcatggtggtgcatgcctgtaatcccagctactcgggaggctgaggcataagaatcgcttgaaccccagggatgtaggttgcagtgagctcasatcacaccactgcactccagcctgggtgacaaagtgagactttgtctcaaaaaaaaaaaaaggaaactgttcattagcacacagggtgttccgctctgtcacggcagagcacagaggacagagccaaccaagcctgagggctcagggaggacttcttggaggaggtgatgtggagacaggaagtgaacttggtggaatggagttaaatagcatcttgggtacaggacctgagagtcacactgtgagggtctgcagcgggcgtgactaggacataactgggaacccagattcctcttggtgaa

SEQ ID NO: 669427 - DNA, 663 bp, Homo sapiens
cgagggaacaaagatgaggacgagccgccgctgtccccagaagctcatggcagagcagggtcacatagaaactgatcattatggccgagtgaggtggcttatgcctgtaatcccagcactttcggaggctgaggtgggtgaatttaagaataaaatatgaaaagtgctttagtttaaagcaaaaagtttacgggaggccaggagtttgagaccagcctggcaaagatgatgaaatcccatctctactaaaaatacaaaaattagcgtagcatggtggtgcatgcctgtaatcccagctactcgggaggctgaggcataagaatcgcttgaaccccagggatgtaggttgcagtgagctcacatcacaccactgcactccagcctgggtgacaaagtgagactttgtctcaaaaaaaaaaaaaggaaactgttcattagcacacagggtgttccgctctgtcacggcagagcacagaggacagagccaaccaagcctgagggctcagggaggacttcttggaggaggtgatgtggagacaggaagtgaacttggtggaatggagttaaatagcatcttgggtacaggacctgagagtcacactgtgagggtctgcagsgggcgtgactaggacataactgggaacccagattcctcttggtgaa

SEQ ID NO: 669428 - DNA, 3204 bp, Homo sapiens
gttgtcatcaacttctgtcccttgccttccctgggagacctaacccagagccctatctcctcacctccaaacctttctccagctctgagtcaaaaggcccagaggctacggtgggtccagacagaggacaggctcctggctgggtcccaggcagtggacccatctcacactcttcccgtctttcactgcaaaccctgtggacgtttgattgtcagcctcactgcacatctggggtctaaagccaggaagggtgaggaacttgcagcccaagtttagaggcacgatttgaattgaggtctcttgactctcaggattatcagttttatgttccaagttagtgcatggctgcagggacccagcatccccaacagaggagaggggagggcaaaggctgaccctcattatgttgcacccacagggtgccctaagcagaggtgaggcaagaccctctgggctgcaatggagaacaaaggcccctgatcacagggggacccaggatagaagatggctatgatgccaaatgacaggctactgatcacatccccttgttggggacttggcttctgcatgtggacaatgtagagtaggttgcctctaagggatcttttagttgtcttgtcatcagacatggggccaggtgtctgggtatggcaggagaccctgggcaaggctgagtaggctacagctggggcttgcccaagttcccgtacctgacagtcgcttcaaaatggctgtagctggcgggatccaagactaactccctaagtagtatcaatctagtgttgtaggttcccagatgacatgcaaactccccacagcaaaggtaccttcgagagatgtggctctcctagtagtagtagagaggacttcctcacaaccgggtacaggaaagcacaaccgtaatcccagaactttgggagactgagcctgggctcaagaggatgctttgaggccacccttggcaacacagcaagaccctgtgtctacaaaatatttttaaaaattagctgggtgtggtggcttgtgcttgtagacccagctactagggaggctgaggtaggaggatcacttgagcccaggaatttgagttaccgtgagccatgattctgccactgcactgcagcctgggccacagagggagaccctgtctcctaaaaaaaaaaaaaaaaaaaaaaagaacaaaaaagaacttcctcccattcagaggtatcagaggctgccttggatagggagttccccacctctgcaggtatgcaagtgcagcccaggaagcaatttgttatgattcaggcatgcatggcaagttggcttaaataataaccccaaaagttgttttcagatccttggattctatgactgaatcagggacttggtgttcagagaaaacaaacagcttctgcaaggggtggaagagcagcaaagtgctctgcaaggaagggtctggggcgggaatgtgggaactgcccctcttcatcccagttgtcaaacatcgccccaagcaggctgctttcccctcctccctccgttggaggcaatctcaccttctctctctgaggaggactcagctggagtctggaggtctggggtttgggggtgatcagatggatgaagaactaaagttagggctttcaggccccagttttctcccaaccttctctgatctctgctcctgacatctgcctctgggcctcatctgctccccagtgatggctggggcaacacagaggaaggttttcattctcaaggctcttagtgcagttagcatgtggtgcacagcttcaagggctccgggctgtgcaaactagctctctcctgcccagccaatcgacctaaggatccccacatcacctaagaggaagtcccaactgggcagggcacctggagacctgggtcatgggcaggtcctgctgctggtatgacaggctattttccatggcaagtgttttccgcttccagttgcgagcagtggcaggcaagagtcccctgggtaacactttcatagtcttcacctggactagagaggtcctttctttgccaagaattttctagaaagccagagaggaaaggcaggcatactctgcctctccactggggtctggggagcagggcggcagaacaaagcccctcacattcccatcccccagccccaagccaagggttgagcaaggatagttgatgactccatgctctgccactctccaggtgactctgcgcaaggtgttgaattctttagctcaactttccttttctatagaatgggaagaatacccatctcacaggatagagtagttgtgagaatgaaatggcatgaggtgtgtggagcagcaggcaaggtgcctgacattcaagggacaacgaatgggcactatcattatttacagggagcgagggagacaggcatgacccatgcatcctctctgcctcctcctgggctcggctccaatgtgtcctctgctgatcacagagccccccagcccatcactttactcggaaccactggatagcacactgtgcatttatgcgcttcctgttggctgtctcctgtgtccatcctaaagctccatgtgctcgccctgtgcrttgctcaatccacaatgcaccgaaggctacctggcaatgagtatttacataaagaaggaatgaatagagggacggataaataaataaatgactgtgccctcaccatacagaccaagaagcacaggtgggagaagtgaagtctcagttggagcacatacagcgagtggacagtggctccagcagcattagcccaccccatgtgtgtcctccaaagccttccaggtgcgtagaagctgcttctctctctgccatgatcacccctggcactgggaacacactggtggttgggggcaagactacatcacctcctctgtgccagcctgttatgccagccacacacaggatgaggtgagaatccgctcattttatagattaggaaattcggtctccaagaggctaagtggcctgctcccacaatgacagcaagggtgcatccctcattcctaagccccaacgtggcaggggtgtcatgtaatcaacaaacgtttgtcactggctgtgccaagaatgtgctaggacccttccgctctctgctctacacagccgggtaaactgaagccaagacaaggcaagcgacttgctgtcacccaggactccccgcgtgtttgcacaaatcttagccga

SEQ ID NO: 669429 - DNA, 1649 bp, Homo sapiens
ttttctaatttgtacaaaggtgccctgggggtccaggtcatgcatagaaaattcctcaccaggcactcaccaggagcagaaccctatcatcctcctcctcctcacagtgactcctgctctaacagaggcacagaggcgcagaaagagggagttcccctgaggcagcaggagggcttcctggaggagggagggtttcggctgggccttgctgatcctgtagcaaccagtgattctggccacagcccgtgcctgcctgcctgactctctgcgaagggactgcagcctgctctgtgctgcggcccttcctcgacatggctggtttcttccctaggtctatctttggttcctgctgactcttccgtgacataaatgcaaatgagaccacagacaactagcctcaaagccaaggaagccgctggctggagttgtctccacagtcccctgctgggcagggaagtgggcagaggtgatggtcacgtccatccatcacggcccatcaggggrgcaggcctcttggggcccctgacacctccaagtggccaaaaaaaaggtcataccaggagacagagccttagactaaccaacaagagcttcccgcatggctgatgacagtttcccacgttctttcttaatcactgggaccttagttcaaaggtgatcctgtgtggagtcctgaaatgtaaagcagagtggtccagagcttacctcttgccctgaggtcttttcatcaaacctagggctccttagggcacagtagcttgaaaaccgctgacccacaggatgtgactcaaatttctaaagctctcacaactctcccctccttccccgtgacactgctctaatcccacctctgggtgtaccagatacctctcgctcctgccttggccctttagtattttgatactagctgctttgtcaaaactccttcaagaccccagctaggatactgcctcctccaggaagcttattctactatctgaatatttgtgttcctccaagattctattcatctgctcaaacctaaacccccaaggcgctggtattagaaggtgaggccttagagcagggattaggtcatgagggtaaagctctcatgaataggattagtgaccttataaaagaggctccagggagctgccttgccactttcacatgtgaggacatggtgagaagacagcaatctgtgaaccagacagcaggccctcaccaggcaccaaatcaactgatgccttgaccttggacttctcagcctccagaactgtgagctatacattgctgttgtttataatcacccagtctatggcagtttttatagcagcttgaaaggactaagagaattacttttatctcttccccccacccacatacatgtgagcagagtggtcccttcttcccctttctgtgctgtactctgtccttctacccatcacagccttcctcctgctgtgtctgaagcacccatttctccgtttgtcctacacacaaatctcagctccttcagggcctggtgtttttccccctctgcatttcctgggctggaccctcataggtaccccatcagaatctttcactgcagacccgtggcagccagcaggtgccatggctccctggactctgtgggtaggatttgggcaacttgaatgtgttta

SEQ ID NO: 669430 - DNA, 1275 bp, Homo sapiens
cttcattgtaattgtttctttaattatcaaccttctttgataaattgtaagatcactgagggcaggggccatatatttactgcgacctaagagtattttgcccataatctctactttgtacctgatacagagaaagtgcacaataaatattggaataacaattagtgattgaacaaaatcagagattgatagagatgagaaagagagagcggaagagagagaatattgtgcctgatgaaataggaataacagtacctaccatatgtcattatttctaggaaagaatctagcatagttttggacatgttaaaaggcatccaaaacatattagttgtcttttcccagcaataatktatgaatgtggtgctcatactcccaagactttccaaaagagctatattttaaagcagtttaattttttaaataaaagcaatttattcatatctgtaaaataatttttccacttttttggacattataaaataatgtcacaaatcaataagtttatgcatcacaatattgatctggacattggtaaaggcaagatacagtatatgaatggttaaaacagtgccctccagagccacactattcaggttcaaattctggcccagcaacttacatgggaaggtcacttaatttctccatatttcagtttgatcctctttaaaatggcataatctataatgcctacctcataagtgtgttataagaatcaaatgagcaatgtaggtaaagtgccctatacatgttacatattaaaaaaactcttataataaagatcttcatagttggtattaactatttgttggttgaattaaagaacacaaaatgtacattgccttgaacagaaacttggccaaatagccctgagaagtagaaaaggaagaaactgtattaagagctaccatgtgtcagttattgtaacagactgtattttctcaaattagccacaacagtattttcctatcttgtgtgttcttttgaaaacaatgtggctttggcactccagttgagaggtgagtcctatgttccctacctttgaatctggataggactgtgactagagcaaaggaaagctatatgatttcctaagctaggtcatacatggtaatgctggttccatctagttctcttgggaagctcatttctggaggcttgagccaccatgtaagaagtctgaggccactatgctatgagaaagcccaggccacatggagaagccacatgagtctactggctgatagcctccactgaggtccctgccactcatca

SEQ ID NO: 669431 - DNA, 1275 bp, Homo sapiens
cttcattgtaattgtttctttaattatcaaccttctttgataaattgtaagatcactgagggcaggggccatatatttactgcgacctaagagtattttgcccataatctctactttgtacctgatacagagaaagtgcacaataaatattggaataacaattagtgattgaacaaaatcagagattgatagagatgagaaagagagagcggaagagagagaatattgtgcctgatgaaataggaataacagtacctaccatatgtcattatttctaggaaagaatctagcatagttttggacatgttaaaaggcatccaaaacatattagttgtcttttcccagcaataatgtmtgaatgtggtgctcatactcccaagactttccaaaagagctatattttaaagcagtttaattttttaaataaaagcaatttattcatatctgtaaaataatttttccacttttttggacattataaaataatgtcacaaatcaataagtttatgcatcacaatattgatctggacattggtaaaggcaagatacagtatatgaatggttaaaacagtgccctccagagccacactattcaggttcaaattctggcccagcaacttacatgggaaggtcacttaatttctccatatttcagtttgatcctctttaaaatggcataatctataatgcctacctcataagtgtgttataagaatcaaatgagcaatgtaggtaaagtgccctatacatgttacatattaaaaaaactcttataataaagatcttcatagttggtattaactatttgttggttgaattaaagaacacaaaatgtacattgccttgaacagaaacttggccaaatagccctgagaagtagaaaaggaagaaactgtattaagagctaccatgtgtcagttattgtaacagactgtattttctcaaattagccacaacagtattttcctatcttgtgtgttcttttgaaaacaatgtggctttggcactccagttgagaggtgagtcctatgttccctacctttgaatctggataggactgtgactagagcaaaggaaagctatatgatttcctaagctaggtcatacatggtaatgctggttccatctagttctcttgggaagctcatttctggaggcttgagccaccatgtaagaagtctgaggccactatgctatgagaaagcccaggccacatggagaagccacatgagtctactggctgatagcctccactgaggtccctgccactcatca

SEQ ID NO: 669432 - DNA, 1404 bp, Homo sapiens
tcatctcattagtattgataataatataaatatctactagtaaaagcaaacatttctccttattttttggcatttttaaagaaccaagtgagtcatttgttttatcttacaataatttaaaaaatatacagtaatgaagttttcatctcttccaatgacacagatgaattttcatttactttttaagctaactttgaataaagatgatttaatcaaaagcagggattttttttttttcccccaatctctaggagttacaaaaggagaaaaatgagtgctagctgtctaatataaactgtaataccaggttgaagcattgctgtacttcatttttcagttcctaaaatgaaagaaataacaaaggaaataccaaagagaagagcaatatacctggctaaggaagacagtacaaagctacagtaacataaattaagaaacaatgttacctttggtttttaaaagttttaccttctccaagttcagaccagactagacaagatctgttctagctataaaatcttattttaaacatttgaaaggatttaataaacattgatttttttttaatgcaggaaaatgtttttaaaacagcagaaatattttactgaattgtatcaattacataggaagccaccctggctgtattcttcaacatggcaagttgaaatayacaaaaactgtctgtaatacaaaacacaagctcgtgattagaatttgttttgtcaatttcttccaggatgatgtttctactggcaaattatgttgatttggaaactgcattaacctggttttaaaacagtgattatgtttcaacttccaccatctacccccagttgttcaactttgaattaattatggttattaacccactctaagaaattaatgctctagtaatgcagaggctggttaaggttcaacaaaaaatgtattcatttatccaggaaatatttactgacctcttacatgcaaggcttcatgtgtaatactgaagttttacaaagataaatctgttcgcactttcaaggtgattacagttcagtagaaattagaagatcattttcaatcataaaaaaaagcatttgacttaaaagacatacagacgaagaaggcagtgagatatataatattcatttttactggtaataataattttaaattttgcaaagtaattatttatagtaataatgttgactttttaaagcattcctgaaagtctgacctggaattgggtaaggaggtcatgaaaaaggtggttattatggagatttcagaaactaaaggacttctgaataaagggaaaatgttaatattatctgatttttagcctctcactatggccctaattaaattttttattttctttgctactctcctctaagcttaattacttgatgttgactaacc

SEQ ID NO: 669433 - DNA, 646 bp, Homo sapiens
ctggtgacagagcaagacattgtctcaaaaaaaaaaaaaaattattcattgtcttgtctctcattggtcaaaggctcattgtacagtaggctagctcccctctcttccaggttgcatgtgcatggttgctgggcaagtgttgtgacctcagtgtcaacagggaatccccagagcaggargtaagaatgaaagatatatagagtgatatatctatggatatatcactatagtggaggaatttagtttataaagcacaaatatatctattgcactgattggagcccacaagacctggtcagtgcaagtggttgccaaaatcaaaaagtagcaaagccccaagaaacaggtgagacaaaaggatctgaagtagcacatgaatggtatgcaattttgtgagttaacgtgatacccacagtggaccagcggttcctctaacctgtggtttggtctctagcagttgcatgaaaggctgtggtaatagttgaaatagtctcaatagaagaaagttaggataaaaatccaaatcataacaatcccatcatccttgaatgtatctaactcttgcaatgcctttatagttgaggattacaagcaggaagaatccacatcactttccttgtcagtttatccttaaccttgtgggtta

SEQ ID NO: 669434 - DNA, 1803 bp, Homo sapiens
tctgtgtctattattggcccacaatttaatatttcagatagacatattttacagtttcatctatcatggaataaaaatttaaagctagcagtaacctcagagatcatttcggccaatccatcacttttatagcagaggtgaaatgagtacctgtggtcataaacctagttaacaatatgtccaaaacttctgtttcacaacactcagctctgtgttctttctattctgccatgaaccagcttctgctggttaaaaaggtccctcagttgattccattactgagcctccttatattccctttatgcactatttggataaaatcggctacttcatccaaaaagatccctttctttccttaaacatgcttatatctttagctctaaccatagtaagcattatagttggattctttttcccccagggatagaattgcttttagaaggaaaggtagaaaaaaaggagatattttcatttgaaattaggtttcctgaagcttcctgttattacgaaagcttcaggtaattagaatgaaaacagaaaaaaaaaatgctctcttgctaactctagagattaatgctggagattaatgcctgtgagagctgactgcagcttgaaatttttagctccacacacgtatttgatgaaattgtcgcatggccaatatgtgagaagcaaatatttattgtcagaaatagtccagtctctcttgacttcctttagcttccggcagctgggcaaaatacattttcacattgaattaaaacaaaaataatgctttttgccagattgttgtgactcacatatcataagattgaaaagaaggtcatggctaggttttcgtcaataccattatttgaaaattaagtcattctctgttcttttccataagcagttyatatgagttgattctaaccagagattaaaatgttaaattcaattctaatacaattttccttggattttatatcaaagttcatttctgaaaatcaagcatacaatttgactttctctggttagcttgtatttactatgattacacattttaagagctatgagcaaaacatgaactaagtatgcattctttgaaaacttactagggcttacagagaaggtataaaaaatagtcagattatgaatagttcaggtaatggtaaattctgaatagtttcggtaaaatcagacttgtggcatttggatcatgaagtagacaaaataaccctaaaatacttctttcaaaaactcccctccatggtgtgtaataagtggcagttatcttggtatagaaaatctattttattaacccatagaaagcattattaacccacagaaagcattctacagcactgaaccttttagatctattttattcgtgacctttatcttcactaaattcttgagtcggtgatgtatttatagagggcaccaaatcttttaatatgtctcctaatttttctttcttcttatatgacagcatcttcgggtgaattattgttaaaataatactttgaataataataattctgaaattgtattcacacattaatcatgatgggtaggttataagtatatgtatcatcatttgcaaacacttattaaacacccattgtgatatattagctgaggttcacagattttctgaaataggcaattaaagttaaggagggtaagtaattcttgtgcattctaggattgttgatagctatccatggagcagtaataaaggttttcatgttctacacttactatatgccaattgctatttaagtgctttgcatatgctaatttacctcacaacaacctgca

SEQ ID NO: 669435 - DNA, 593 bp, Homo sapiens
gaagagaaaatattggatgataaagtctagtagtatcaaccagaggattaagatgaagctaatttaaaattacttggaatgagaatggtagctcaactgaaaatattaaaacaaattaaaataaaatagttccaaatgaaatcatgtgcttaaagaatctctttttaaatcatgttagagtggttggttttcttttttaaaaaatttagttttttaaaaaagtattaagtgtattttaaaaattattattattgatcaaattcagtatttttacagtgaaaggccattattataatctgatccatagatttcaaattccaagagtccacaaaacaaaacwgcactgttcagtcacccactgttatcatcccatttcaagaaactcccagaaatctaaatatgtgggaaatgtcatctattctttcaactacagatgtggtcctagacaggagacttgagaatggcctgtgtgcaaaagacaaacacagaaatgaaagctgttgattttctagtagatagattcatagcaatagctaaaatgttatatttccacagcagccttatatgtaaagattaacacataaaattctcag

SEQ ID NO: 669436 - DNA, 670 bp, Homo sapiens
tggttcctaacttcaccaagaacaccattaataagagggtctatrtataattatttcatctacctatttacaagcattaaagtctcagaaactatccttttctactcaactgaactctctaacagaaaatactgttaatctgatgtatgctctttaagaacaaaattgtatacaggaaattggtgaattccactctattttcaaaatggcagtaaaatgtcagtttggaggagtatctaggagtgtaaaactgtacatacgcaaacagattagacagagaaaaagtaaggcattgtttcctccacttctaaaggttatcaaaaacactgatacaatcccaaagttcatcaattgctacattaatgctgaacatgtttaatttacattttaggttctgttagagcctaaatatacttgtctaaacaggacatctgttttggttataatacattgtatctttggcaagaacttaaaactaacaaaaacaatcaagaatctttattggatctggcaacaaaagcagatttgtaaccaaaaatcttaaaacaagaaatgaccatcactgggctttaggccatttctaatctaagtcaataaacaaagatctgcaagaggggctacagtgagggggtggggtaactcctgcagatatttaaattggacttacgaa

SEQ ID NO: 669437 - DNA, 670 bp, Homo sapiens
tggttcctaacttcaccaagaacaccattaataagagggtctatatataattatttcatctacctatttacaagcattaaagtctcagaaactatccttttctactcaactgaactctctaacagaaaatactgttmatctgatgtatgctctttaagaacaaaattgtatacaggaaattggtgaattccactctattttcaaaatggcagtaaaatgtcagtttggaggagtatctaggagtgtaaaactgtacatacgcaaacagattagacagagaaaaagtaaggcattgtttcctccacttctaaaggttatcaaaaacactgatacaatcccaaagttcatcaattgctacattaatgctgaacatgtttaatttacattttaggttctgttagagcctaaatatacttgtctaaacaggacatctgttttggttataatacattgtatctttggcaagaacttaaaactaacaaaaacaatcaagaatctttattggatctggcaacaaaagcagatttgtaaccaaaaatcttaaaacaagaaatgaccatcactgggctttaggccatttctaatctaagtcaataaacaaagatctgcaagaggggctacagtgagggggtggggtaactcctgcagatatttaaattggacttacgaa

SEQ ID NO: 669438 - DNA, 1322 bp, Homo sapiens
gcgagcccgctagctgatgactgctcattactctccctttggggagacctgggctctgrcataaggagagctggggcagcccccttagtgggtaaaggggaggcagccccctaagtcggtaaaggggacaggaggacaggctactgcagggtccaggaaggaaaagccacatccaatatcaggcccaaagaggcctcaccccaaggcaggtcagaacggccttagccagggccaggaccagggcgagacaggaggaatgctgttccggggttgtagggaggccttctctgaggccccctgtccctcatcagggtcacagccctgggggatggaggggacggtcccctccccagtcctcaaacctgcccccttggaatggcactcacccagggatgccgccggcctccatcttgttggctacagtgacatcagtcgaccacacgtcgtactgccagcgcttctggcccaggacgccccccagcacggtgcccgtgtgcacccccacacgcatgtccaccccagtcttggtcttctcccgcacatacctgccaggtacacacagaaaggagggtcagggtgtggccttcacgaggcagccagctgcccctgctcctgcaggagaaattcattgtgggcctcttcccctccacaagagggggcctggcaaggtccccacagcttggtgttgggtggggggtaaggcaggccagggccagcccagagtcaggcatcacaggccagcaggacgagggcaccaagcgactttcctccctatccccacttcccgaggggcctcagtttctctctgccaattactcttttattcattcgtgcagttaatatttcactgagcatcaagtatgtgccaggcacgttcaaggtgctgcagacacagaggtgaagaaaatagccgtgaacagccccctgcctgaacgtgtctgacagggcagggagagaatgttagagttcctggactaccacccctggggtaaaggccacactgctttctttccagggcaatactagacgggctttaacctggaagatggtaaaaatgcaaagccgccccctcggagaagggggtaaagagcaggcaacttcctggactccatcccatgggggaggggcctcggcaggagcttccctttccgtgttggtgcctgatgtcaccccgggtcccgcagaggctggaagtcaaccagagggactgcccatccgagagctgcaagcccacttggagcaggggcaagagtaggggacagtgagggcaggagagtttgcctccctcacagcctaaggctggagcacagaggccggggtgg

SEQ ID NO: 669439 - DNA, 967 bp, Homo sapiens
gacggcgtggtcctcccggtagtcgggcaagccgcagatgcagtagtagcagtcgcccaggatcttaatccgcagctggtggtatttctgaaaggggagggcctggcctgtgctccagcccctcctcagtgagggaggagtggccaagaaagcagaggaaggacagtgggagaaaatcatggggccggggatgggggccaggcagaggccatgagggcaggccccgctggagagccaggcggggccagggacttacagctgccagcttgtcaaagcgggcaaagagctcgttgagcagcttcacaagctcctgggcactgcaggcaraagacagctgggtaaagcccacgatgtcggcaaagaggatgctgcatgaggaaggaaccgtgggggtgacgctccaggcagccaggtgtacccgaccccactgccagctccctctccaacccacagggcagccaggatcagggcaggagaaggtcctccctcacgacccccagacagtgagaccctgacccttccaggtaaagtcagggctctgaccttgcacttgtcctagcagacttcccctgcaggcctccctccctgtggtgcctggggaccaccccacactgcccactcctgcccaggctgaactcatccttcttcctagaatcacaggtcagggctctagccccagtgctggccctcaacagctgggtgacctcacaggagtcccttccccgctccaggtgatatctgttctatgatggggttggaccaagcagcctagagcacactgtagcttcaacatctgctggcagcttcctccgccaggctgatgaatgctgtgggaggccttgcttctagtccctggaaaacctcttgaagcccacagcacctagcgggtcccacaaagatgcagccctccacagcctgctctgccatcagagcccgcgccccgggccggcgtacctgacgttctcgt

SEQ ID NO: 669440 - DNA, 758 bp, Homo sapiens
gtagagatgagtttcgccacattggccaggctggtctcgaactcctgacctcaggtgatccacccgccttggcctcccaaagtgctgagattacaggcgtgagccaccatgcccagctggaaggagactttatactctgcaaggatgtggctgtgtgatgcttttgcgggggagtgaagaactagggccagctgtcttcctcagacctcatctaaagcagctacctagtcactttctaccacttttattctcttttgagctctgatatgcttacrtttgaaatattatttctgctaagagcttgacaagggtaaggtcacagactcgtcataacatgtggacctccacaggcagcagaggcaggctgttttggttggagccttggatccctgaaatagcacatcttatagggaggactggagagaggcccattgtgattggagggaggggagcctgttgaggagcaaccagagtcaagacagtagagcctggggccaaggccgccatgttccgtgtctggggaagccatcacgacagatctgtgtagtggcacccctggcagtgcgcaacctgagaagctgctctagctgcctggcagatcatgagggacctggcctaacatgtcagatgggctggatgcctattctggaagtcctctttgttttggaagagggtagactttgaacatctcttaccaaaggcatgcacaagttataagcagaaagcttctggaggcccctttgttttgaggcacatgg

SEQ ID NO: 669441 - DNA, 758 bp, Homo sapiens
gtagagatgagtttcgccacattggccaggctggtctcgaactcctgacctcaggtgatccacccgccttggcctcccaaagtgctgagattacaggcgtgagccaccatgcccagctggaaggagactttatactctgcaaggatgtggctgtgtgatgcttttgcgggggagtgaagaactagggccagctgtcttcctcagacctcatctaaagcagctacctagtcactttctaccacttttattctcttttgagctctgatatgcttacatttgaaatattatttctgctaagagcttgacaagggtaaggtcacagactcgtcataacatgtggacctccacaggcagcagaggcaggctgttttggttggagccttggatccctgaaatagcacatcttatagggaggactggagagaggcccattgtgattggagggaggggagcctgttgaggagcaaccagagtcaagacagtagagcctggggccaaggccgccatgttccgtgtctggggaagccatcacgacagatctgtgtagtggcacccctggcagtgcgcaacctgagaagctgctctagctgcctggcagatcatgagggacctkgcctaacatgtcagatgggctggatgcctattctggaagtcctctttgttttggaagagggtagactttgaacatctcttaccaaaggcatgcacaagttataagcagaaagcttctggaggcccctttgttttgaggcacatgg

SEQ ID NO: 669442 - DNA, 624 bp, Homo sapiens
cagaacgtcataggtctctgtgggcgacacggacactgcaccctgagcagctttctcttgctcagcttcttctccacagttccagagtgttctggaaccttcaggctggaatgagcttataggaagagattggtttgggcaagagagccaccaaaccgcctccagtggggtgacttccactcgacagtcccacttagagcagccccatttccctacgggttgttagcaaacgtgaaggatcttgcgatgcgtaaacttccaggagggaggattttgtaaaggaatgttctcatggttgcgttctgagccgggatattagaaacactttatyaggctgtcatgggttagatgacactttagtccaagtgtttatccatttgggagatgcattttattattctaaaaatgttgtatattttaaaaaagcagaacaattcttttgaaataagttatttccaggaaaactttaggattaagaaacttgtaaaaagatctataaatagagaccccaggggctgtggacctctgtcaccacagagcctgatcgtgctgtgcagtctaaaggggaccacggggcaagaagaggtgactttggtggtgtccagagcaggcttctcaacctca

SEQ ID NO: 669443 - DNA, 624 bp, Homo sapiens
cagaacgtcataggtctctgtgggcgacacggacactgcaccctgagcagctttctcttgctcagcttcttctccacagttccagagtgttctggaaccttcaggctggaatgagcttataggaagagattggtttgggcaagagagccaccaaaccgcctccagtggggtgacttccactcgacagtcccacttagagcagccccatttccctacgggttgttagcaaacgtgaaggatcttgcgatgcgtaaacttccaggagggaggattttgtaaaggaatgttctcatggttgcgttctgagccgggatattagaaacactttatcaggctgtcatgggttagatgacactttagtccaagtgtttatccatttgggagatgcattttattattctaaaaatgttgtatattttaaaaaagcagaacaattcttttgaaataagttatttccaggaaaactttaggattaagaaacttgtaaaaagatctataaatagagaccccaggggctgtgsacctctgtcaccacagagcctgatcgtgctgtgcagtctaaaggggaccacggggcaagaagaggtgactttggtggtgtccagagcaggcttctcaacctca

SEQ ID NO: 669444 - DNA, 622 bp, Homo sapiens
ctgggtgacaggtgagatcccaactcagaaaaaaaaataagaaaagaaaagaaaggaaaaatgtttcctggaaaagagctaaccctgacttgattttggtaggggtgggagaagcaaaaaaaatttttttttcagtagcaagtccataagatacagatgttcaaagacattcttttacgaaacagaagttatcttggctcccacgctcacattttcaccaaggatgggaaaacttaaaatttgcctcttaaggtaagttagtcacttctggttttaaacacaattaactcaagattaaaactcagtaaatgcaagatcatctccccctcacatttctgctcccctctttccccccaggagagatctaaagttggggtgggggtgcctcacctctcgttctggccaagagtaacgttttctgtccacttgccatcccctaccctcacagccttggctgcctctagctggtcctactggtcgatctcccactgatgtcattggtccctccgtggcctccagactgaagrtatgagcactggtcctcctagttgtccaggctggccctaggcctccctgctctgccccctgccccctggaggattggtaactctgggccactttc

SEQ ID NO: 669445 - DNA, 621 bp, Homo sapiens
ttttatagtttgaagtatctttgttccactgtttattatattctagatttggtgaattgagccctcagaatttaatctttaatatttctacattttgacctatcattgtttccctcgtagtccttttgttcattttttgtaaayattcaagtgcttcaaattatcttatactctgtttattgcagttttgcctaaaagctaaaatgacaccttccctttcttaattagttcatgatactttgaaaggatgaggtttctgcagcattacaatatggtctggtatttgagttcattttgtcagtttctatctgaacatttttacagtgaggtcccttctttctagatctaactctttaccactgatctgcttatttttctggcaaactgtttttcttagagtttttttttttttcttctctaaatagactgaaaagacgagggaggttttagtatatcaagtccaaaatcaccacccactttcagattctaagaaattctgggcttttagtgagaggacagtccataggtggagtgacagcaaacaatgttttgactctctgttcatgagaccaagtttgagcatgccatgaggtgatgactgagcaaatccttcagttttca

SEQ ID NO: 669446 - DNA, 652 bp, Homo sapiens
gttaagactttggggagactgataggaagacatgattgattttgaaatgtgaaaggagcatgagatttaggaaggaccaggggtggaatatggtttggctttgtgtccccacccaaatctcaactggaattccaatccccaggtattgagggagagagctggtgggaggtgattagattatgggrgcagttttcatcatactgttctcatgatagtgagttctcaagagatctgatggttttataaagggctcttccccctttgctctgtctcctgctgccttgtgaagaaggtgtttgtttgcccttcacattctgctgtgattgtaaatttttggaagctttctcagccatacagaactgtgagtcaattaaacctcttttcttaataaactgcccagtctcaaggaagtcatttatagcagtgtgaaaatggactaatgcagctactgtgcctattacctgggaaatgaagtgctatgtacatgaaatccctgtggtacacaatttatttgtataacaaacctgcattgaaaataaaagtttaaacaaaagtagaaaacatcaaagtctgatatgtgtttagatgagcatgttaagtgtgaatgcattgcacaaggcactctcatttttcaatatctcttacgaaaagc

SEQ ID NO: 669447 - DNA, 652 bp, Homo sapiens
gttaagactttggggagactgataggaagacatgattgattttgaaatgtgaaaggagcatgagatttaggaaggaccaggggtggaatatggtttggctttgtgtccccacccaaatctcaactggaattccaatccccaggtattgagggagagagctggtgggaggtgattagattatgggggcagttttcatcatactgttctcatgatagtgagttctcaagagatctgatggttttataaagggctcttccccctttgctctgtctcctgctgccttgtgaagaaggtgyttgtttgcccttcacattctgctgtgattgtaaatttttggaagctttctcagccatacagaactgtgagtcaattaaacctcttttcttaataaactgcccagtctcaaggaagtcatttatagcagtgtgaaaatggactaatgcagctactgtgcctattacctgggaaatgaagtgctatgtacatgaaatccctgtggtacacaatttatttgtataacaaacctgcattgaaaataaaagtttaaacaaaagtagaaaacatcaaagtctgatatgtgtttagatgagcatgttaagtgtgaatgcattgcacaaggcactctcatttttcaatatctcttacgaaaagc

SEQ ID NO: 669448 - DNA, 652 bp, Homo sapiens
gttaagactttggggagactgataggaagacatgattgattttgaaatgtgaaaggagcatgagatttaggaaggaccaggggtggaatatggtttggctttgtgtccccacccaaatctcaactggaattccaatccccaggtattgagggagagagctggtgggaggtgattagattatgggggcagttttcatcatactgttctcatgatagtgagttctcaagagatctgatggttttataaagggctcttccccctttgctctgtctcctgctgccttgtgaagaaggtgtttgtttscccttcacattctgctgtgattgtaaatttttggaagctttctcagccatacagaactgtgagtcaattaaacctcttttcttaataaactgcccagtctcaaggaagtcatttatagcagtgtgaaaatggactaatgcagctactgtgcctattacctgggaaatgaagtgctatgtacatgaaatccctgtggtacacaatttatttgtataacaaacctgcattgaaaataaaagtttaaacaaaagtagaaaacatcaaagtctgatatgtgtttagatgagcatgttaagtgtgaatgcattgcacaaggcactctcatttttcaatatctcttacgaaaagc

SEQ ID NO: 669449 - DNA, 652 bp, Homo sapiens
gttaagactttggggagactgataggaagacatgattgattttgaaatgtgaaaggagcatgagatttaggaaggaccaggggtggaatatggtttggctttgtgtccccacccaaatctcaactggaattccaatccccaggtattgagggagagagctggtgggaggtgattagattatgggggcagttttcatcatactgttctcatgatagtgagttctcaagagatctgatggttttataaagggctcttccccctttgctctgtctcctgctgccttgtgaagaaggtgtttgtttgcccttcacattctgctgtgattgtaaatttttggaagctttctcagccatacagaactgtgagtcaattaaacctcttttcttaataaactgcccaktctcaaggaagtcatttatagcagtgtgaaaatggactaatgcagctactgtgcctattacctgggaaatgaagtgctatgtacatgaaatccctgtggtacacaatttatttgtataacaaacctgcattgaaaataaaagtttaaacaaaagtagaaaacatcaaagtctgatatgtgtttagatgagcatgttaagtgtgaatgcattgcacaaggcactctcatttttcaatatctcttacgaaaagc

SEQ ID NO: 669450 - DNA, 652 bp, Homo sapiens
gttaagactttggggagactgataggaagacatgattgattttgaaatgtgaaaggagcatgagatttaggaaggaccaggggtggaatatggtttggctttgtgtccccacccaaatctcaactggaattccaatccccaggtattgagggagagagctggtgggaggtgattagattatgggggcagttttcatcatactgttctcatgatagtgagttctcaagagatctgatggttttataaagggctcttccccctttgctctgtctcctgctgccttgtgaagaaggtgtttgtttgcccttcacattctgctgtgattgtaaatttttggaagctttctcagccatacagaactgtgagtcaattaaacctcttttcttaataaactgcccagtctcarggaagtcatttatagcagtgtgaaaatggactaatgcagctactgtgcctattacctgggaaatgaagtgctatgtacatgaaatccctgtggtacacaatttatttgtataacaaacctgcattgaaaataaaagtttaaacaaaagtagaaaacatcaaagtctgatatgtgtttagatgagcatgttaagtgtgaatgcattgcacaaggcactctcatttttcaatatctcttacgaaaagc

SEQ ID NO: 669451 - DNA, 652 bp, Homo sapiens
gttaagactttggggagactgataggaagacatgattgattttgaaatgtgaaaggagcatgagatttaggaaggaccaggggtggaatatggtttggctttgtgtccccacccaaatctcaactggaattccaatccccaggtattgagggagagagctggtgggaggtgattagattatgggggcagttttcatcatactgttctcatgatagtgagttctcaagagatctgatggttttataaagggctcttccccctttgctctgtctcctgctgccttgtgaagaaggtgtttgtttgcccttcacattctgctgtgattgtaaatttttggaagctttctcagccatacagaactgtgagtcaattaaacctcttttcttaataaactgcccagtctcaaggaagtcatttatagcagtgtgaaaatggactaatgcagctactgtgcctattacctgggaaatgaagtgctatgtacatgaaatccctrtggtacacaatttatttgtataacaaacctgcattgaaaataaaagtttaaacaaaagtagaaaacatcaaagtctgatatgtgtttagatgagcatgttaagtgtgaatgcattgcacaaggcactctcatttttcaatatctcttacgaaaagc

SEQ ID NO: 669452 - DNA, 685 bp, Homo sapiens
ggaggggagtgagtaccccattcctccctggataagggacataggagagccagggcatccctgcagatctttgctgtcccctggaggccagagtggccagagcagctggagyagcaagctttctgagggcatcccctgagaaagtgggctgcggtcacctggtgaccagggagacctctcacccagcgctgggattttctggaaccagaagaaacagagaggaattcagaaaagaggaaagggaaactcatccactaattggagaccagtgttggatgtgatgtccaacaatgggatcaatccttgctggagctgcttggaaagaggaagaaagaaaaagaggacggagagtttgaccagggtctggaggttagcccagggccagagaagaagagagaataaggcgaatggggctgggaacagggagtccactctggatcaggaagcaggcccgggtctagtttttgctgtttgctactttccaggttacaagagaagacttacaccttagaacccaatcctcatacctggtttcagcaccaaaatgttaggttttgaagggaaggtgagggttaaagaaagacacacacacagaaagagcttcacagcaaatgcaggctttatgtccaggataaaacctacagaagtgggggaccagcctatgtcagtgcccgctgctgcttac

SEQ ID NO: 669453 - DNA, 685 bp, Homo sapiens
ggaggggagtgagtaccccattcctccctggataagggacataggagagccagggcatccctgcagatctttgctgtcccctggaggccagagtggccagagcagctggagcrgcaagctttctgagggcatcccctgagaaagtgggctgcggtcacctggtgaccagggagacctctcacccagcgctgggattttctggaaccagaagaaacagagaggaattcagaaaagaggaaagggaaactcatccactaattggagaccagtgttggatgtgatgtccaacaatgggatcaatccttgctggagctgcttggaaagaggaagaaagaaaaagaggacggagagtttgaccagggtctggaggttagcccagggccagagaagaagagagaataaggcgaatggggctgggaacagggagtccactctggatcaggaagcaggcccgggtctagtttttgctgtttgctactttccaggttacaagagaagacttacaccttagaacccaatcctcatacctggtttcagcaccaaaatgttaggttttgaagggaaggtgagggttaaagaaagacacacacacagaaagagcttcacagcaaatgcaggctttatgtccaggataaaacctacagaagtgggggaccagcctatgtcagtgcccgctgctgcttac

SEQ ID NO: 669454 - DNA, 685 bp, Homo sapiens
ggaggggagtgagtaccccattcctccctggataagggacataggagagccagggcatccctgcagatctttgctgtcccctggaggccagagtggccagagcagctggagcagcaagctttctgagggcrtcccctgagaaagtgggctgcggtcacctggtgaccagggagacctctcacccagcgctgggattttctggaaccagaagaaacagagaggaattcagaaaagaggaaagggaaactcatccactaattggagaccagtgttggatgtgatgtccaacaatgggatcaatccttgctggagctgcttggaaagaggaagaaagaaaaagaggacggagagtttgaccagggtctggaggttagcccagggccagagaagaagagagaataaggcgaatggggctgggaacagggagtccactctggatcaggaagcaggcccgggtctagtttttgctgtttgctactttccaggttacaagagaagacttacaccttagaacccaatcctcatacctggtttcagcaccaaaatgttaggttttgaagggaaggtgagggttaaagaaagacacacacacagaaagagcttcacagcaaatgcaggctttatgtccaggataaaacctacagaagtgggggaccagcctatgtcagtgcccgctgctgcttac

SEQ ID NO: 669455 - DNA, 1345 bp, Homo sapiens
tccttaagcctttgccttaacttgatcctgatttcttccctgaggccacagcttctcctggatttctgcgtgcattttctaccatgacctggccacttggcttatgatgtggggcagactcccactctgcctctgccggcccccaacacacactgtcacttccagcactgtcatttaattcttatgttaaaacaaaaagctttcctgtcttaaggaccaagccttaaatcactctccctcccctcggccctgacatttgtagaccttttgtttactcatcaaactcttgccctaattctgggccaattcagtatttgaactaatgatacattatttgaaactgtagcctgccagtgtcatgatcattgcacctctaaaggcctcctgtccttattccccactctcttaattgctttttcatcacatgcaggctgcagattcatgatgccttcaatctgcccggtccatcagctcctcctgtctcccttgcctgcccagcctcatctcagttctgatcacttgaaagatacttgcctctgtaccttcctcttgctcttggcaaaaatctagatcctggatccacgctacagttttctttgtctggttttatacccatgaagctgaggactacaggaaagatcatctcagccttgtgctcaaaattggtttctctgcctccagtcatgtacttcatcgatgaccaccgcagtgatccatctaaagcagacctggtgatgctacttcttgaattaaaacagtggggccrgcacggtggctcacacctgtcattccagcactttggaaggccaaggcggtggatcacttgaggtcgggagtttgagaccagcctggccaacatggtgaaaccccgtctctaataaaaatacaaaaattagctggacatggtggcatgcacctgtaatcccagctactcgggaggctgaggcaggagaatcacttgaacccaggaggtggaggttgcagtgagccaagattgtgccactgcactccagcctgggtgacagagcaagactccatctcaaaacaaaacaaaaaaatgccaccccccacaaaaatccataaagtggaagctccacaaagtcacaagactcccccagtggtcaggatctctggttcctggcccttgccccctctccagttagatctctcaccaccttaccttgagctctttttctctacatgtgaaacttggctcatgctgtcccttccactgggaaaatttttcacccttttctgacaaattcctcattattttttttcaagaaatttttgtggggaaactgaatattttgaattataagtcagtgagcatctcctccaatgg

SEQ ID NO: 669456 - DNA, 1955 bp, Homo sapiens
tcctactcaacaagtatctgatattatctgtgaattgtttctaatcaaaatatgagtctgggaatttttaagttgatcataaaggagtagaatcacaaacacagtcatgtcctaaaaagcatgtaacagacgcacatcaaaggatggtccccacagatctgtactgtaggaaattggtggtgacatttagccctacccatgtaatatcatccacacataaagaacagtgaagagggctgggcacggtggcttatgcctgtaatcccaacactttgggaggccgaggcaggcagattgcctgaactcaggagttcgagaccagcctgagcaacacagtgaaaccccatctctactaaaatataaaaattagcaggatgtggcggtgtgtgcctgtagtcccagctacttgggaggctgaggcatgagaattgcttgaactcatgaggcagaggttgcaatgagccaagatcgcaccactgcaccccagcctgggtgacagagcgagacactctgtctccaaaacaaaacaaacaaacagagcagtgttgaggccaggtgtggtgcttatgcctatagtcccagctacttatgaggctatggctggaggatcgctttaacccaggagttcaaggccagcctgagcaatatagggagaccatctcttaaaaaaaaataaaaatcaaaatggtgagggactctgaaatctgactataaagcaaacattagtgtcctcaaaaagaataatctatagatgagatagttactaactctaccacatgggatttggaacagatctatgataaacaagtttaatgctagaaagtcttggtagaggaaggctctcaagaatatactccttttaaaatgtgtgtacatacaatcaacttgattcttcaaagtagtaacattaattttcaattcatcatggcattatacttttttctttaaaaaaattttaataaccttttagttaatattttcattttctctcttaaattttaacacagaattatttccattgaaatacgtaagcacaaaataaagtacgatattttggttactatcctaagaacagtttagtaaagaaacagaacccctccaaaaccagggacattctctattaaatttcaatgaagcgtctctgttaaagctcaaaggagttataatgagtaatttggagtttcctgatttttaacatttgacttcccaagaagcgggtaaaacctggaggttagccgcatcactttatcttgattagtacgaccaactgggacctgattttcacatcatcagttagcatatttgtagcttaacatttctagttctgaaccttagccttgtttgttgtttaagatttaattaggactgcctggatagcatgaaagtattttataaagcaacaatagaaaggatatactcttgatttatcactttttggttttggcatcaaaaaagattattttgagttactaataatgcctatgaatcatcagttaaacaagtagactgcggrgccgaaagtaggaggatctgcagagatctggactcatcaccagcagctgtgcgcagccactaggccatggtcctgacgcgtcacattgtgatgtatgcatctctcggttgacatccggagatctctgggcaatgggtcaggggctgcacacagagaaactgacacatattttttttcctgttagaaaagaaatctataaaagcaaaaaatggttaatcatacttaatatactttcaaagctgtcttaaaaatatatttaattaaatgaagccagatttaaagatattttctgatctcagaagtctataatatttaaaggaaaaactttatataaatgtagtaccaggttctggcaaggatacagaatgacttagactaacagatattgctggtgggaatgcaaactggtacagacgctttgggtaaacagtttggcagtttc

SEQ ID NO: 669457 - DNA, 639 bp, Homo sapiens
ggcgaggagaagatagtattcgacttaggtcttgagggatggatttggatggcagaatgaaaggtgaagaccatgccaagttcaagcctgaacagcagaagtggggatgaagtgtaccatctggctggggtagtgccttttcctggggggtggtggtgccttcattgcagagtaaggtggaagtgcttgtgagaaactgaataatggcacggtcaattttgtgggcttgggttcaagacctagctctgccacattctatcagtaacttgggaaaattagcttaatttccctgaaactcttgttcctcttctgtaaaatggggtaataaaattgtccacctcataggttattttgaagattaaacaggataatacatgttaatgtgcaatgcttggcacatagtaagcatccaayaggtaagaactattaaattatggcaaatcctgaatgtcaaaagaaattataaatttcccgatgtactagcattcatcttttctaagtatttgcatgtcacataaaaatttcttctcagcctatcacttttttttctctcctgtccctggtccaagcaatgttgtccacatcctgaagaactgctccatgagcccacagtaggacactctgaggcctggctcacca

SEQ ID NO: 669458 - DNA, 639 bp, Homo sapiens
ggcgaggagaagatagtattcgacttaggtcttgagggatggatttggatggcagaatgaaaggtgaagaccatgccaagttcaagcctgaacagcagaagtggggatgaagtgtaccatctggctggggtagtgccttttcctggggggtggtggtgccttcattgcagagtaaggtggaagtgcttgtgagaaactgaataatggcacggtcaattttgtgggcttgggttcaagacctagctctgccacattctatcagtaacttgggaaaattagcttaatttccctgaaactcttgttcctcttctgtaaaatggggtaataaaattgtccacctcataggttattttgaagattaaacaggataatacatgttaatgtgcaatgcttggcacatagtaagcatccaacaggtaagaactattaaattatggcaaatcctgaatgtcaaaagaaattataaatttcccgatgtactagcattcatcttttctaagtatttgcatgtcacataaaaatttcttctcagcctatcacttttttttctctcctgtccctggtccaagcaatgttgtccacatcctgaagaactgctccatragcccacagtaggacactctgaggcctggctcacca

SEQ ID NO: 669459 - DNA, 1326 bp, Homo sapiens
tgagaatcccaaatgctaggtggtatctgaatgtggcattacgagatataatgctctaaactctgcaatttctcttgtaagacggaaacaattcaacctgttctttgactccttttctgggttttyttggctccaggcttcttagaacactgatcacactgttccaccacccccaatctttacctccattctctctaccctcccagcccccaccaaaacacaattcttttcaggcaagtgcaccatacaggtgctctggtggtcccgtaactgaggatgtagttgccagccttttagcaatatcaagagttctctggaggctcttgagagctgtggccttggttaaattggacagaatcacctttttggtaaattcccttccgattcatttcacaaatggcttaaatcatttatgttgttttgttcaatccagtcaggaaatgaaagcattgccattttaattgttttagaacagcattttacacctaatatagactcccaaagccagccaaatgcagattttggctcctagatcgctgactgcatgctgactgtgttcttgagtgtggaagaaaacagatccagccaaagactgattaccttccaaaggtcacaaaagaagtttctctttatctaagaaagaaagtaggtgccattaggtgttgattttttttaaaaagtccttttaatttaaacaatatttgaataaaaattatggtatagtcaaccacaaatcagttgatgaagtctcaaattttggcagtctcccttggttctgtgttcttgggcaagtttactttctttttctttttcttttttttttttttttgagacagggtctggttctgttgcccaggcttgagtgcagcagcgtgatcttggctcactgcaacctctgcctcaagcattgctcaagcaaccctcccacttcaacctcccagttagctgggactacaggcgcatgccaccacacctggctaatttttgtatttttttgtagagacgaggttttaccatgttgtccaggctggtgtagaacttctgagctcaagcgatctgcccacctcagcctcccaaagtgctgggattacaggcaggaaccaccatacccagcctctttttttaaaaaataattttttactttgaaataatttaagacaagaagttgcaaaaatagtactgagagatcccaggtacctttcactcagcttcccccaatgataatatcttacatgatcatagcacattgttaaaagcaggaaattgacattggtgcaatactagtaattcaagaacagaccttattggaataggttttacatgcaa

SEQ ID NO: 669460 - DNA, 640 bp, Homo sapiens
tggtttatcctgcatccccagaccccaggacagtgcctgtcccatcaataattatgtgttgagcagatgcatttatggaccagatcatcacagaggattttgaaattgaaaaaattacttaattaaatgaaatgtttaaaattaattttttgggattctgaagggaacttttatgattaaatttctgtgtactacaggttgcctattgtgtagtcatgttttagtaaaagttcttttcctgaggcaggaccatttcagatgggaaagataagttttctgtgctctagggacagtctcctgtctgccttgaacacattagacagatgaccttaatgatcggaagagatgcattggaaatacattcctttccctcatcagcagtgcttttgcattagcattgagcagggtttgactttcttggtgatacagaaggtgcaagaagcttagtatcatgtggtttgacatttaatcagacttgctttccttgttaacctaaaggccttcctcttctttggaatttaatgtgtcagtaatggctcctagagctggaacagatggagctgytgatgttctcacttaaacgaaaaaaaacatgatttatatcctcagcttcatttcttaaattcttgttgaactttca

SEQ ID NO: 669461 - DNA, 849 bp, Homo sapiens
ttaactaaattatctgtgtcgccattctaacaggaacaatgacgtaagtaacttgtcctttattttctttttttctttttttttcttttttatagagacagggtctcgctatgtttctggggccagggaggatccaactcctggcctcaagcaatcctccctcctcagtctcccaaagtactgggattacagatgtaagccatatcgcccggcccaatttgtccttctttaacatgttattctttcaacatgttatttctcaacagggtaaattgattatttggcaagttataaataaaagcttcattgtaatttcactaacatagatccttaagaagaaaatgcttgctcctgctaatgactatttgaattctaaatggagttcgaataaggaattttaaacctttaagtttgcttaccgaacatggacagcagtaaagttttggtctttcactggactccagaggtcagatagaaagacgagttataaagcagtgtagccmcagcttctgcaccacacacaggtgttgctaccatggagcactttgagcggaaagtgctggaggtgcaaatgtttcctgtgggttgtcaaaagagaggccagtagtttctgccacccgtgaccgcccagcacaatatgctctggcaggggccattattagcccataagttgctgcactgagagaaaggcacacggggtgcagccagttctgggggcttgaacatgtccaaaacatccttgtcttatagaaacctaggacacatacaggaacattcattaatattctcaaagaagaaagttttattttgcacttggaaatatgtcagaaatcacttgaaggcaaataa

SEQ ID NO: 669462 - DNA, 670 bp, Homo sapiens
gtgacattaccagtttgggccttcattgcttctatctacaatttgctctttattgccactttttccatttccccaagtgcacagggtctccacgctaaccctgactggactcagaaaatctcctttgtaccttgccttcctctgtacttacctttcattcttctctccagcagaaacttatttttagttaaatctctcaatatgaacagtatcagagtttctgaatstttggactcacgatctcatttatccatttaaaaccacagtagagtcataactagttttttattacatttcactgctagttagcacttaaaccttaattttctgtatgatctccaaacctggttaatgggctgaagcaaacaggagacttgagacttccttttgcctcttaagctataaggcctaacctaaggcaatctttcccttctttcaggctcacccaaccgtcttagttacctaggtcttatcatacccagttttagaaaagtgagagcccagaaataaacccacatatatacagtcaaccaatctttgacaatagtagcaagaatatacaatggaacaagtataattgctccaataaatggcattgggaaaactggatatccacatgcaaaaaaacaaaattgaatccttatgttaaatcatattcaaaaattagcac

SEQ ID NO: 669463 - DNA, 599 bp, Homo sapiens
attaagatggcaggtggctcacagttcctgacttccttgctcacaaattgtctaagaaggttaaaaataaaaagcactacatcaaaaactaagaatatcaatccatgatttcccacactctgagaaagaattatattcagacttctacgtgagcaatgagaccagcaaaacaaatggttatctatgtgataatgcacaatacaaatagttaaaaataaagacaccaaaatcttgcactgggtgaatgacttgattattgttactacrtgcaagccaaaataccatgaagactcatcactaagaccaaagaagtctctgttgagattcgaaaactataccattgaaaaggaattttttaccagttttctgaccaatggaaataaattgagaagcataatatatggctcacctgcactatgccactaaaaaccaaggaggccacttgtaaggctataggcaacctgtttgtggggttagcagggattggttttatggaactagttagacttgcatattagggtccagagtttgggtgggcaggtttcttacctgataatgtctgccattggttggtgaccaacattctagatcttctcttc

SEQ ID NO: 669464 - DNA, 599 bp, Homo sapiens
attaagatggcaggtggctcacagttcctgacttccttgctcacaaattgtctaagaaggttaaaaataaaaagcactacatcaaaaactaagaatatcaatccatgatttcccacactctgagaaagaattatattcagacttctacgtgagcaatgagaccagcaaaacaaatggttatctatgtgataatgcacaatacaaatagttaaaaataaagacaccaaaatcttgcactgggtgaatgacttgattattgttactacatgcaagccaaaataccatgaagactcatcactaagaccaaagaagtctctgttgagattcgaaaactataccattgaaaaggaattttttaccagttttctgaccaatggaaataaattgagaagcataatatatggytcacctgcactatgccactaaaaaccaaggaggccacttgtaaggctataggcaacctgtttgtggggttagcagggattggttttatggaactagttagacttgcatattagggtccagagtttgggtgggcaggtttcttacctgataatgtctgccattggttggtgaccaacattctagatcttctcttc

SEQ ID NO: 669465 - DNA, 586 bp, Homo sapiens
tcaggctgaagttagtgggaaatcactgtggaaatttagagagggggatggcactatcagatttgttctgaaggaagaacattccagctgccctgtagagaagcgttggaatcagggaggcatgttaggaggctgcgataatagtacaagcaagagatgatggtggcctcactctaagggcattaaaaatcaagacaagtgaggccgggtggggtggctcacacctgtaatcccaggactttgggaggccaaggcaggcagatcaccaggagtttaagaccaggctggctaacatggtgttagctgggtgtactggcatgcacctgtaatcccagctcctcccagctcctcaggaggctgaggcaggagaatcacttgaacctgggaggcggagattgaagtgggccgagatcatgccactgcactctagcctgggcaacagagtgggactccgtctcaaaaaaaaaaaaaaaatcaagacaagtggactatattggcagattactggctagcattcacttattctaccatagtcatgtgctctctccctcagggatggtagtgacagtcttatttyctattgata

SEQ ID NO: 669466 - DNA, 602 bp, Homo sapiens
tttatatttttagtagagacggggtttcaccatgttggtcaggctgttctcgatctcttgacctcgtgatctgcccacctctgcctcccaaagtgctgggattacaggcctgagccaccatgcctggctacttcattagaattttttttttttttttttggagatggagtctcgctctgtagcccaggctggagtacagtggcgtgatctcggctcactgcaagctccgcctcccgggtttacgccattctcctgcctcagcctcccaagtagctgggactacaggcgcgtgccaccacgcgtggctaatttttttgtatttttggtagagacgggtttcaccgtgttagccaggatggtcttgacctgacctcatgatccgcccacctcggcctcccaaagtgctggcattacagacgtgagccaccrcgcccagccttcgttagaatttttcacctggcactgagcagctgctcgggaagtgttagttatatttgtatttattgtgaatgggtctttcgtctggctcccttttttttttttttttttttttggtagagatggagtctcactatgttgcccaggctggtgccaaactcctg

SEQ ID NO: 669467 - DNA, 627 bp, Homo sapiens
tcaatgaatatattcattcttatattcgtttatcttgttgatcctctctaccatccctccttttttttccttctggttctggaaggtgactttaaaaatatatgtgttattttgggtggcctttccttacatacagttggcccttgaacaatgcaggggttaggggttataaccccttgcagagttgaattccatgyatagtttttgacttcctaaaaacttaactaccaatagcctactgttgaccagaagtcttatcaataacataagcagttaattgacacatggttttttatgttgtgtgtattctgtactacattcttacaataaagtaagctaaatagaaggcaatgttgtcaagaaaatcataagggtccaagtgcagtggctcacgcctgtaatcccagcactttgggatgctgaggcgggcggatcacctgaggtcaggagttcaagaccagcctggccaacatggtgaaaccctgtctctactaaaaatacaaaaattagccgggtgtggtggcacagagctgtcgtcccagctacttgggaggctgaggcaggagaatcacttgaacccaggaggcagaggttgcaatgagccgagatcacgccactgctcttcag

SEQ ID NO: 669468 - DNA, 2628 bp, Homo sapiens
ccccaaatacacactgtcactcacacgcacacacacacacttttctgccaccccctcggctttcccttactggggactgaggattgagcgtccgtgccccacagtgatcctcaggatcccacatccctctggtccccgcactgggccctgcaggaaggcgtgcaacgcaatccctagggaaaggaagtgtggccctcggcggttgccggactcccattcagtgggaggggtgcggatagtactggggcagcggcgccgggtaacgaccgtgcccttgatagggtgccctgggggcggcgggcgcacctgtcctggcccccggcccgcccgagtcggtgggccggcggcggctggctgccgcgtgtgtgccctgggcgggaagagcgcgagaggaaggtttccggggcgccggcattcgggcctcgctttccttcccgcacctgcgaccttggcgtgcggcattctcctgaccttgcgaccccccgaggtccctgtgaccccggggcccgtttggcctttgcttgggaaagggtcgaggtgtagtgtgtctctttttttgttttgttttgttttttccttattgcccctaaggaggtccggttgcagggaggctatcaatcttcctctccatctccctgtgctctttcattcagtaaatatttcgtaactgcagtttctcagagccaggctctggaccagatgccaacgatacaactgtgaacaaggcgagggaaggacaatgacaaatggtcattgctcaaaaaatgacaaacgtaatttcgtactgtggcgtgtataatagtatggagggaaatttcagagcttgaaacgagctctagtaattcattcccagtggagaccggagccagaagattaattcaactcaagaagccgatttggagcactctccttaagcactaccttaataaggaactgagttttaaaaccacccccaagcaggtattaactgcaaggagcaaagcgtagcttggcctttcgtttgaatgtatgctctgtgtctttcagccagcagaactatctgtcctttccaaggccccacagccttggcagtacagttttgcccaggcttcgcacttttttctcttcctgacttggctccttcctggcccactgtcaacgtgtgctctttaagtctgcctacctagtgggccagagccaggaggagttatttatgcaacaaatttggaaaaccaaaggagtgcttaaaatttccgtcaagagaaagtatgtttccctattgcagtaatcttaaaataataccttgttttatggatttggctagatcacctgaagctctagtgcttggtgaaaatcccttggggtcagggttagtcattctttcagtttgagagtctgactcatttttcttttctgtatttttcttactagaatgtaagttccatgagagcggagactttacctactttatattcactgttacatctcagcactattaacagttgctggcatgtctcttatattggatatttttattttaagccctgatttttcacgtaatgcaacggaaacaaatacagtatgacattttaatgttgtatcttagatcaaaatctgaacataggctggtccaagtgtaatggtgtttacaactaattgatcataaccagttacagattttattgttcctkctctcgactaatcttacacaggggaaccacagtgctgcaaaatatgtaccaaaaaaaattccctttttttttttctttaaatacagggtctcactgtgttgcccaggctggagtgcagtggcacaatcatggctcactgcagcctgaccttccaggctcaagtggtcctcctgcttcagcctcccaagtagctgggactgcaggcatacaccaccacacccagctaattttttattttttgtagagacagagtctccctgtgttggtctcagactcctcccacatcagccccgcaaagcgctgggattataggctaagcaaccccacctgaccagaaaataaattcttgaaatagttgagcacctaatgttgaggaattactcttcagatttaaataatgatacctgattaggtgacagaatcagatgccatatttggcatgaaggttaactcttcaggcaagatcagacttccctccttacactgtggaagtgatctttacctagctccaaatggtaaaagtggaaaatacttaaactgaattcatcgacatttctatttaaatggctcattctaatacaataaaaccttgtctgttgttattctgaagaactgaggatttatccaatggcatacttggaactctttgtaaatatgtggaactctttgtaagttcaagtgtatcatttaactaaacactgcgaataaaactttctcttgttgacttgtactgtaaatgtatagtgacatgagatcagacatagttgcagttcaatgaagaaaaaaaaagatgctaatgtattttgatttataatgatttgcttttaattatttaattctgattatttactttttggtgaaataactgagcaggtctcgtgagactttaaaaatgcagtgtgcaactgtggtaccataaccattggttaaaagatcacagaccaggcacagtagctca

SEQ ID NO: 669469 - DNA, 642 bp, Homo sapiens
aggcaggtcttaatatctattagttttttgcctttggtatgatcgatgagctcagtaacagtagacaattaatgttatctaatttaatgagataataggtttataaataaatgtagttacaaactatgaaatatatgagatgccctaaattagaagccacaaagagtagaacacctaataaacaaaattaggacttaataatatttcccaagtaccacaacatttcaatattagaacctacaaaaaatacgcattggatattatttgcagttccaagatagtttcaccaataaagttcaagaacaaattatttcattgcttcgctatttttctgaacattcaaaatacgttatctcaagtttttataacaacctagtaaaacaagacagtaaaattctcactttttagaagaagacattgaacctaacaaaagcaactcatccaagaactagtagcttttggttatggagctagggcttattctgagttaagacactttccattattgtcaggcttgtagggtccagccccacagggtcggtgggttttctccccgtgtgcggagacgagagagtgtagaaataaagacacargacaaacagataaaagacagctgggcccgggggaccactaccaccaaga

SEQ ID NO: 669470 - DNA, 634 bp, Homo sapiens
tgggaagccaaggcaggggcatcctttgagtctaggagatcaaagatacaatgagccatgattgcaccactacactccagccagggcaacagagtgagaacccatgtaaaaaaaataaaaaataaaaaatgtctttgtgcatgaattgactatctgcttgtgcatgaagcttttattttctccagtggaccacacaccataccttggttacatacaaktcatattttatcatatttttagtaattatattattgttgttcccctttcttgagcacataatcacatgccagacctatgccgagtactttgtaaatatttatctgtgttttccttggaatacaataaataagccatgaagatacctgttacaaattgagatcaatgtacaaatacatttcaagggttttccttattatattcatttcttagctacttaagtacgctgaaaaattccaattttctaacctacttaaccagaatttcccccaaattaatacgtattgacatttcacaaaaccagtttttttgtggtatacactttgtcaatggcaaccttgtgtccattttttattataggaaaccaggaaggtagatgccagcatcctcatttatagatatatggataatttcaaaa

SEQ ID NO: 669471 - DNA, 641 bp, Homo sapiens
tgaggcaggagaatcgcttgaacccgggaggtggaggttgcatgagccaagatcatgccattgcactccagcctaggcaacagagcgaaactccatctcaaaaaaaaaaaaaaaaaagtaaataaaatgtaaaattctcagtcacactagccacatttcaagtcattatagccacatgtgaggcygggtgcggtggctcacacctgtaatccgaacactttgggaggccgaggcgggtggatcacgaggtcaggagattgagaccatcctggccaacattgtctctactaaaaatacaaaaaattagccaggtgtgatggcacactcctgtagtcccagctactcgggaggctgaagcaggagaattgcttgaacctgagagatggaggttgcagtgagccaagatcacgccactgcactccagcctgggcgacagagcgagactccgtctcaaaaaaaaaaaaaaagctacatgtggcctatgggtgctacataatacagatctagaatattcccattgtcacagaaatttctgttgaatagtgctggcctagactgtgtcaggaggcagagaccaggggagaaacttggaggtgctctgggctcccccaccccacccactcccagtgcatccaggtgga

SEQ ID NO: 669472 - DNA, 647 bp, Homo sapiens
gagttttataaacttaatatgctaattttaatccctgtggtaaccacaacatactgcatgacrtttcattttaaggaaactattataataaaacaaccgtttcataaatactcaggtattcaacatttatatttattctcacatgtttttgtgtttcttttttcttctcttcatcactcttgacttttacttattcttctctcagccctccctttttaaaatttgtttgaaaccatttacttggttatgttgttttgctttttcattttgtatttaataatcctattattcattcaacttgcctcagttactctcatttaaagtcatttattaaagagaattgaaggaagtagaagattttggctcaggagtcaagcccatttttaatatgtcttaattcattaccagtttaagacatctgttgatattattctaataaacattttgttctgaaataactgtagattgatatacagttgtaataaataatgcagagaaatcacctgtaccctttacttaatttcccctagtagtaatatcttacaaaactatagtccaatatcacaaccaggacttttacattgttgcagtaaagacacagaacattccaccctcacagcatccctcttgttaccattaagtagcca

SEQ ID NO: 669473 - DNA, 647 bp, Homo sapiens
gagttttataaacttaatatgctaattttaatccctgtggtaaccacaacatactgcatgacgtttcattttaaggaaactattataataaaacaaccgtttcataaatactcaggtattcaacatttatatttattctcacatgtttttgtgtttcttttttcttctcttcatcactcttgacttttacttattcttctctcagccmtccctttttaaaatttgtttgaaaccatttacttggttatgttgttttgctttttcattttgtatttaataatcctattattcattcaacttgcctcagttactctcatttaaagtcatttattaaagagaattgaaggaagtagaagattttggctcaggagtcaagcccatttttaatatgtcttaattcattaccagtttaagacatctgttgatattattctaataaacattttgttctgaaataactgtagattgatatacagttgtaataaataatgcagagaaatcacctgtaccctttacttaatttcccctagtagtaatatcttacaaaactatagtccaatatcacaaccaggacttttacattgttgcagtaaagacacagaacattccaccctcacagcatccctcttgttaccattaagtagcca

SEQ ID NO: 669474 - DNA, 647 bp, Homo sapiens
gagttttataaacttaatatgctaattttaatccctgtggtaaccacaacatactgcatgacgtttcattttaaggaaactattataataaaacaaccgtttcataaatactcaggtattcaacatttatatttattctcacatgtttttgtgtttcttttttcttctcttcatcactcttgacttttacttattcttctctcagccctccctttttaaaatttgtttgaaaccatttacttggttatgttgttttgctttttcattttgtatttaataatcctattattcattcaacttgcctcagttactctcatttaaagtcatttattaaagagaattgaaggaagtagaagattttggctcaggagtcaagcccatttttaatatgtcttaattcattaccagtttaagacatctgttgatattattctaataaacattttgttctgaaataactgtagattgatatacagttgtaataaataatgcagagaaatcacctgtaccctttacttaatttcccctagtagtaatatcttacaaaactatagtccaatatcacaaccaggacttttacattgttgcagtaaagayacagaacattccaccctcacagcatccctcttgttaccattaagtagcca

SEQ ID NO: 669475 - DNA, 2657 bp, Homo sapiens
  misc_feature 1133, 1134, 1135, 1136, 1137, 1138, 1139, 1140, 1141, 1142,1143, 1144, 1145, 1146, 1147, 1148, 1149, 1150, 1151, 1152,1153, 1154, 1155, 1156, 1157, 1158, 1159, 1160, 1161, 1162,1163, 1164, 1165, 1166, 1167, 1168, 1169, 1170, 1171: n = A,T,C or G
  misc_feature 1172, 1173, 1174, 1175, 1176, 1177, 1178, 1179, 1180, 1181,1182, 1183, 1184, 1185, 1186, 1187, 1188, 1189, 1190, 1191,1192, 1193, 1194, 1195, 1196, 1197, 1198, 1199, 1200, 1201,1202, 1203, 1204, 1205, 1206, 1207, 1208, 1209, 1210: n = A,T,C or G
  misc_feature 1211, 1212, 1213, 1214, 1215, 1216, 1217, 1218, 1219, 1220,1221, 1222, 1223, 1224, 1225, 1226, 1227, 1228, 1229, 1230,1231, 1232: n = A,T,C or G
taaagaacagatgcttaggaataaataaacaattttgttggtgagtgttgttaccaaattataatcaattcaagtcactaaattggactattttatggtgctattgaaaattatacttacttggatagtaaaagaaaagactagataaggattaaatgttttactatgttccctgattcttccagaatttgtgtcaagtgcaagcttatgaaacaaagtgccaacttacaggacttttactctctgcagtgatttgtctatgttatgactttctaaatgtttcaagattttaccatatgatctcagttctcaaaaacaaaattatgtatgctatcttaatgaataatcaccaaatgaaggttagtatactacatacaaaaatacatataaaaataataataaaaaattctggaacttaaaaaagattaggcagtctgttcatatacatgttacaatgctgttttaaatgaatttttttgaatcatacacattggctatctcatacattcccattccatcttatcttcacatcacattctcccctgactgcttggaccattgcatttatcgctaacccactctgatttattccttgtccatatctttggctttcatgcttttgttatttccatgctagctatgctattgaagagggcatttctgatctccaggagcaatgcttaaaaccccccgcttctaaaccttgagctgtttcatctggacctatttactttaggggctattacctggaccaaagttttgagtgaggatagttatattgtaactatttaatgctctgtgtgtatagagattttttgataaaattataatatttgtcatcatttacccactaataccgtctattagcattattttcatatatacctttgctatgatttaatgtcctctccaaaactcatgtggaaatttaatctccattgtaatgccactaagagatggggcctttgtaaagtaattaggattaaattaggacatcagggtgggacccccatgatagtactggaggctacataagcagaggaaggccatatggtagttttttttttttttccgtactagttctgaacatgagctctctttctttttttcctgcttctttattttaaaatttnnnnnnnnnnnnnnnnnnnnnnnnnnnnnnnnnnnnnnnnnnnnnnnnnnnnnnnnnnnnnnnnnnnnnnnnnnnnnnnnnnnnnnnnnnnnnnnnnnnnacaaatgtgaattcaattaatggttttcttttttaaaataaaagcagaaatatttgtaagatacaaaaaatggaaaatagaacataatgtagatttacttaggcattacacatttttgaatacccatgaagtattgaaggggttaaaactgtaattgatttaaactttctgttatatttctgtagctgtaatagttttcaatatttcaaaaataaaatcatactaattttgttatgtgttattctattgtacaccagtttctgagagaaaacatgattgtatagccaaaggcctttaaaattaattcatccaggtaaattttctttgtatatcatattaaatatgtaatttgcagcaaaggacaggtccttttgggtttaatctgaactttgaattttgaatctcagaataaaatttatttgagctgaatcttacaaatcaaaatatcttctacatgaacatggagaatataaatataaatgcaaagatatttgtattatatttacaaaaacgttctttgacctctatttagttgtgtagaattgatattctgaattatacctgccagcctttggcactgatgagaattctatctcaaggatataataggctaatgcctcatgacaatagggcaaaggattagagtcctattggagattatgtatttgtcagttttgtgcatttagtttgagcaatgtgtggaagaagtaaaatgtgaatgttcatatattgtgcatagctcatactcaaactacagtgaaaatgtaataaaatttgttccatgagtacatgcctaatttgtgtttaaacctgcataaacaatttatgattatgtcagtcattatacaagagtcaatcacataatttcattgcagtttttcagtctaaacagctttggtagagaccgtttgaattgcatctctacgctctttctacccaggacccctccatgagcaaagctgccccttgcccagtttttcccatatcactcaaaattcactgcatcagtctcttacttgcarcttttttagggggaggacaattccagtaggctcctaaatcgtttgcctgtttctacaccccacatggcagccggagtatacgtttataaatataaatgttcactcctttgcttaagacttgccataggatttccaataaaacaggaataaaattcaactgttttcttcacttcggtctcaattgtctcaattctccaagcttatttcctgttactctcatcctcatgctgtgttctagccacctgcactcgctagctatttctccatcttgcccaacttgctccctctcttgcggctcttgtaggtgcttcctgagtttctgaaacattcttccctagatcctcaagaaacgtctcatattttaaaactttgaacaattgccatctaatagagaggagtttta

SEQ ID NO: 669476 - DNA, 657 bp, Homo sapiens
agttgttttccaagattcaaaatgagaaataaaatataccagaagtaaaatatagtagaacttagtagagaggtcaaagttcttatttcagccaaataacctagagtaagcatacttaagaaacacatacacacacacacagacacacacaaacagttgaaaacaaagtctggagacagtccaccattttgtaccaagaaagagaggcaaaagaaaaaaaaaaaagaaaagcaggtggagggggagtggctagtagagtaggaagagacaacaaagtagtatatcacttcagaaacaaagtgaagaaaaatgtagaagcatacaagtgtttatataagtggtataaatatatagtataaaatrcttttaagagtttgaattgacaactgaaaagtgaacaattaaatttagcagtattaggtacctctgataagatagtgtgataaaggtttggtgtagattgaaaatgagatagaaaaaagaaaaataaaaactgtgtataatttttttagaaaactttgatataaaatgtaatagaaataaagaacagaaaataggaacatattgttgatggaaagagacatagaaagactttttaaaatgaagatagatattacagcatgtgtgaatgttgactggactgggcagccactaaaa

SEQ ID NO: 669477 - DNA, 612 bp, Homo sapiens
tccactccagacaccctccccaaagcaaactattaacaatgactatttgtccagtttctttgcataagtacacacmcacagacacacacacatacacacacacacacttttaacacaaaacttttataccttgctttctttccagttacaatattttggagattgttttcctacatagtacctcattcatttaatgactactattcatttaatagtaactcattgtatacataaatgtacagaaatttagttatgctttcatggctataaattatttccctgtcttttgctgtttgcaaatactgttacaggatacaatcttgtacatgacttacaggattatgaggagataaataaaggtaatgcaggtggagctcttttagcacagggcttgagatacataggtgaacagtaactttctcaatattagctattagtattgtgcctctttgtacacacatggaagtctacctttagcataaataccgaagcatgagtctgctgcatcgaagtagatttacattttaatggaggataccaaaattgcctttcaaggaattacatcagccctatgtctgcaaacagtaatgaaaggacccacttcttaccaaa

SEQ ID NO: 669478 - DNA, 1320 bp, Homo sapiens
aattacctttaggtaaatagcagtgtttctgaaacatctttttgtataactgaatcctttaatcataggaaaaaataaagtcaatgatataggtagaagtctcaatgtaaaaataaaactaaaaatccaaatgtgaaggcataccaaatatttaagactccagacaagccaaaattcaaatatatatatatatacaaaatgctaacataagttaggaaaaaggaaataacctgaaatattcraattttattggagaaatcagtgatacacaaatcctaacatgtctgtaggaataaaaccttgaaacaatctcagcatttgtacaacggaactggtatgagagctcccaagttaaaggaaaaaaagaatttcattggcatcatgtaccagtcttcttacacatgcaacagttgttaaaagtacactgtttctctgtaatgatctagatttgagaaaaacagcaccctctcaaaaatcagactacttctttgcattacttccagtatgaggcaaaagatttggattcctaataagctttcctacttaagaaagtgaggatctctaggaatttatcttcccagctcctatataagaattagttcttggctgggcacagtggctcacgcctataatcccagcattttgggaggccaaggtgggcggatcatgaggtcaggagttcaagaccagcctgaccaacatggtgaaacctcgtctctactaaaaatacaaaaattagctgggcatggcggcccatgcctgtaatcccagctactcaggaggctgaggcagaagaattacttgaacctgggaggtggaggttgcagtgagccaagattgcaccactgcattccttccctgaacgacagagtgagactgtctcaaaaaaaaaaaaaaaaagaattagttctttaacttgaatattctctgcttcatttccagtcagctgatttggtaataaaaatcattcattccacatctagcttattaacctgatgagaggattgcagttgtcagaagtatgggtaatggagtctgataggcctgggttcaaatcccagctattgcaattacttactagtagagtgacctgggcaaagaactttactttggccccatcatctttctgatttgcaataatgggatgctattgaagggcgattaaaaatgagataatgccacccaatccataagaaatgctagtacacagtaactaccactatttgcagtaatgagtcagcattcattgtatatgattttagctgatttggaggagcaactttactaaggtaggaagtgaggctaagagttaaattaatc

SEQ ID NO: 669479 - DNA, 1320 bp, Homo sapiens
aattacctttaggtaaatagcagtgtttctgaaacatctttttgtataactgaatcctttaatcataggaaaaaataaagtcaatgatataggtagaagtctcaatgtaaaaataaaactaaaaatccaaatgtgaaggcataccaaatatttaagactccagacaagccaaaattcaaatatatatatatatacaaaatgctaacataagttaggaaaaaggaaataacctgaaatattcaaattttattggagaaatcagtgatacacaaatcctaacatgtctgtaggaataaaaccttgaaacaatctcagcatttgtacaacggaactggtatgagagctcccaagttaaaggaaaaaaagaatttcattggcatcatgtaccagtcttcttacacatgcaacagttgttaaaagtacactgtttctctgtaatgatctagatttgagaaaaacagcaccctctcaaaaatcagactacttctttgcattacttccagtatgaggcaaaagatttggattcctaataagctttcctacttaagaaagtgaggatctctaggaatttatcttcccagctcctatataagaattagttcttggctgggcacagtggctcacgcctataatcccagcattttgggaggccaaggtgggcggatcatgaggtcaggagttcaagaccagcctgaccaacatggtgaaacctcgtctctactaaaaatacaaaaattagctgggcatggcggcccatgcctgtaatcccagctactcaggaggctgaggcagaagaattacttgaacctgggaggtggaggttgcagtgagccaagattgcaccactgcattcctwccctgaacgacagagtgagactgtctcaaaaaaaaaaaaaaaaagaattagttctttaacttgaatattctctgcttcatttccagtcagctgatttggtaataaaaatcattcattccacatctagcttattaacctgatgagaggattgcagttgtcagaagtatgggtaatggagtctgataggcctgggttcaaatcccagctattgcaattacttactagtagagtgacctgggcaaagaactttactttggccccatcatctttctgatttgcaataatgggatgctattgaagggcgattaaaaatgagataatgccacccaatccataagaaatgctagtacacagtaactaccactatttgcagtaatgagtcagcattcattgtatatgattttagctgatttggaggagcaactttactaaggtaggaagtgaggctaagagttaaattaatc

SEQ ID NO: 669480 - DNA, 1320 bp, Homo sapiens
aattacctttaggtaaatagcagtgtttctgaaacatctttttgtataactgaatcctttaatcataggaaaaaataaagtcaatgatataggtagaagtctcaatgtaaaaataaaactaaaaatccaaatgtgaaggcataccaaatatttaagactccagacaagccaaaattcaaatatatatatatatacaaaatgctaacataagttaggaaaaaggaaataacctgaaatattcaaattttattggagaaatcagtgatacacaaatcctaacatgtctgtaggaataaaaccttgaaacaatctcagcatttgtacaacggaactggtatgagagctcccaagttaaaggaaaaaaagaatttcattggcatcatgtaccagtcttcttacacatgcaacagttgttaaaagtacactgtttctctgtaatgatctagatttgagaaaaacagcaccctctcaaaaatcagactacttctttgcattacttccagtatgaggcaaaagatttggattcctaataagctttcctacttaagaaagtgaggatctctaggaatttatcttcccagctcctatataagaattagttcttggctgggcacagtggctcacgcctataatcccagcattttgggaggccaaggtgggcggatcatgaggtcaggagttcaagaccagcctgaccaacatggtgaaacctcgtctctactaaaaatacaaaaattagctgggcatggcggcccatgcctgtaatcccagctactcaggaggctgaggcagaagaattacttgaacctgggaggtggaggttgcagtgagccaagattgcaccactgcattccttscctgaacgacagagtgagactgtctcaaaaaaaaaaaaaaaaagaattagttctttaacttgaatattctctgcttcatttccagtcagctgatttggtaataaaaatcattcattccacatctagcttattaacctgatgagaggattgcagttgtcagaagtatgggtaatggagtctgataggcctgggttcaaatcccagctattgcaattacttactagtagagtgacctgggcaaagaactttactttggccccatcatctttctgatttgcaataatgggatgctattgaagggcgattaaaaatgagataatgccacccaatccataagaaatgctagtacacagtaactaccactatttgcagtaatgagtcagcattcattgtatatgattttagctgatttggaggagcaactttactaaggtaggaagtgaggctaagagttaaattaatc

SEQ ID NO: 669481 - DNA, 1320 bp, Homo sapiens
aattacctttaggtaaatagcagtgtttctgaaacatctttttgtataactgaatcctttaatcataggaaaaaataaagtcaatgatataggtagaagtctcaatgtaaaaataaaactaaaaatccaaatgtgaaggcataccaaatatttaagactccagacaagccaaaattcaaatatatatatatatacaaaatgctaacataagttaggaaaaaggaaataacctgaaatattcaaattttattggagaaatcagtgatacacaaatcctaacatgtctgtaggaataaaaccttgaaacaatctcagcatttgtacaacggaactggtatgagagctcccaagttaaaggaaaaaaagaatttcattggcatcatgtaccagtcttcttacacatgcaacagttgttaaaagtacactgtttctctgtaatgatctagatttgagaaaaacagcaccctctcaaaaatcagactacttctttgcattacttccagtatgaggcaaaagatttggattcctaataagctttcctacttaagaaagtgaggatctctaggaatttatcttcccagctcctatataagaattagttcttggctgggcacagtggctcacgcctataatcccagcattttgggaggccaaggtgggcggatcatgaggtcaggagttcaagaccagcctgaccaacatggtgaaacctcgtctctactaaaaatacaaaaattagctgggcatggcggcccatgcctgtaatcccagctactcaggaggctgaggcagaagaattacttgaacctgggaggtggaggttgcagtgagccaagattgcaccactgcattccttccctgaacgacagagtgagactgtctcmaaaaaaaaaaaaaaaagaattagttctttaacttgaatattctctgcttcatttccagtcagctgatttggtaataaaaatcattcattccacatctagcttattaacctgatgagaggattgcagttgtcagaagtatgggtaatggagtctgataggcctgggttcaaatcccagctattgcaattacttactagtagagtgacctgggcaaagaactttactttggccccatcatctttctgatttgcaataatgggatgctattgaagggcgattaaaaatgagataatgccacccaatccataagaaatgctagtacacagtaactaccactatttgcagtaatgagtcagcattcattgtatatgattttagctgatttggaggagcaactttactaaggtaggaagtgaggctaagagttaaattaatc

SEQ ID NO: 669482 - DNA, 1320 bp, Homo sapiens
aattacctttaggtaaatagcagtgtttctgaaacatctttttgtataactgaatcctttaatcataggaaaaaataaagtcaatgatataggtagaagtctcaatgtaaaaataaaactaaaaatccaaatgtgaaggcataccaaatatttaagactccagacaagccaaaattcaaatatatatatatatacaaaatgctaacataagttaggaaaaaggaaataacctgaaatattcaaattttattggagaaatcagtgatacacaaatcctaacatgtctgtaggaataaaaccttgaaacaatctcagcatttgtacaacggaactggtatgagagctcccaagttaaaggaaaaaaagaatttcattggcatcatgtaccagtcttcttacacatgcaacagttgttaaaagtacactgtttctctgtaatgatctagatttgagaaaaacagcaccctctcaaaaatcagactacttctttgcattacttccagtatgaggcaaaagatttggattcctaataagctttcctacttaagaaagtgaggatctctaggaatttatcttcccagctcctatataagaattagttcttggctgggcacagtggctcacgcctataatcccagcattttgggaggccaaggtgggcggatcatgaggtcaggagttcaagaccagcctgaccaacatggtgaaacctcgtctctactaaaaatacaaaaattagctgggcatggcggcccatgcctgtaatcccagctactcaggaggctgaggcagaagaattacttgaacctgggaggtggaggttgcagtgagccaagattgcaccactgcattccttccctgaacgacagagtgagactgtctcaaaaaaaaaaaaaaaaagaattagttctttaacttgaatattctctgcttcatttccagtcagctgatttggtaataaaaatcattcattccacatctagcttattaacctgatgagaggattgcagttgtcagaagtatgggtaatggagtctgataggcctgggttcaaatcccagctattgcaattacttactagtagagtgacctgggcaaagaactttactttggccccatcatctttctgatttgcaataatgggatgctattgaagggcgatkaaaaatgagataatgccacccaatccataagaaatgctagtacacagtaactaccactatttgcagtaatgagtcagcattcattgtatatgattttagctgatttggaggagcaactttactaaggtaggaagtgaggctaagagttaaattaatc

SEQ ID NO: 669483 - DNA, 1320 bp, Homo sapiens
aattacctttaggtaaatagcagtgtttctgaaacatctttttgtataactgaatcctttaatcataggaaaaaataaagtcaatgatataggtagaagtctcaatgtaaaaataaaactaaaaatccaaatgtgaaggcataccaaatatttaagactccagacaagccaaaattcaaatatatatatatatacaaaatgctaacataagttaggaaaaaggaaataacctgaaatattcaaattttattggagaaatcagtgatacacaaatcctaacatgtctgtaggaataaaaccttgaaacaatctcagcatttgtacaacggaactggtatgagagctcccaagttaaaggaaaaaaagaatttcattggcatcatgtaccagtcttcttacacatgcaacagttgttaaaagtacactgtttctctgtaatgatctagatttgagaaaaacagcaccctctcaaaaatcagactacttctttgcattacttccagtatgaggcaaaagatttggattcctaataagctttcctacttaagaaagtgaggatctctaggaatttatcttcccagctcctatataagaattagttcttggctgggcacagtggctcacgcctataatcccagcattttgggaggccaaggtgggcggatcatgaggtcaggagttcaagaccagcctgaccaacatggtgaaacctcgtctctactaaaaatacaaaaattagctgggcatggcggcccatgcctgtaatcccagctactcaggaggctgaggcagaagaattacttgaacctgggaggtggaggttgcagtgagccaagattgcaccactgcattccttccctgaacgacagagtgagactgtctcaaaaaaaaaaaaaaaaagaattagttctttaacttgaatattctctgcttcatttccagtcagctgatttggtaataaaaatcattcattccacatctagcttattaacctgatgagaggattgcagttgtcagaagtatgggtaatggagtctgataggcctgggttcaaatcccagctattgcaattacttactagtagagtgacctgggcaaagaactttactttggccccatcatctttctgatttgcaataatgggatgctattgaagggcgattaaaaatgagataatgccacccaatccataagaaatgctagtacacagtaactaccactatttgcagtaatgagtyagcattcattgtatatgattttagctgatttggaggagcaactttactaaggtaggaagtgaggctaagagttaaattaatc

SEQ ID NO: 669484 - DNA, 660 bp, Homo sapiens
tgcataatttatattaagtgagtaaacataagtaaaatgtttccctgagttctgtgagccactccaacaaattaattgaacccaaggaaggagttattggaacccggatttatacccagttagtcaaaaacacaggtcacaaattggggcttacaattgacgtctgaagtgaaggcaatcatgtggaattgaatctttaacctgtgagatctgatgctctctccaggtagatggtgtcagaattgaattgaactatagggcaacccagctcgtgtccactggagaactgcttggtatgtatggagacctctctcccacatctggtgtcagaagtgtgtkgagtggagtgtgagagcaagaaaaacaatctatttttttcagacgcacataagtctttgcaatctccattttatagatgaaaaaactgaggcttagataacttgcccaaagctgacagatttaagattcaaccccaagactgcaatgctccagagtccatgctcttttgtgctgcaccacgctttcactgcattccaaaacggagggtagctatctgtcaccactgtacatcctatcttatttcaggcctcctgaggtttcctgtcattgggtttcatatctggctcctggaaattctctcagataggaaatgaagaagtg

SEQ ID NO: 669485 - DNA, 849 bp, Homo sapiens
aaaacaaaaaggaattaaatagttccaaattatagcgtggatagcagaaaaccatgcatataagtttttaaccgcctctaagaatctgaagtgtaaggttgtcaccattatgcatgagatgcacgtgaaattatacagagagaaagaacaggaaacctcaagtggagattgcttggaaagagtgacgaagccacatctaaaagcaagacaaagacagggagtgtcaagtactcattgcctcttacctgctgtacttcactttctccatttgagattttctcagtgtaaacaaaggagttgaatatccgctgcaatgaaaagaaaatgaacatgagattttctaaataagtcattttctacatgagtgtgtatgtgaataatttgtttacaacaaatagaatctagtagaaaaaaaatttaattaaaatgcagtaattttacagagagaaacccaagtatcagccaaagtcaatcacacttatgtaagcaatacccaggcacctctgtagcaaaataaaccaggtgttacactatatttttcattttcaaaaatacatttaattatagatttctggagtccatgccattttatccgactagtataatctgaccaagttgtgtttctcatttaaatcctgcgctccctgaatgctgtaattgtttacrgacactaacatctaatgcaataaagatctttaaaagggattctttccatattctctcatgtccctgttcagtcagtacctacccaatattatctatcaccttcgttactcaagtaccccgtcaggagagtaacataatagggcttgccaaatatgtgtggacttaagagaagatccagttctt

SEQ ID NO: 669486 - DNA, 650 bp, Homo sapiens
ggagtttcgctcttgttgcccaggctggagtccaatggcgcaatctcagctcactgtaacctccgcttcctgggttcaagtgattctcctgcctcagccccgctagtagctggcattacaggcatgcgccaccacgcctggctaattttgtgtttttagtagagatggggtttctccatgttgatcaggctggtctcraactcccaacctcaggtgatctgcctgcctcagcctcccaaagtgctgagattacaggcgtgagccaccgtgcctggctttaacttacttttctttggcacttaactatgtaccctgcacagttaaatgcattttaataagttaacccttttcatcccgacaacacccctatgagattggtacaattatttcttccgttttatagaaggtaaaaccgagccacagagaagttaagtaacttccccaaggtcactcagctggcagatagtagagctggaattcaaacctaggccacctggctccagaggttacaatcttgaatgaggggattctgggtgggcgattgccagacaaaaaaacccagccccaaggagagaaaggaggagaaggaggcaagaagagccccaacctcagccccagggagaggtggcagatgaggtggaaaagggatg

SEQ ID NO: 669487 - DNA, 650 bp, Homo sapiens
ggagtttcgctcttgttgcccaggctggagtccaatggcgcaatctcagctcactgtaacctccgcttcctgggttcaagtgattctcctgcctcagccccgctagtagctggcattacaggcatgcgccaccacgcctggctaattttgtgtttttagtagagatggggtttctccatgttgatcaggctggtctcaaactcccaacctcaggtgatctgcctgcctcagcctcccaaagtgctgagattacaggcgtgagccaccgtgcctggctttaacttacttttctttggcacttaactatgtaccctgcacagttaaatgcattttaataagttaacccttttcatcccgacaacacccctatgagattggtacaattatttcttccgttttatagaaggtaaaacmgagccacagagaagttaagtaacttccccaaggtcactcagctggcagatagtagagctggaattcaaacctaggccacctggctccagaggttacaatcttgaatgaggggattctgggtgggcgattgccagacaaaaaaacccagccccaaggagagaaaggaggagaaggaggcaagaagagccccaacctcagccccagggagaggtggcagatgaggtggaaaagggatg

SEQ ID NO: 669488 - DNA, 681 bp, Homo sapiens
tgcccagcatgtatctagcatccactctgggccaggtactgtgttaagtgctctgcaggcatcttccaggttcatcttgatgagcattctagaggaagacctcatagtatcatgtagatgaggaaacagaggcaccaagttgctaaagtagcttgcctaatgccacacagccggggagcaaagagtcaacgcaaaccccatccctgtgcactctctgctgcccgggactggggccatgccctgagtaccagtgtgtgcagcgcagagtgacgaagaagcaccagccaggcgatgagtgggggaagaacactccaggcagaggcagtagcaaatgcatttctttctctgagcctcagtttcctcacctgttaagtgtgtgcacgtatgcacacccttgtgtgcccactgtgtgtgtttgtgtggrggtcgggaggcgttgccttccggttgtctgagactccccctggaatctggaaatgatttttggatgcctctttaaattttgtgcctctcttgtcttacccctagccctatcaggctgctagctgtgattgccaattcagaaaatagataagtaaacagactgaccaggaccagtgagctggggcatagggagcatgagattggggtcttctggccacagtcacctgggcttgagcaggggctgtccctgtgagacag

SEQ ID NO: 669489 - DNA, 571 bp, Homo sapiens
ctgagaggtcagtggccatggaggaagcgagactccactgggacatctgtgttctgagaggcacaagccacgtgagaaggctctggaggatgagatgccatttgagaggggccaggagatatgccaaggagcatggaaggtgcagacacctgagtgaaacagctctctcggagggtcagccctggcatcgagccttcagaagactccagccctatctagactctgcctctatccacaccagagccccaaagctggaactgcccatctggagcctgtcaacctacagagccatgagagctaatatattgttatttcaaaccaccaagttttgggggtggtttgttatgcagcaatgacactgaaacaccctctcccctcctgccatttcctctgaaaacaaaactccagcttagtgctcttttgcttcttgcaactttttttccaggaactagagacatggagaaagcaargaatatgaagtgtggttgaagtttcagtgtaaatagactactggtaagtggtgtccacatttttacacaagcagatttttgatctctacctctttacttcc

SEQ ID NO: 669490 - DNA, 612 bp, Homo sapiens
taaattaacaacagcttgtctattagattattccagccataaaggactcagtatgtttcaaaatgctcgtgattttcaatacatttccgtgggtcgatttaataaagagtgatgctgggaatgcctttggcttgaaaatctgcaaaagcacgtttttagaaaatcccagagaataaatagtagctgctagttaggctgtggtaaaacacacctgtggctaatggaaaaggaaaggcttgagccgccctttggcactggcctctgggtctgtaccagggggattgctgtggcttcatgagctgtgtccggcctctgccccagtgccaggagggccacggctcttctcctgcctctgagccttgggtatggcagttatttcttctggctttgtttttgtggtctgtaacttatgaataatgaggcctaaytaacacacagggtggctgtgaggattaattggctaaggtttggggccaagcactttgaattggcacatattatgagtagttgttagggcaatcctgagatgcagttgaggttgtgaattttgattcgttcttctgtcaatttgatttttctgtgtaggtaggaggtcagtgaagtcagaaaaaa

SEQ ID NO: 669491 - DNA, 619 bp, Homo sapiens
tatgagcatgtccaaaatttatcagactagccttcatttgcagggcacttcccatggataagggtacaagcccagtgctcagaatcccagtaccactgcccagtgattctggttccctgccatgctcactcccttctccaatcccccatgctatcatggtacctcgagcaagtcctttccctccccaagactcagtttcttcatctataaagaggataataatataactaccccttagggttgctatgtggacccaggcagataatccatgcaaggcacctggcacagacctagggctagtattatctccttcaaccccctcccctgagagtcgaagtaggtatagtactatcatgatcttgtttctacaaatgaggaaacgaagaccrcagaaatgaactaacttgccctaggtcgtaaaccttgtaagtaacaagcctggactcaaacccctaaacttgactgccttccacagctgattggtactgggttgctatggaaacctgtagggcccagggtaagatctagtggaggccaagtgaggggtatgggggtggcagttctgttggtggtggggggagggaacactgacttaactccggccatccaaatacccaca

SEQ ID NO: 669492 - DNA, 607 bp, Homo sapiens
cacttttggtcacagaagtcttcctctgtattgatgattgttgttgtgttggtggtggctgtgtgagagcagraaaaaaaaacaacaacatggcttaagagagcttttccctaaacagtaagagaccaagtaagttgtccaaggtcatacaactaggaagtagtagagtaaggttgtgaacacaggcagcttaggtccagaacccatgggtttaaccactacactgtacagtcccttatgtgcttgacattgacaataacccaggcaggcttggattctgctgttggttttgaagatggaatccagttcctcaaaggcaaaataatcttccaaaatcactcagctagtaagtcatggtcctgggattcaaatccaaaacagaaattccatgcttaggccaaggaaggaaattataagctttagaagatggcaccatttatccattcattcattcattcattcatccatccatcatgcactcagcacacatatattgatgcttcctgccagtgaggcttgttctgtgagctgaggatccagagaaaattcaaccattttgaatttatgtctgcttggaactcacataaaatttgggggacatgccaca

SEQ ID NO: 669493 - DNA, 607 bp, Homo sapiens
cacttttggtcacagaagtcttcctctgtattgatgattgttgttgtgttggtggtggctgtgtgagagcaggaaaaaaaaacaacaacatggcttaagagagcttttccctaaacagtaagagaccaagtaagttgtccaaggtcatacaactaggaagtagtagagtaaggttgtgaacacaggcagcttaggtccagaacccatgggtttaaccactacactgtacagtcccttatgtgcttgacattgacaataacccargcaggcttggattctgctgttggttttgaagatggaatccagttcctcaaaggcaaaataatcttccaaaatcactcagctagtaagtcatggtcctgggattcaaatccaaaacagaaattccatgcttaggccaaggaaggaaattataagctttagaagatggcaccatttatccattcattcattcattcattcatccatccatcatgcactcagcacacatatattgatgcttcctgccagtgaggcttgttctgtgagctgaggatccagagaaaattcaaccattttgaatttatgtctgcttggaactcacataaaatttgggggacatgccaca

SEQ ID NO: 669494 - DNA, 628 bp, Homo sapiens
aacaaagacaggcacctggttttctgcaactcaggctttcacagagttttattttttattttatttatttatttttgagacagagttttgcttttgttgcccaggctggagtgcaatggcatgatctcggctcactgcaacctccatctcctgggttcaagtgattctcctgcctcagcctcccgagtagctgggattacaggcatgcgccacgatgcctggctaattttgtatttttagtagagatggggtttctccatgttggtcaggctggtcttgaactcctgacctcaggtgatccacctgcctcggcctcccaaagtgctgagattacaggtgtaagtcaccgcacaccgcccacagagttttaataatttaatcctttcagtgttaaagacacacccttttgactgccctgtaggacagtcaaccattctttgtagattagaagacttgattttttttttwaaagctcagtctctaacatacattctaaaagctttctatggtataaatttaggtttaaatttctaatttcagcctccaaaaagacaaagtcctgaaacaacctttagcttgtttaaaatgcttacccaagtcaatgagccctgatctttttttttttttc

SEQ ID NO: 669495 - DNA, 670 bp, Homo sapiens
ctcttctttattggtggaagggaggtgggtgttaagtgacatgctatataaactgcatgctatttgcaagcggttgcagattttctgtacagcccaccaccactgggctgcgtggttatgttgtccagcctgccaccactggacaggaggaggatggatatgttgccagcgcactgccaccggactgtctctcctgtgaaagcccctaataaaaccccatgtctcgtttgctcactccaggtctcttctttggcctcctgaacctggtgtcttctctagtgaggttaataggggtttggcacaacagacggcagatgcatggttgaagccatggcrtatgatgaaaaacactaaatatcctataagatgcatcaccaccagtatttttatcatcataaaactttccaaatgagaggggccctgtggtcattttgttcaacttcacatttcacagatggttgaactgaggcccagagaaatgtcaatttgttagttattagtaaaggccgaactacaattcattgcacacttgtaacatccagcgggctataagcgcatcccaacctggctatgtcctccctttggatttctcattctaccttactagaaaaacatgggctaggtaaaataaatagaggctgagcaattttcacttggattataaaccagg

SEQ ID NO: 669496 - DNA, 907 bp, Homo sapiens
tccagctaattttttgtttttttttttggtagacacagggtttcaccatgttggccaggctagtctcaaactcatgacctcaagtgatcgcgcctgcctcagcctyccaaagtgttgggattacaggcatgagtcaccgtgcccagcctgattagcttaaacagtgtatgatgagacatataaattaatatatcaacctcttccagtttcttttgtatccaggatctagtacttggatactgctctatttttttgtttcatttcctactcctcacccctctgctaccaaagcccaatccatttatcccataaacattcaaggttaacccaaagtcaggttgtgaattagtaaggaatgaaacgctgatgagtcaggtgggcccaaccatgtcaccaccccaccttccttattgaacttgctgattgtaaggtggagtcctactgataatgtgcagacgccacatctctgagaagttactccttttgtgtggaccgcaatcagattgtcttccctgaataaaagggaaatctgggagacattttccaggattttaaaagactcctgaggaaggcgagtgtcgtgagattaaagcaaggagcaagtgcttcttcaatgcccaggttgttcgaagcatctgataatcagctgtcctgtctgcatttctttccttctctgttttgatgttggcttgattgtgctatacattttgctatcttgcccaagtataatcagcaggaggagtcttttggaataaaagcgtctttgactttcatacacattttctgagacagaagaaaaaatcagaagtcgtttttagctttaaaaatattgtactgcctctgcagtgtttccagagaaagttggtagcagggaatggagttgaagaggactctatcactgtgagag

SEQ ID NO: 669497 - DNA, 1794 bp, Homo sapiens
catggcaaatacacacacacacccctataaaaatccagcatcagggtgtgggaaggtgggttcttcccaaactattggctgaaatgtagactggtagaacatttacgggaggaaaacttggcagtatctattraaatgtacaatgtacatacacataccttgtgattcatctatttcacttataggattcaatgccacatgtgcctcaagatatgtgtatatatgtatatattcggttcactggtgttttgtttagttacaaatgaaacaaatttaaaaattttaaaaactgtcaaatgtgtgttgttgattttgttgagagcctcagagaagaaagtaaacaatgaattggtctctaatttcccttgaaaattccttaaatcacccataaattacatatatgtgtttcgtgtgaactccgtacagcaatacaaatgtgtaaatatattaatttacagtatagtatatagtttcataaagtggcggtaataaaatgaaatcactcaagtgctgtgctgcttagacacagttcaacaaatttgtaaatattcaagcctgctagctctgcctgcctgtcagtcatcaaccgtctgtgcacctctgttctttcatctgaaaaatggggatgagaaacattcctgcctcaaaaggttatcgagaggagcaatgaagttaattcagataaagtgcttagcattatgtctggcacatcttaagcacacagtaagtgtaggatattattaggcactcaaggggttgacatttggaaagcagatgtaggtaattcaggacaatttttctataattcaaggtgatgagggctacggcagcataggcacatgctaacatggagtattagaccttcccatcaggactcagtaccatggaagctgcaggtgaccccattccctgagaccaagccaatggctcatggtggagacaaacagctaatatgcttttgcctctgatggtcacattccatttctccatgcctatgctttctaccattagcacatatgcttaagagtttcctgtgtttgttctctggaaaataaactgttggaaagaaagatcagttttcattagcagtgtcattactttcaagaaaatgctttctcaaaagaggtaaagaacactcagaaggttggtatcaatgtgacctcccctgaaagcctcagtgaactgctgactcgagcttcaaggctatcaccacacatcagccacataccagggtcgcggtgacatgtcagcagaagtagaaggaagctaggtaggactagggcaagctggcgagccctgtgcttcaggggtgggtgattctcaattcagctgctggaagcacaggtccggtgttgccagatcttctcatttttaaagaaaaactctatgcttgaatttttatgtgaaatcttacaattttttaatattgtcaactaactcaaagtaaatgacagaaactccctgggaccaaccaaagacttttcgagatggacctggcccaggggccccagttggtgacttctgtgacatacatttgtccttacagatgtgaaactgcatctgctcatagaccatgactgtaaatatcataggaaaactatctgctgtaccctttgggtcctaccaagcccagcattacatgggaggtggcttcccatccccagcctgtcaatcatccgcctctagaacttggcccatcctcccctccaccaggcgctcgtgggccactacccctgctgggggccattgcgtgaaataacacctgtaactgtacagtgctatccacacaactca

SEQ ID NO: 669498 - DNA, 1794 bp, Homo sapiens
catggcaaatacacacacacacccctataaaaatccagcatcagggtgtgggaaggtgggttcttcccaaactattggctgaaatgtagactggtagaacatttacgggaggaaaacttggcagtatctattaaaatgtacaatgtacatacacataccttgtgattcatctatttcacttataggattcaatgccacatgtgcctcaagatatgtgtatatatgtatatattcggttcactggtgttttgtttagttacaaatgaaacaaatttaaaaattttaaaaactgtcaaatgtgtgttgttgattttgttgagagcctcagagaagaaagtaaacaaygaattggtctctaatttcccttgaaaattccttaaatcacccataaattacatatatgtgtttcgtgtgaactccgtacagcaatacaaatgtgtaaatatattaatttacagtatagtatatagtttcataaagtggcggtaataaaatgaaatcactcaagtgctgtgctgcttagacacagttcaacaaatttgtaaatattcaagcctgctagctctgcctgcctgtcagtcatcaaccgtctgtgcacctctgttctttcatctgaaaaatggggatgagaaacattcctgcctcaaaaggttatcgagaggagcaatgaagttaattcagataaagtgcttagcattatgtctggcacatcttaagcacacagtaagtgtaggatattattaggcactcaaggggttgacatttggaaagcagatgtaggtaattcaggacaatttttctataattcaaggtgatgagggctacggcagcataggcacatgctaacatggagtattagaccttcccatcaggactcagtaccatggaagctgcaggtgaccccattccctgagaccaagccaatggctcatggtggagacaaacagctaatatgcttttgcctctgatggtcacattccatttctccatgcctatgctttctaccattagcacatatgcttaagagtttcctgtgtttgttctctggaaaataaactgttggaaagaaagatcagttttcattagcagtgtcattactttcaagaaaatgctttctcaaaagaggtaaagaacactcagaaggttggtatcaatgtgacctcccctgaaagcctcagtgaactgctgactcgagcttcaaggctatcaccacacatcagccacataccagggtcgcggtgacatgtcagcagaagtagaaggaagctaggtaggactagggcaagctggcgagccctgtgcttcaggggtgggtgattctcaattcagctgctggaagcacaggtccggtgttgccagatcttctcatttttaaagaaaaactctatgcttgaatttttatgtgaaatcttacaattttttaatattgtcaactaactcaaagtaaatgacagaaactccctgggaccaaccaaagacttttcgagatggacctggcccaggggccccagttggtgacttctgtgacatacatttgtccttacagatgtgaaactgcatctgctcatagaccatgactgtaaatatcataggaaaactatctgctgtaccctttgggtcctaccaagcccagcattacatgggaggtggcttcccatccccagcctgtcaatcatccgcctctagaacttggcccatcctcccctccaccaggcgctcgtgggccactacccctgctgggggccattgcgtgaaataacacctgtaactgtacagtgctatccacacaactca

SEQ ID NO: 669499 - DNA, 1794 bp, Homo sapiens
catggcaaatacacacacacacccctataaaaatccagcatcagggtgtgggaaggtgggttcttcccaaactattggctgaaatgtagactggtagaacatttacgggaggaaaacttggcagtatctattaaaatgtacaatgtacatacacataccttgtgattcatctatttcacttataggattcaatgccacatgtgcctcaagatatgtgtatatatgtatatattcggttcactggtgttttgtttagttacaaatgaaacaaatttaaaaattttaaaaactgtcaaatgtgtgttgttgattttgttgagagcctcagagaagaaagtaaacaatgaattggtctctaatttcccttgaaaattccttaaatcacccataaattacatatatgtgtttcktgtgaactccgtacagcaatacaaatgtgtaaatatattaatttacagtatagtatatagtttcataaagtggcggtaataaaatgaaatcactcaagtgctgtgctgcttagacacagttcaacaaatttgtaaatattcaagcctgctagctctgcctgcctgtcagtcatcaaccgtctgtgcacctctgttctttcatctgaaaaatggggatgagaaacattcctgcctcaaaaggttatcgagaggagcaatgaagttaattcagataaagtgcttagcattatgtctggcacatcttaagcacacagtaagtgtaggatattattaggcactcaaggggttgacatttggaaagcagatgtaggtaattcaggacaatttttctataattcaaggtgatgagggctacggcagcataggcacatgctaacatggagtattagaccttcccatcaggactcagtaccatggaagctgcaggtgaccccattccctgagaccaagccaatggctcatggtggagacaaacagctaatatgcttttgcctctgatggtcacattccatttctccatgcctatgctttctaccattagcacatatgcttaagagtttcctgtgtttgttctctggaaaataaactgttggaaagaaagatcagttttcattagcagtgtcattactttcaagaaaatgctttctcaaaagaggtaaagaacactcagaaggttggtatcaatgtgacctcccctgaaagcctcagtgaactgctgactcgagcttcaaggctatcaccacacatcagccacataccagggtcgcggtgacatgtcagcagaagtagaaggaagctaggtaggactagggcaagctggcgagccctgtgcttcaggggtgggtgattctcaattcagctgctggaagcacaggtccggtgttgccagatcttctcatttttaaagaaaaactctatgcttgaatttttatgtgaaatcttacaattttttaatattgtcaactaactcaaagtaaatgacagaaactccctgggaccaaccaaagacttttcgagatggacctggcccaggggccccagttggtgacttctgtgacatacatttgtccttacagatgtgaaactgcatctgctcatagaccatgactgtaaatatcataggaaaactatctgctgtaccctttgggtcctaccaagcccagcattacatgggaggtggcttcccatccccagcctgtcaatcatccgcctctagaacttggcccatcctcccctccaccaggcgctcgtgggccactacccctgctgggggccattgcgtgaaataacacctgtaactgtacagtgctatccacacaactca

SEQ ID NO: 669500 - DNA, 1794 bp, Homo sapiens
catggcaaatacacacacacacccctataaaaatccagcatcagggtgtgggaaggtgggttcttcccaaactattggctgaaatgtagactggtagaacatttacgggaggaaaacttggcagtatctattaaaatgtacaatgtacatacacataccttgtgattcatctatttcacttataggattcaatgccacatgtgcctcaagatatgtgtatatatgtatatattcggttcactggtgttttgtttagttacaaatgaaacaaatttaaaaattttaaaaactgtcaaatgtgtgttgttgattttgttgagagcctcagagaagaaagtaaacaatgaattggtctctaatttcccttgaaaattccttaaatcacccataaattacatatatgtgtttcgtgtgaactccgtacagcaatacaaatgtgtaaatatattaatttacagtatagtatatagtttcataaagtggcggtaataaaatgaaatcactcaagtgctgtgctgcttagacacagttcaacaaatttgtaaatattcaagcctgctagctctgcytgcctgtcagtcatcaaccgtctgtgcacctctgttctttcatctgaaaaatggggatgagaaacattcctgcctcaaaaggttatcgagaggagcaatgaagttaattcagataaagtgcttagcattatgtctggcacatcttaagcacacagtaagtgtaggatattattaggcactcaaggggttgacatttggaaagcagatgtaggtaattcaggacaatttttctataattcaaggtgatgagggctacggcagcataggcacatgctaacatggagtattagaccttcccatcaggactcagtaccatggaagctgcaggtgaccccattccctgagaccaagccaatggctcatggtggagacaaacagctaatatgcttttgcctctgatggtcacattccatttctccatgcctatgctttctaccattagcacatatgcttaagagtttcctgtgtttgttctctggaaaataaactgttggaaagaaagatcagttttcattagcagtgtcattactttcaagaaaatgctttctcaaaagaggtaaagaacactcagaaggttggtatcaatgtgacctcccctgaaagcctcagtgaactgctgactcgagcttcaaggctatcaccacacatcagccacataccagggtcgcggtgacatgtcagcagaagtagaaggaagctaggtaggactagggcaagctggcgagccctgtgcttcaggggtgggtgattctcaattcagctgctggaagcacaggtccggtgttgccagatcttctcatttttaaagaaaaactctatgcttgaatttttatgtgaaatcttacaattttttaatattgtcaactaactcaaagtaaatgacagaaactccctgggaccaaccaaagacttttcgagatggacctggcccaggggccccagttggtgacttctgtgacatacatttgtccttacagatgtgaaactgcatctgctcatagaccatgactgtaaatatcataggaaaactatctgctgtaccctttgggtcctaccaagcccagcattacatgggaggtggcttcccatccccagcctgtcaatcatccgcctctagaacttggcccatcctcccctccaccaggcgctcgtgggccactacccctgctgggggccattgcgtgaaataacacctgtaactgtacagtgctatccacacaactca

SEQ ID NO: 669501 - DNA, 1794 bp, Homo sapiens
catggcaaatacacacacacacccctataaaaatccagcatcagggtgtgggaaggtgggttcttcccaaactattggctgaaatgtagactggtagaacatttacgggaggaaaacttggcagtatctattaaaatgtacaatgtacatacacataccttgtgattcatctatttcacttataggattcaatgccacatgtgcctcaagatatgtgtatatatgtatatattcggttcactggtgttttgtttagttacaaatgaaacaaatttaaaaattttaaaaactgtcaaatgtgtgttgttgattttgttgagagcctcagagaagaaagtaaacaatgaattggtctctaatttcccttgaaaattccttaaatcacccataaattacatatatgtgtttcgtgtgaactccgtacagcaatacaaatgtgtaaatatattaatttacagtatagtatatagtttcataaagtggcggtaataaaatgaaatcactcaagtgctgtgctgcttagacacagttcaacaaatttgtaaatattcaagcctgctagctctgcctgcctgtcagtcatcaaccrtctgtgcacctctgttctttcatctgaaaaatggggatgagaaacattcctgcctcaaaaggttatcgagaggagcaatgaagttaattcagataaagtgcttagcattatgtctggcacatcttaagcacacagtaagtgtaggatattattaggcactcaaggggttgacatttggaaagcagatgtaggtaattcaggacaatttttctataattcaaggtgatgagggctacggcagcataggcacatgctaacatggagtattagaccttcccatcaggactcagtaccatggaagctgcaggtgaccccattccctgagaccaagccaatggctcatggtggagacaaacagctaatatgcttttgcctctgatggtcacattccatttctccatgcctatgctttctaccattagcacatatgcttaagagtttcctgtgtttgttctctggaaaataaactgttggaaagaaagatcagttttcattagcagtgtcattactttcaagaaaatgctttctcaaaagaggtaaagaacactcagaaggttggtatcaatgtgacctcccctgaaagcctcagtgaactgctgactcgagcttcaaggctatcaccacacatcagccacataccagggtcgcggtgacatgtcagcagaagtagaaggaagctaggtaggactagggcaagctggcgagccctgtgcttcaggggtgggtgattctcaattcagctgctggaagcacaggtccggtgttgccagatcttctcatttttaaagaaaaactctatgcttgaatttttatgtgaaatcttacaattttttaatattgtcaactaactcaaagtaaatgacagaaactccctgggaccaaccaaagacttttcgagatggacctggcccaggggccccagttggtgacttctgtgacatacatttgtccttacagatgtgaaactgcatctgctcatagaccatgactgtaaatatcataggaaaactatctgctgtaccctttgggtcctaccaagcccagcattacatgggaggtggcttcccatccccagcctgtcaatcatccgcctctagaacttggcccatcctcccctccaccaggcgctcgtgggccactacccctgctgggggccattgcgtgaaataacacctgtaactgtacagtgctatccacacaactca

SEQ ID NO: 669502 - DNA, 1794 bp, Homo sapiens
catggcaaatacacacacacacccctataaaaatccagcatcagggtgtgggaaggtgggttcttcccaaactattggctgaaatgtagactggtagaacatttacgggaggaaaacttggcagtatctattaaaatgtacaatgtacatacacataccttgtgattcatctatttcacttataggattcaatgccacatgtgcctcaagatatgtgtatatatgtatatattcggttcactggtgttttgtttagttacaaatgaaacaaatttaaaaattttaaaaactgtcaaatgtgtgttgttgattttgttgagagcctcagagaagaaagtaaacaatgaattggtctctaatttcccttgaaaattccttaaatcacccataaattacatatatgtgtttcgtgtgaactccgtacagcaatacaaatgtgtaaatatattaatttacagtatagtatatagtttcataaagtggcggtaataaaatgaaatcactcaagtgctgtgctgcttagacacagttcaacaaatttgtaaatattcaagcctgctagctctgcctgcctgtcagtcatcaaccgtctgtgcacctctgttctttcatctgaaaaatggggatgagaaacattcctgcctcaaaaggttatcgagaggagcaatgaagttaattcagataaagtgcttagcattatgtctggcacatcttaagcacacagtaagtgtaggatattattaggcactcaaggggttgacatttggaaagcagatgtaggtaattcaggacaatttttctataattcaaggtgatgagggctacggcagcataggcacatgctaacatggagtattagaccttcccatcaggactcagtaccatggaagctgcaggtgaccccattccctgagaccaagccaatggctcatggtggagacaaacagctaatatgcttttgcctctgatggtcacattccatttctccatgcctatgctttctaccattagcacatatgcttaagagtttcctgtgtttgttctctggaaaataaactgttggaaagaaagatcagttttcattagcagtgtcattactttcaagaaaatgctttctcaaaagaggtaaagaacactcagaaggttggtatcaatgtgacctcccctgaaagcctcagtgaactgctgactcgagcttcaaggctatcaccacacatcagccacataccagggtcgcggtgacatgtcagcagaagtagaaggaagctaggtaggactagggcaagctggcgagccctgtgcttcaggggtgggtgattctcaattcagctgctggaagcacaggtccggtgttgccagatcttctcatttttaaagaaaaactctatgcttgaatttttatgtgaaatcttacaattttttaatattgtcaactaactcaaagtaaatgacagaaactccctgggaccaaccaaagacttttcgagatggacctggcccaggggccccagttggtgacttctgtgacatacatttgtccttacagatgtgaaactgcatctgctcatagaccatgactgtaaatatcataggaaaactatctgctgtaccctttgggtcctaccaagcccagcattacatgggaggtggcttccmatccccagcctgtcaatcatccgcctctagaacttggcccatcctcccctccaccaggcgctcgtgggccactacccctgctgggggccattgcgtgaaataacacctgtaactgtacagtgctatccacacaactca

SEQ ID NO: 669503 - DNA, 557 bp, Homo sapiens
gtaagtcatggaaacagagttgggtaggtattttgggcctgttcacaagaagggaagaatagattcttaagtagctgaatgctaaaagctattatttgggaataattactctaaaattcctttgaaattgcttttgaaagactttctctwatgtagattatagcgtattgagataaaatatgactgtatcctgccactttactgaaaattcattgtttctcttccagttctagttctttcttgaagccactcatgcataagaggtatgagaagtcatatttgagttagagccagatgaaaacctcaagaattaccagttattccactgaagtaaagcactgtttccagaggacttccatttgaaggaaaacatgcttcttccttcattcagtgcacacttattggatgccttctctgagccttgtgctgagccacaagagctaaagcataaacccaccaggaactaacaatacctaacataagttgattttttttcagagtgcattgatcacagtagatcatagtcaagcattatcttcatagaatagaacttgatg

SEQ ID NO: 669504 - DNA, 601 bp, Homo sapiens
aaaaacactctccaaaatcatgttgactgttttgtttccatagccactagataattgaactcatattctatagatgatgactacttgactgagaagaattttaaaaattgacgatacctttgtgtaaatttgtacagatatgatgggaatagacaatgcatagttctgagcatatgctcttttttttgtccatttttacacaaaaggatacaaccaacaccagtagttagtatatgggataaccttttgagaataatgaaagcaacaaagagtattttttaagtaagtctagagcttagctttctcacctttaaagtgacagactggcccaggcgatacttccttaaatacacgagcctagcttcatcactctgtgcttctgctagtctyagagatgactgagtcagaaaagaagattaagggctaactaccatttaacaggatgagagtttcaccataactttggttgttctgttcaaaaagcactatagccaggcatggtgacatgtgcctgtaattacatcctctcaggaggctgaggcaggaggattgcgtgagcccaggacaatagtgagaccctatctcaaaaaaaaaaaaaaaa

SEQ ID NO: 669505 - DNA, 1485 bp, Homo sapiens
caaacttacaggcactttaagatttatggagtacaaaagatcacactatagaatggcttcagtgaaagcgtatttttctcccaattcatatttatgctctggatacttttatatttctgattttctggtacctatatttattgcaaaaataaaaagcattcatgaatcttattcctagggcacaatttgtattctgcagaagaaaacctttgcacctgccactaaaatgcatccacttctggggtggaatgcaccagctgttcccagtctccaacggcacgccaggccgttcagcaccaagaatgaggcatcatatcccaggcagatgaaactggtgaggaaatttcaagtcgacagaatgcaattacccaaattgaaattaggccaggggcatatcaggaggcccttcccatctgttggggaaaaggatcaccagatatttactgagggcaagtggtcagaatcttagctttaggaatcatttcaaaggcagaaattttaaaatataccaaaggaaaactgcacctggtataaaaatcatatcccttctctggcaaataaataatattagggccttgagaagctcagccctttcctgctctgggagaaaataaatgtttatggatggggtggttaaatatttctacatcagctactcttagcaaggacatgctataatggacaattggttatactggaactgacaaaaagagatttcccaaaccaaacatattgaatccaatacatttatccctggttataatggatagagccttccattatgagcttatgaaacaacaccattcgatttttctaggggccttgacataagcattgtttctttaccagaaaaaataagctaatttttagagttcgtagcaaaaataaataagctgttgttgtacaggccttgactagttcccatgtgacatacatcagaaccatagactctgcaggtccatttggtacaggtacaggggtcttctgcctgtaatccctgtccttggtaacatttgtagctttctcctgggaggatgactggtgagggaatagatgaatttatcttagtctttgtaccattgtaaacccaagcattggcataaggtccacacagccctttagaaataaatgaataaagcatttcacaccaaatcatgctttgggggtaatccatgtccatcgtatcgagcaaataaactgactttcttttattgattcctctcaagaacttgccttttttggggaataagaacccaacayttccagcctgagtgaggaataatagaggcacctctgggccagacatcttcttttccagctgctgccttttgaagatgtggtggcctcgggttcccacatgccacaccccaaagttggtgccagggagtcttctctgtaccatccctgcaggtggctatttgatagcacattgctaatcctgaaaaactctcacatctctttcccattggatgtaaagaggaaggc

SEQ ID NO: 669506 - DNA, 1485 bp, Homo sapiens
caaacttacaggcactttaagatttatggagtacaaaagatcacactatagaatggcttcagtgaaagcgtatttttctcccaattcatatttatgctctggatacttttatatttctgattttctggtacctatatttattgcaaaaataaaaagcattcatgaatcttattcctagggcacaatttgtattctgcagaagaaaacctttgcacctgccactaaaatgcatccacttctggggtggaatgcaccagctgttcccagtctccaacggcacgccaggccgttcagcaccaagaatgaggcatcatatcccaggcagatgaaactggtgaggaaatttcaagtcgacagaatgcaattacccaaattgaaattaggccaggggcatatcaggaggcccttcccatctgttggggaaaaggatcaccagatatttactgagggcaagtggtcagaatcttagctttaggaatcatttcaaaggcagaaattttaaaatataccaaaggaaaactgcacctggtataaaaatcatatcccttctctggcaaataaataatattagggccttgagaagctcagccctttcctgctctgggagaaaataaatgtttatggatggggtggttaaatatttctacatcagctactcttagcaaggacatgctataatggacaattggttatactggaactgacaaaaagagatttcccaaaccaaacatattgaatccaatacatttatccctggttataatggatagagccttccattatgagcttatgaaacaacaccattcgatttttctaggggccttgacataagcattgtttctttaccagaaaaaataagctaatttttagagttcgtagcaaaaataaataagctgttgttgtacaggccttgactagttcccatgtgacatacatcagaaccatagactctgcaggtccatttggtacaggtacaggggtcttctgcctgtaatccctgtccttggtaacatttgtagctttctcctgggaggatgactggtgagggaatagatgaatttatcttagtctttgtaccattgtaaacccaagcattggcataaggtccacacagccctttagaaataaatgaataaagcatttcacaccaaatcatgctttgggggtaatccatgtccatcgtatcgagcaaataaactgactttcttttattgattcctctcaagaacttgccttttttggggaataagaacccaacatttccagcctgagtgaggaataatagaggcacctctgggccagacatcttcttttccagctgctgccttttgaagatgtggtggcctcgggttcccacatgccacaccccaaagttggtgccagggagtcttctctgtaccatccctgcargtggctatttgatagcacattgctaatcctgaaaaactctcacatctctttcccattggatgtaaagaggaaggc

SEQ ID NO: 669507 - DNA, 2579 bp, Homo sapiens
gctgttgtcctggacatccctacttgtgactacagaggaatattcaccatttaacccacatctttcataactcaaatcagagcatgaaaaagtatgaaaggtgatgtgaaatcagaaattaagttaatgcttaggattatgaaaagcattaaaagatagataatcatgctgaatgtcattgcctggagatggattaaatggcaacgaggaagaagggagagacagagaaagatatgacatttttcagtagagcttacaaagcaattttttcctcttaatattaagcaatatttgtcagtggcattatttctttattaaaaataaggatttcagtttcatgatttataaacagctaacattaggtaactacggtccttgtttgtttttgtgatacttttctctgatgtttctttctttttgtgaattactttgagatactaattaacagcttggtaaaaacatagcagcagctcacatcttgtcttcattctctattgtatgttttgactaaatttgcctctctaaatgctctgaaagaaaggaaatgaaataaaatagaggtttctgttttaaaaacaaactaggccgcgtgtgatggctcatacctgtaatcccagcactttgggaggctgaggcgggcacatcacctgaggtcaggagttcgagaccagcttggccaacatggtgaaaccccgactctactaaaaatacaggaattagctgagcgtggtggcaggcacctgtaatcccagctactcgggaggctgaggcaggagaattgcttgaatttaggaggtggaggttgcagtgagccaagattgagccactgtactccagccttggcgacagaacaagactccatctcagaacacaacaacaacaaaccagtaattctcccttccatcaactaattcttttatcgttaggctatgcattgagttgatcctaggcccctggcctcctttctttccacaagagctaagttaagatgggcaaggttattgtatctttagggttagtgattgcttggtggaattcacccccgtcaccctgacccagggtgtccttacatgtttgagcatgcatctctgttgctgttgtcattgtagtggaaggagaggttggacttggagccagtcttctccaggccacccatcaatagaagcatgcttcctacctttttatggatggggagtcagaagttttctctctcttaggttcctttatgattcttttgtagaccttgtatactcttggtgatgctcatctggatctagtgctcatttgtttaattcaacagtgctgtataggcagtatgctaggagatgggaaggctagagagcagtgtctcaagtttttacgttgttatttttaaattatgtttctttttttatatatatatttttattatactttaagttctagggtacatgtgcacaacgtgcaggtttgttacatatgtatacatgtgccatgttggtgtgctgcacccattaactcgtcatttgcattaggtatatctcctaatgctgtccctctcccctctccccaccccacaacagtccccggtgtgtgatgttccccttcctgtgtccgagtgttctcattgttcagttcccacctatgagtgagaacaggtgtttggttttttgtcctcgcratagtttgctgagaatgatggtttccagcttcatccatgtccctttttatttttatttttttcgagacggagtcttcctctgtcacccaggctggattgcagtggtgcaatcttggctcactgcaacctccgcctcctgggttcaagcaattctcctgcctcagcctcccgagtagatgggattacaggcgcccgccactgcacctggctaatttttgtatttttagtagagatgggatttcgccatgttggccaggctgttctcaaactcctgacctcgtgatctgcccgcctcagcctcccaaagtgctgggattacaggcatgagctactgcgcctggcctaaagcatgtttcttatgtaatctaatttagcacaataatcttttgtttctgattatttttgctggcattttattagtgcttataacaacccaggtgcctttccagaggtctaagttgcttgactgggatgacttactcattcctttgtttgttcctcccctcttctcttggtaggtcgagctgatccagagtgtatgctgggccacttgctgagaatactcttcaagaatgatgatttcatgaatgcagtaggtttgcttcttacttttctccagcgattatcatctgtagatgctgtatctttattgttttttcgtgaatagtttgccttctcctaaggccttgacaaagttgggagtagagttttttgccaaagtcctggttgtggccataatgctttctctttggtatgtactttgatattggtgaggcctcccaaggtatctacgctcattcttgggcaaaatgattttgaatttgagaatataggggccctcttcagtttttcaatggaaaaataagagtgatgcatacagcatgattctgcactgacactgtggggtatgcattgggca

SEQ ID NO: 669508 - DNA, 646 bp, Homo sapiens
tttcatatattccctctcccaccccatctcttgaaagccataaatatcattacctaagagctttcacaaaaaagaagtttgattctaaagttgaaaacaaaagtaagacttattgatgaatgtttctaaagtgcagaggctcagagggttcttaagaatgcatctagttatccctttgccttcaggcatatctacaactaaatcatatttgtagacaataatagaatcagtaatagtactaaccttttatgttttgtagcacttgagaaataggagtagttaagaatccacacactttaaaaacttccagaaaatatttcccctggtttattgtaactagggagagggtgctggcctttccaaccagagaggtagagcctagttattttggttcagtttgaaatcaatgcccagaggccracagggccgtgtgaaagcagaaagcaaggtgatgaaggcctcctcagagatgagttgaagagctccaggaagctggcagcataggctctatggggctgaccgtgaggctgacgtacctctgcttctgcttgctctatgcagacataatataggtgatatctctgatttataatgacagtgtatttctagtttgtttttaatcccccgaattcaaaagaaattaata

SEQ ID NO: 669509 - DNA, 663 bp, Homo sapiens
aggtgttttgtagatgtaggttaacatctataatcaattgactttaaagtaaagaaagtaactctggataaggtggtgagcctcacctaatcagttgaggaagtaagagaaaaacctgaggtttcccagaaaagaataaattgtgcctcaagtttgcagcatcaactcttggtgagttcccggcagttggtctgctttgcacatttttctcatgccagcgtcacaatcgtgcaatctacttccttcaaacaaattttcatgtatcctattgtttatcttttctctggagaaccctaatrcaatatgtgtatgagtgtgcatgtgtgtgtgtgtgtgtatgattgaaatctctgaagaaaaaaaaaacaacgtggtagagctaatatttaaaattataattcaagaaataaaaaaataaaacactgtattaaaaaatctgagttacatttaaagcagcaataatagaaaatttatgccctagcatccatgtcaataaaaataaaagaatgagaaaaaagacttgcaatcctaagtaaaaaaaaagaaagaaaacaacaaagaaaaacaaaagatttaataataataatagagaaatgtgataaaaacagaaaaagactgcattaaataacttttgaaataataatgaacaaaaaactctaggta

SEQ ID NO: 669510 - DNA, 1696 bp, Homo sapiens
tgttgctctcggattataccctttctgtccaatcacatttttatacagctgtccattcttcatcaaacccaagcataaaaaaraaagttcttcctggcttttgggtcttcatttctcaaggctcctatgtcgtgtaaaactttggttaaataaatgtattatgattttctctagttaacctgtatttttttataagaatattggccatgacccttatgatgggttaggaatagtatcataatttcctgttcctacatttgaaaacacaatatttctactgcactatttctgacctccttaaaggaattctagattatttccttttcaatccattttgtaatcccttataacaacttctcacccagatctgatccataagtatttataaatagcctatactttgtatatgggtttgctggttctttcatttaatattctttaattcttcttccttggtggcttctgcccatttagcattcttttaaacttcccagtgtttaagtctcattgctcaaagtgggaaatccctaaacttgtgaggcggagcttacttcccactatagaagctcccttgtagctatgagtaagccctaacctactccaccccagacataagcctccacctcagatgagtctccacccaacccagccacgaaattagaggctggtgacccaagaaagcagggaggctgctggatccttgctggggagaatggaggcagctacctccagtttctattggcaacattctgagtcccacatcatggcatcagcaaaatgcagcatctatggtatctgtgccatttgtgcctgtggtgtcttcatggcaccagctctgtggtctgcccatctcttcctcctagacattttatgagctagccaatatcctcttaacaaaatccaattctgcttaaattgaaaagggtttgtatctattatgagtcacttagtgttctaatggtttacttaattttacacatacctttttctatgtcacagcactttacaaatattaatcatttcattcagctcagatgccaagtctctggagtagaaaatattatccccattttatacaaacggaaaccaaggtccagagaggatacttagtttgccttagataactcagttggtaagtgcagaactggtattcaaatccaggctgtccatgctcttaaccattcttttcccctgatccccagagagatctttccccattatcttctcttgcaaatcccctctccccaccacttctctctgccttcatgcttgggcattccctatcctgtaatgaaagaaagaaagagagacagagagagaaagaaaagaaagaaagagaaagaaagaaagaaagaaagaaagaaagaaagaaagaaagaaagaaagaaagaaagaaagaaagaaaggcaaatttcatgcagagtaacaaaggtaggaatgacaattgatttcttttcaataacaacacaagtgagaaaacagtggagcaacatcatttaagaaatgaaagtagaaagctctcaacctagacttctacacccagtgaaaatattctttgaaaatgaaagtaaaataaaggtcttttaagacacataaaagctgaagataattattaccagcagacctgtctataagaaatgtaatgaaagtccactgtattagtctgttctcacgctgctaataaagacatacccga

SEQ ID NO: 669511 - DNA, 606 bp, Homo sapiens
gaatacatttttaaagctcccaacttttgggctaggctccactacacatttagcttgttgccaaattacactctaggtaagtggagaaattccattttaataatagaatatrtctttaataatataaatgatgaaatagaggtgagttcatataacttgattggccacattatttcgtggtatgacatatcccacattatagcgaattaatatctaatggtttttttctgtgaatcctcccaatgtgttatttgctcccttgcttggaacttcagagttcactggaagtttttgttttctttctgcagattattgctccccctgagcgtaaatactctgtctggattgggggctccatcctggcctctctgtccaccttccagcaaatgtggattagcaagcaagagtacgatgaggcaggcccatccattgtccaccgcaaatgcttctaagatgccttctctctccatctaccttccagtcaggatgacggtattatgcttcttggagtcttccaaaccaccttccctcatctttcatcaatcattgtacagtttgtttacacacgtgcaatttgtttgtgcttctaatatttattgctttata

SEQ ID NO: 669512 - DNA, 2498 bp, Homo sapiens
ggtaaaaaatgtaataagttatgacattgagattttagaaaaccacaaacaccacacataggaaactaagctatttgaaaatatttgtggcaaaaaatttaacagtaaattttatttgagcctcatattaatgtagatcttctcttttaatctctgtgggaattcagtacaaagaataattttttccatttttcctctttatgcaactatttgagaaacttcattttaaaatgtagatgttctttttcaaagaaagtaacatttctaagccagtgttccccagcgattatggtattccccatttgaaagggtataattaggattaattctattcagttattttctgtgttgaatcataatattacctgctcataatattttgaaacagtctagtggcatgaaagaattcatgcccctttgggataccctgatcatgccaccttgagctgatcacataatcggacaggatttttcagagtcctaaggctatacagaacttagatttcccaactttggcactattgatatttgaggctagattatttttttgtatgggtggctggcctgtatactgtaggatgttgaagagtattcttggcttctacccattggattccaatagtgctctcacacacttttggaatattttgtgctccacagatacttttctaacaaccaaaatatctccaggcaattctagatattccctaagggacaaaattgctccctgttgaaaactttaattttcacactcaaaattctttgaacatgtattttataatctgtagttcactttatttttgtaaagaccatcttcttttctgttaatgtgggttcaaaaatatttacttaattctgatgagcttgaagacaattagaaagtcatctttcacgacgtttatagcagcaaatcagttttcaatccctacttgataaaggcatacaacagatttctagatagctaattttcaggaattatttaaaatgccaccactaagtgtcataaatgataatttgcaacaaattgtgtgtttctgaagttgcaaagcatgttcacacaacaaaatatttaatagcattgttcaaattaatttagcagggcataaaaaggaactttttaaaaatctagcataattttatgaaattctatttttaaaacgtctaaattttatcagttttttttctgacatcttttgtgtgaaccattctgattgtcaacacagaaaaaaatkcagatcatgaatttttcaagcactctgttcctattattttcaacatgccccacaggaagtttttttaaatgtaaaattataaggtttcctttcacgatctcttctctttcagtgttctcttctccttccagggctccttcctgattaagaatatcccatgttctcagtgagtccctggctgacctaggacctcttattatttatttgtttaatcgtccagatcctagactttcacaggcgatgctctcaatttctttattcaaaacatgttcttagctggcaatcacattagcctaaaatcaggctgttaatgaagaaaggcaaactaccccttcctaagagacagagacatttatattctttctatattactaactcattttacaggcatattgttttttcttcttctttttggttttttttttttttttttttttttttgagtcagggtctcactctgttgcccaggctggatacagtgacatgataatagttcactgcagcctcaaacttcaaactcctgggctcaagtgaaacaattctcctgcttctgcctccctagtagtagctgggactataagcacgtgccacagcacctagcttattactaatattattttgcaaaaacgggatctcactatgttgccaggctggtcttgaactcctaagctcaagtgatcctcctgcctcagcctcccaaagtacttggattacaagtgggagccactgcaccaggccatactgtatatctataaatgatatttcagacatcagagaacttagtagttggggagggtatttgaatggggaactcttgatatatcaacccctgagcattcacccacactatctatgcacaactgcaatcttggcaataggaaagtaaaatgcaatcagaacacagcctaaaacccaggaaattccttttcctctatttcttctgtacatttttccatcacagttgtttcctttaatttttggcaggccaagtcttgactttggcaaaccctttgtatgtcccttggggatgtgtgtgtaatcctaacttttttgtttatatctctcattattcacaccatgtgttcttagaacaagctattatacttcttgatgccccgttatgagctctgctggaatgaggatgttgtttttaggatttactacctcaaaaaatgtagcttttttgagttgcagtgataattaacttcagcgcagtttatttctcccttcatggcataaaggactgtttatgcccacactttgcaa

SEQ ID NO: 669513 - DNA, 3690 bp, Homo sapiens
tcacccattttcgactccatgccagggccaagatgcttgtaagccccttgtccttcctctgctactgacctgtccccaggccccaagggctccttggggaggtaggagatggctgaggataagcccagtggttttctgtaacctgttccttctgccctgtgggaaccatggctgtgcactggtcctgtccacagccctacttgcccagtgtggctctggcaggggccacccctgtgttcaggcatgggggcctcctggggggacggtggctgacctgggggcaggcaggttctgctgagggtgggggaaggcagcatggctctgggcagcctgtacaggacatgtcttctgcccctccagcctcttgcttaggattcaccaagcatgactcactttccctctctgagcctcagtttccatatctgtaaagaagggctgatgagaatccctggggtgaggacagagggagacatccaagagggtggagcctgcttggargcagctgcatgacagcagctcccatgggacagcaagtccctgagggcttcacagagctgcagggcacccaagagggagccaccacgctccgccagggtgacggggaagcttcctggaggaggcagcattggtgctggccccagggaggcgggcatgagggcattctgagtccacaagaagggcattgcagacagagtggctgctgtgagcaaggtggtttgggggccatgggcacagggtggtgggaagaactaagctgggctttgctgaagaacatgaatcaaataaggggaagaaagatggggccttgactccctgctgaagggtgtggatgcatcccagaggcaactatagggagctgggactcagatttccctcggggaagaagacttgggctgtgattgggagggggtgggcagacggggccgggagaggcagaggcaggtgcccaggacctgggggtggctgttatcatagtctggttaggagacaacagggcctggctgattctgaaaccaactggttggtttgggaaacctctgctgtaacctcacattagcccccaaaccagtttgtcacactgcttggagtcaccccaacatgggccctggtgtgggcacatgacatgccgggtctctgatccttttgtggcatggagttaaccacctctctgcttttctggtttaaaaaacagtgcttgtttgtttttctcatattttatgtcatcattccaaacaaattttggagaataagtaaaaggtaaaagtgtgtttgaagtgggctcatctctcagccaaggtggagggggttccccagcccctggaagatggtgaacccatctggggttctaacccacaactaatctgtagcccatctaatttgtagccacatgtgaggtcccatgccccgggtcctgggcacacacgcatttctgttctgtttccactgggtgggggtgggggactgctgggctccaaccaaggtcagatggtgccaggggcatgggtggcagtgcggccatgggcatgtcaggcctcctcttccttggaggaccttaccaccatcggagaggcaggactaatgcacagagcccaggggccttaacgaggaaaggatgggcgggagtcccagttctgccttgacattggggaaaaaattcctcatccgccaaatgggaatagcaagtaattcctgtcccgcaaagtgatgtgaaactgatgagaagtgtgattttttttttttttttgagatggagtctcgctctgttgcccaggctggagtgcagtggtgtgatctcagcttgctgcaagctccgcctcctgggttcaagtaattctcctgcttcagcctccctggtagctgggactacaggcgcccgccaacacacctggctaatttctttttgtatttttagtagagacggggtttcattgtgttagccaggatggtcttgatctcctaatcttgtgatccgcccgcttcagcctcccaaagcgctgggattacagacattagccaccgcacctggctgagaagtatgatttaatgtagctagctcacggtagattcacagtaattggaagttattggaaaacattgccaaatagttcttatttttagccagaatgagacaacatccaggtgcctggtgctgctggaatagaggcgaggaaaccctctgggtctccagcccaggcagttgcagccaggcccccggctactctggcctccaggatctggggagcatggagcagcttctgggagctcactgactggggccattagcaactggacattctgggctggggtctgaggctgagcagaggggcctggtgggtggagaagggtggagggaggtgaaattctggtgcacgcagaagccaacaatcctattgtgcctggtgagcaacctgtgttgaggtggtgtgcccgttcccctgccttaaggaggggcttcagtccccagagggagaagacttcggctctgggcgccttccctggggggcatgggacactcccctgcattgtgaccttgggcctttatcctctgggtttctctggtccagcaggcctggccagggcaaggctgggcacgtgcaggccagtctgcagacctagtgctcaggagcggtcacggagcacctcctctggcctccaggagtgcatcacaggctgaagaggcagccgtgcttgagcccagaatggaggagaagtcgggagggctgggctgggacacagaaggatccacagaagaggcggctccagcaatccaggggcagagaacagcaagagcggaggtgtggaagttggggttgcagggtgaatgggggtcgttggcgagtcctctaagccaggcccttgagtgaggattggctgtcaccactgtggtctctgagcagggagaggcaggctctatactggttcatcttgggccaggcactggcatcaggggcctcagtcctttaagtccatacgaggggcaggagtcctgggagaggcttgccagggcatcccctgagcctggacagcatgggccaggaccagcgtccctgcctcagccactgctcagctcccctcccttggcctcctctggctgagggggatatttactgagggtaggggggtggcctgaagatggggagcagtgaggggttggggaggaggagagagatgggtgaggaggaggagaacaaagagacagtgggtacgtagaggaaaaggagagagaagggaggaaggcaggtggccccccagctgcaggccttccctgctggcacacagggcgcctccctgggcaccaccctcctgcccttctccggggtcctcccacggggtctgggtaagggcagcacaccctccgggccatcctgtgtccctcgtgcctctcccttgccctcagcacccaggccagcagaaaggagcctcctggcttgggggttctggcttagtgactgctgtcattggggctgctcccgggggccctcactcggccctgctcctgggtgatcttgcagccacagctcccagccctgtgctggcaaagcactgggtgtgcctgacccctgcaggctctaggaagctggacctaggtcgctactgcctttgccaggcccagcctgagatgcccttggtggccactgggagccactcctccagggtcttacctctctcagactaaacctgagtcctgcc

SEQ ID NO: 669514 - DNA, 732 bp, Homo sapiens
gtaatttctatgattgaattagtaataatatacttataatatctcatttttctatttcccacagaatatatgatagtatatccaatttcaaaataatctaaaaatattttagtgttagtttactaaatatatatatatatatatatatakagagagagagagagagagagagagagagagagagagagagagaaagagagacagggtccagggtctcactctgtcacccaggctggagtgcagtgacatgatcaaggtttgcactacaccttaaactactgggtttaagggatcctccaggctcaacctccctagagctgggaccacaggtgcatgccaccatgtctggctttaaaatttttttttttttttgtagagacagggtctccctaggttgcttgggctggtcttgaacctcctgagttcaagcgatcctctcacctcagcgccccaaagtgctgggattataggcatgagccactaataatatttgaaaccatattagagcttctttaaaggcctaacccatctcatgagatcatataatgtgatctaagatataagatcctacttagcaacagtgtccaagactcatttttatactaaggcagtttcagaataaccatcacattgtaaaagaatagttaaagccaaaaagtcatagaagtgacattgtaaaacaaacaaacaaaaacaaaacctaactatgaccttagcaattagccatcttta

SEQ ID NO: 669515 - DNA, 732 bp, Homo sapiens
gtaatttctatgattgaattagtaataatatacttataatatctcatttttctatttcccacagaatatatgatagtatatccaatttcaaaataatctaaaaatattttagtgttagtttactaaatatatatatatatatatatatagakagagagagagagagagagagagagagagagagagagagagaaagagagacagggtccagggtctcactctgtcacccaggctggagtgcagtgacatgatcaaggtttgcactacaccttaaactactgggtttaagggatcctccaggctcaacctccctagagctgggaccacaggtgcatgccaccatgtctggctttaaaatttttttttttttttgtagagacagggtctccctaggttgcttgggctggtcttgaacctcctgagttcaagcgatcctctcacctcagcgccccaaagtgctgggattataggcatgagccactaataatatttgaaaccatattagagcttctttaaaggcctaacccatctcatgagatcatataatgtgatctaagatataagatcctacttagcaacagtgtccaagactcatttttatactaaggcagtttcagaataaccatcacattgtaaaagaatagttaaagccaaaaagtcatagaagtgacattgtaaaacaaacaaacaaaaacaaaacctaactatgaccttagcaattagccatcttta

SEQ ID NO: 669516 - DNA, 619 bp, Homo sapiens
atttaaggtaaagaactgaatcagcttctgtttgcaggaacaaatgaacatggtatacgtttaggaaatctatgaaaaccacactggctgaagcggaaaatttgatttagggattaatgagagataaaactattcaatagcgcatatgaactcagttaacagagagtcttgaaygccagactgatgaaatttgatgttataataataacataaaaaggaggaatgtaggtggtgagttgaaatctacaatttaaactacaaataccttcttttaagcatggatgacaaaaaagtaaaacaatggacacatgaccttagaaaataatcatcttttaaagctgatagatggcttttcttctctcataaggttatagccttaagtacaaatacattgtcatgatatgcaaaacttcaagtatgaatacactttatatttaatataaaggtaaatcacctaagaacacattcgataagtattcaacaaaataatatgaatattaagtataaaatatttgacattttctttactcaaaaagagagcacttgctaataaactttatagaagatgattaaatcacacatcaatgtccttttacatccaatttaatatgagttctga

SEQ ID NO: 669517 - DNA, 619 bp, Homo sapiens
atttaaggtaaagaactgaatcagcttctgtttgcaggaacaaatgaacatggtatacgtttaggaaatctatgaaaaccacactggctgaagcggaaaatttgatttagggattaatgagagataaaactattcaatagcgcatatgaactcagttaacagagagtcttgaacgccagactgatgaaatttgatgttataataataacataaaaaggaggaatgtaggtggtgagttgaaatctacaatttaaactacaaataccttcttttaagcatggatgacaaaaaagtaaaacaayggacacatgaccttagaaaataatcatcttttaaagctgatagatggcttttcttctctcataaggttatagccttaagtacaaatacattgtcatgatatgcaaaacttcaagtatgaatacactttatatttaatataaaggtaaatcacctaagaacacattcgataagtattcaacaaaataatatgaatattaagtataaaatatttgacattttctttactcaaaaagagagcacttgctaataaactttatagaagatgattaaatcacacatcaatgtccttttacatccaatttaatatgagttctga

SEQ ID NO: 669518 - DNA, 1326 bp, Homo sapiens
tgggaaagggctgttatcctctgtgttttaaactataaaccataaggttatgaactataagtttctctcaaagttacttcagcctatgcccaagaatgaactaggacagcttagaggttagaagcaagatggaattgatttagtcagatctctttcactgtcttagtcataattttgcaaaggcagtttcagtagctcatcatatgcacaggtcctggtattcatttcctcaccaatacctgctattggcactttgtatttttttgttttttttttttttttgacggagtcttgctctgtcacccaggctggagtgcagtggcgtgatcttggctcaccgcaagctccacctcctgggttcacgccattctcctgcctcagcctcccaagtagctgggactacaggtgcctgctaccaagctcggctaattttttgtatttttagtagagacggggttccaccatgttagccaggatggtctcaatctcctgacctcatgatccacctgcctcggcctcccaaagtgctgggattacaggtgtgagccaccgcacccagcctttttttttttttttttatcatagtcatgtttatgccttttcttttaattggcagggtttttaacttgctattttgaaggctgagaaatccatcacgttatattgatgtgtatctggtttgttgacaatgctacgaataccaaccagtgctatgaacagggtgtgtggccacgagcaaggcaggtgaagccctgtcctcacagtgccatgaacaaggtgtgtggccacgagcaaggcaggtgaagccctgccctcacagtgccatgaacagggtgtgtggccacgagcaaggcaggtgaagccctgtcctcacagtgccaygaacagggtgtgtggccacgagcaaggcaggtgaagacctgtcctcacagtgccatgaacagggtgtgtggtcacgggcaaggcaggtgaagtcctgccctcacagtgccatgaacagggtgtgtggtcacgggcaaggcaggtgaagtcctgccctcacagtgccatgaacagggtgtgtggtcacgggcaaggcaggtgaagtcctgccctcacagtgccatgaacagggtgtgtggccatgagcaaggcaggtgaagccctgtcctcacagtgctggggtttctctgattactgctaggcatgtaatgctaagcatattttctttctggtctatcagcctagtttcttctgatgtgtattcctgccttatggcctttctccatgtttctatcatattttagtcctattcatatttatttgtagttaatttgttttttgaga

SEQ ID NO: 669519 - DNA, 1326 bp, Homo sapiens
tgggaaagggctgttatcctctgtgttttaaactataaaccataaggttatgaactataagtttctctcaaagttacttcagcctatgcccaagaatgaactaggacagcttagaggttagaagcaagatggaattgatttagtcagatctctttcactgtcttagtcataattttgcaaaggcagtttcagtagctcatcatatgcacaggtcctggtattcatttcctcaccaatacctgctattggcactttgtatttttttgttttttttttttttttgacggagtcttgctctgtcacccaggctggagtgcagtggcgtgatcttggctcaccgcaagctccacctcctgggttcacgccattctcctgcctcagcctcccaagtagctgggactacaggtgcctgctaccaagctcggctaattttttgtatttttagtagagacggggttccaccatgttagccaggatggtctcaatctcctgacctcatgatccacctgcctcggcctcccaaagtgctgggattacaggtgtgagccaccgcacccagcctttttttttttttttttatcatagtcatgtttatgccttttcttttaattggcagggtttttaacttgctattttgaaggctgagaaatccatcacgttatattgatgtgtatctggtttgttgacaatgctacgaataccaaccagtgctatgaacagggtgtgtggccacgagcaaggcaggtgaagccctgtcctcacagtgccatgaacaaggtgtgtggccacgagcaaggcaggtgaagccctgccctcacagtgccatgaacagggtgtgtggccacgagcaaggcaggtgaagccctgtcctcacagtgccatgaacarggtgtgtggccacgagcaaggcaggtgaagacctgtcctcacagtgccatgaacagggtgtgtggtcacgggcaaggcaggtgaagtcctgccctcacagtgccatgaacagggtgtgtggtcacgggcaaggcaggtgaagtcctgccctcacagtgccatgaacagggtgtgtggtcacgggcaaggcaggtgaagtcctgccctcacagtgccatgaacagggtgtgtggccatgagcaaggcaggtgaagccctgtcctcacagtgctggggtttctctgattactgctaggcatgtaatgctaagcatattttctttctggtctatcagcctagtttcttctgatgtgtattcctgccttatggcctttctccatgtttctatcatattttagtcctattcatatttatttgtagttaatttgttttttgaga

SEQ ID NO: 669520 - DNA, 1326 bp, Homo sapiens
tgggaaagggctgttatcctctgtgttttaaactataaaccataaggttatgaactataagtttctctcaaagttacttcagcctatgcccaagaatgaactaggacagcttagaggttagaagcaagatggaattgatttagtcagatctctttcactgtcttagtcataattttgcaaaggcagtttcagtagctcatcatatgcacaggtcctggtattcatttcctcaccaatacctgctattggcactttgtatttttttgttttttttttttttttgacggagtcttgctctgtcacccaggctggagtgcagtggcgtgatcttggctcaccgcaagctccacctcctgggttcacgccattctcctgcctcagcctcccaagtagctgggactacaggtgcctgctaccaagctcggctaattttttgtatttttagtagagacggggttccaccatgttagccaggatggtctcaatctcctgacctcatgatccacctgcctcggcctcccaaagtgctgggattacaggtgtgagccaccgcacccagcctttttttttttttttttatcatagtcatgtttatgccttttcttttaattggcagggtttttaacttgctattttgaaggctgagaaatccatcacgttatattgatgtgtatctggtttgttgacaatgctacgaataccaaccagtgctatgaacagggtgtgtggccacgagcaaggcaggtgaagccctgtcctcacagtgccatgaacaaggtgtgtggccacgagcaaggcaggtgaagccctgccctcacagtgccatgaacagggtgtgtggccacgagcaaggcaggtgaagccctgtcctcacagtgccatgaacagggtgtgtggccacgagcaaggcaggtgaagacctgtcctcacagtgccatgaacagggtgtgtggtcacgggcaaggcaggtgaagtcctgccctcacagtgccatgaacagggtgtgtggtcacgggcaaggcaggtgaagtcctgccctcacagtgccatgaacagggtgtgtggtcacgggcaaggcaggtgaagtcctgccctcacagtgccatgaacagggtgtgtggccatgagcaaggcaggtgaagccctgycctcacagtgctggggtttctctgattactgctaggcatgtaatgctaagcatattttctttctggtctatcagcctagtttcttctgatgtgtattcctgccttatggcctttctccatgtttctatcatattttagtcctattcatatttatttgtagttaatttgttttttgaga

SEQ ID NO: 669521 - DNA, 386 bp, Homo sapiens
tggcaatcatcacttggtctgtcagtcttaccataccccaattttctattaactgaccatattctacaccaccctcccacatccacatcattgggaccctctcagaatctctgatgagaatcttgctccacattcggttcccattyccacattgaaggtgttgcatctatccttcttcttcttttttttttttagacggagtcttgctctttcatccaggctgcagtgcagtggcacaatctcagctcattacaacctctgccttctgggctcaagagattctcttcctgcctcagcctccctagtagctgggattacaggcgcctgccaccacgcccagctaatttttgtattttaagtagaggtgaggtttcaccatgttggcc

SEQ ID NO: 669522 - DNA, 636 bp, Homo sapiens
tgtgattttctgcattctatattaggagcttcaatgtttaactataagcctcatcaagaatcaggattggaaacatttgttcccaaatgctgttttaaatatttatttatttttcagcatacaaattataatttaatttatgaaggcttgctagagacctgtaatgatccatagatccccgtttgaactagcagtctctcagaccataatgttttgtctcaggatttaatgatgttatatgtatgtatctagtccgtgaaaatgagcttcatttccttcttattcatatagctgcactcatacttttctattcaagtagctttagtagaataaaaatttggtatatgtrctctcatttgatgatgatgatgatgccactaacagttttgtgagttttcccattagttatggtggtaggtcctgagcaacccaaatgctgcctgaagtactgtgcattcattctcatctgcttgtacaaataaattataaatgataatttatcatctaacatctaaatttataatttaagtatagttattacagaattaaaactatgacttacttcaggaatttagccaactcttttatgaaaatgttttatctctatttttcttgaagatttaaatttttttaaat

SEQ ID NO: 669523 - DNA, 1900 bp, Homo sapiens
caccaggtggaggtgcaggagacagtactgatgagtgagtacctgggagcaaccctcagccaggtgtgcgcaggccattggtgcaccaccgtagcttgtgctgtctgccggagctcccaagcgggatggagcgcctggcgatcatggtgataattgtatgaataaggcatttttattggttgccttcctgtcctcatctcctgtccccactcctggattcctctcccaattcaatgacttgcagtcaactcctcgtctcaaagtctgccttctggggagcccagctgtgggctgcacagatgagaaaatccacccaaatggactccatggccaggaagtgagtgagcccttgatggatagccaaggtccttgtctctgttagagtggattgtggcaaaattggtggttatcagtctgttttgaggggcccatctccccacaaggagaagtgagctagaagcaaagacagagrccgcttcattttaggacagtttccttcctctatccacagctcagcatcagatagaagcctggggcgtttatctgttgagcatgggacgcagcttggacagtggtttgctttcctctctgaaatgcacttttccaaggccaaatcgcagataagcagcttccccctggagtacccctgttttatgcggggtagggagggccgtgggtgcgattatgctggtctggaagcacacattgactttagatagtccacacagtgcatgctcagtggaaaatcgagaggtgttgtgcatcttgagtcaccaccctctctcaccacagggtcaatcatgaggggaggaaggggaggcagagggaggaatggaacctgatgctgtcggtgaacctgaacatggacagagtgtggggggctcagtggagtccacagaagccccctcccagaataaggaggctgctggccggagctgagtgcagggagggaggcatcttatcagctcccggaccacacttgccgtccttccctctggaggcaccacccatttgctgtgtgccagtagcagcatcattgagaccagattaaaaatgtctgtgccctttaaaggtgggatgttttatttttttatttgatttttttttttgagatggagtctcactctgtcacctgggctggagtgctgtcgcgtgatctcggctcactgcaacctccacctcccgggctcaagtgattctcctgccttagcctcctgagtagctgggattacaggaatgggtcaccacacccggctaatttttgtatttttagtagagatggggtttcaccacgttggttagcctggtctcaaactcctgatctcaaatgatctgcctgccttggcctcccaaggtgggagccacagctccaggcccaaaggtgggatattttaaacttgggctagtttaccatcggctcaagaaagaagttaggtaatcaaagcggtaaatggttctctgtctacccaattttaatttccagtactggcttttttttttttcaagggtgaggagggctcaaaagtacagggggaggagatggaaaaagaatggaggggcagggtcaaggaattgatcaacggcataaaacgacctgccgtccctgagctccccctctttggctccagctggcaggagctcaagactgttcaccagttaccccagggcaaaatgaaagaggatcaaatttctgctacaacctactctatccccccacctagtaaatccatcatgtgtggaagagcctcggggccctgcctcccagacctccatcttctcatggtagctgcgtttacctcgtccccagtgagatggacaccctgggtcccatctgggaccctccctctggtcctccagctggcccctggccccggccctggcccctcctcagactgggtca

SEQ ID NO: 669524 - DNA, 1119 bp, Homo sapiens
gctgacatccaagactttagccagctggcttcaggcagcagatgcaaaggagaggtcatgagcaggccaggccctggctaggcaggtgagaggtgacggcgaccttgtctaggatgagggccccaggaagcccttgggaacccagggtggttaggccaggccagttggtgagagcctgaactctggaaggaaagaacaggctgtagtgtggacgagaccatccctcctgcatcgtagctgccttgtaatcccatcctcctgactcaggctgggctctgcatcaggcaccccagagtccaggcaccccagtttgtcaggcctgtgtgggacagcgcctgagccgggagggctcccttccctcctccgggatgctctggccttgtctctgtcatggccatttattgcaaccacggtcaataaaggaggcaggagagggcacagtggctgtgaaaacgtttggctcacgaggaacaggwatcctaactgcgtgggacaaggaggcgggtggtgtcgtggttaaagcacaggcctgggatcacactgcaggggctcagatcccagatctgcaacaatgtggctgcgatgaccctggctgggcgcggtggctcaagccccccagtctccgatttgccagcctggctgttcacacacaggggatgcaccggcttcccaggcatcctgggcaccccctccaggtggcatcggggctccccagcactgaagggtgttcagcagcctgcaaaccaactgactcacagagcccagatagtgacgccaacaccagccgctccggggccaacatcagagctggagagctgagccagtggcacgccagtcactgaggaaggcctcttgttgataaagacagggcatgaattcttggggggctgttacgtaccttcccaaagggagaaagaaaccccttgttcagtcaccgcacagctgtctctggagacaggagcacaaagctgccttctgcccagggcactgcttccttggcaagtgaccagcagctgggaccgcacgtgccaaaggcagcagctgccatgtttgacaaactggaacggagctatgtccaaattaaatccccccaaccagcctctgccatactccctttgg

SEQ ID NO: 669525 - DNA, 1119 bp, Homo sapiens
gctgacatccaagactttagccagctggcttcaggcagcagatgcaaaggagaggtcatgagcaggccaggccctggctaggcaggtgagaggtgacggcgaccttgtctaggatgagggccccaggaagcccttgggaacccagggtggttaggccaggccagttggtgagagcctgaactctggaaggaaagaacaggctgtagtgtggacgagaccatccctcctgcatcgtagctgccttgtaatcccatcctcctgactcaggctgggctctgcatcaggcaccccagagtccaggcaccccagtttgtcaggcctgtgtgggacagcgcctgagccgggagggctcccttccctcctccgggatgctctggccttgtctctgtcatggccatttattgcaaccacggtcaataaaggaggcaggagagggcacagtggctgtgaaaacgtttggctcacgaggaacaggaatcctaactgcgtgggacaaggaggcgggtggtgtcgtgrttaaagcacaggcctgggatcacactgcaggggctcagatcccagatctgcaacaatgtggctgcgatgaccctggctgggcgcggtggctcaagccccccagtctccgatttgccagcctggctgttcacacacaggggatgcaccggcttcccaggcatcctgggcaccccctccaggtggcatcggggctccccagcactgaagggtgttcagcagcctgcaaaccaactgactcacagagcccagatagtgacgccaacaccagccgctccggggccaacatcagagctggagagctgagccagtggcacgccagtcactgaggaaggcctcttgttgataaagacagggcatgaattcttggggggctgttacgtaccttcccaaagggagaaagaaaccccttgttcagtcaccgcacagctgtctctggagacaggagcacaaagctgccttctgcccagggcactgcttccttggcaagtgaccagcagctgggaccgcacgtgccaaaggcagcagctgccatgtttgacaaactggaacggagctatgtccaaattaaatccccccaaccagcctctgccatactccctttgg

SEQ ID NO: 669526 - DNA, 1119 bp, Homo sapiens
gctgacatccaagactttagccagctggcttcaggcagcagatgcaaaggagaggtcatgagcaggccaggccctggctaggcaggtgagaggtgacggcgaccttgtctaggatgagggccccaggaagcccttgggaacccagggtggttaggccaggccagttggtgagagcctgaactctggaaggaaagaacaggctgtagtgtggacgagaccatccctcctgcatcgtagctgccttgtaatcccatcctcctgactcaggctgggctctgcatcaggcaccccagagtccaggcaccccagtttgtcaggcctgtgtgggacagcgcctgagccgggagggctcccttccctcctccgggatgctctggccttgtctctgtcatggccatttattgcaaccacggtcaataaaggaggcaggagagggcacagtggctgtgaaaacgtttggctcacgaggaacaggaatcctaactgcgtgggacaaggaggcgggtggtgtcgtggttaaagcacaggcctgggatcacactgcaggggctcagatcccagatctgcaacaatgtggctgcgatgaccctggctgggcgcggtggctcaagccccccagtctccgatttgccagcctggctgttcacacacaggggatgcacyggcttcccaggcatcctgggcaccccctccaggtggcatcggggctccccagcactgaagggtgttcagcagcctgcaaaccaactgactcacagagcccagatagtgacgccaacaccagccgctccggggccaacatcagagctggagagctgagccagtggcacgccagtcactgaggaaggcctcttgttgataaagacagggcatgaattcttggggggctgttacgtaccttcccaaagggagaaagaaaccccttgttcagtcaccgcacagctgtctctggagacaggagcacaaagctgccttctgcccagggcactgcttccttggcaagtgaccagcagctgggaccgcacgtgccaaaggcagcagctgccatgtttgacaaactggaacggagctatgtccaaattaaatccccccaaccagcctctgccatactccctttgg

SEQ ID NO: 669527 - DNA, 1119 bp, Homo sapiens
gctgacatccaagactttagccagctggcttcaggcagcagatgcaaaggagaggtcatgagcaggccaggccctggctaggcaggtgagaggtgacggcgaccttgtctaggatgagggccccaggaagcccttgggaacccagggtggttaggccaggccagttggtgagagcctgaactctggaaggaaagaacaggctgtagtgtggacgagaccatccctcctgcatcgtagctgccttgtaatcccatcctcctgactcaggctgggctctgcatcaggcaccccagagtccaggcaccccagtttgtcaggcctgtgtgggacagcgcctgagccgggagggctcccttccctcctccgggatgctctggccttgtctctgtcatggccatttattgcaaccacggtcaataaaggaggcaggagagggcacagtggctgtgaaaacgtttggctcacgaggaacaggaatcctaactgcgtgggacaaggaggcgggtggtgtcgtggttaaagcacaggcctgggatcacactgcaggggctcagatcccagatctgcaacaatgtggctgcgatgaccctggctgggcgcggtggctcaagccccccagtctccgatttgccagcctggctgttcacacacaggggatgcaccggcttcccaggcatcctgggcaccccctccaggtggcatmggggctccccagcactgaagggtgttcagcagcctgcaaaccaactgactcacagagcccagatagtgacgccaacaccagccgctccggggccaacatcagagctggagagctgagccagtggcacgccagtcactgaggaaggcctcttgttgataaagacagggcatgaattcttggggggctgttacgtaccttcccaaagggagaaagaaaccccttgttcagtcaccgcacagctgtctctggagacaggagcacaaagctgccttctgcccagggcactgcttccttggcaagtgaccagcagctgggaccgcacgtgccaaaggcagcagctgccatgtttgacaaactggaacggagctatgtccaaattaaatccccccaaccagcctctgccatactccctttgg

SEQ ID NO: 669528 - DNA, 1119 bp, Homo sapiens
gctgacatccaagactttagccagctggcttcaggcagcagatgcaaaggagaggtcatgagcaggccaggccctggctaggcaggtgagaggtgacggcgaccttgtctaggatgagggccccaggaagcccttgggaacccagggtggttaggccaggccagttggtgagagcctgaactctggaaggaaagaacaggctgtagtgtggacgagaccatccctcctgcatcgtagctgccttgtaatcccatcctcctgactcaggctgggctctgcatcaggcaccccagagtccaggcaccccagtttgtcaggcctgtgtgggacagcgcctgagccgggagggctcccttccctcctccgggatgctctggccttgtctctgtcatggccatttattgcaaccacggtcaataaaggaggcaggagagggcacagtggctgtgaaaacgtttggctcacgaggaacaggaatcctaactgcgtgggacaaggaggcgggtggtgtcgtggttaaagcacaggcctgggatcacactgcaggggctcagatcccagatctgcaacaatgtggctgcgatgaccctggctgggcgcggtggctcaagccccccagtctccgatttgccagcctggctgttcacacacaggggatgcaccggcttcccaggcatcctgggcaccccctccaggtggcatcggggctccccagcactgaagggtgttcagcagcctgcaaaccaactgactcacagagcccagatagtgacgccaasaccagccgctccggggccaacatcagagctggagagctgagccagtggcacgccagtcactgaggaaggcctcttgttgataaagacagggcatgaattcttggggggctgttacgtaccttcccaaagggagaaagaaaccccttgttcagtcaccgcacagctgtctctggagacaggagcacaaagctgccttctgcccagggcactgcttccttggcaagtgaccagcagctgggaccgcacgtgccaaaggcagcagctgccatgtttgacaaactggaacggagctatgtccaaattaaatccccccaaccagcctctgccatactccctttgg

SEQ ID NO: 669529 - DNA, 647 bp, Homo sapiens
taacatccaaaatatgtgtattagctcttggtgctatcagtaaggcttctggtcaaaaggaggctcttagcacttacattttgaggagtcaaaagttatacccagattttcggctgtgtggagtcagcactctaatccccacattgtccaagagtcaactgcacaacctcacagagctgtcgtgggactgaacaggacaccatacatcaagggccttgcacacagtgagttcaatccactgaggytgggcatgataacccccagggtggcagacacagccccgatacacaaatcctgtttggggccctgccacctttttcccgagacaccagctgttgggcgtcctctgcttctgacgggccccgttgcattctggcttgacaaatgccagcttttgccgaatctcccgctctgggacgggggacatcacagttgagcagttggaacagagaagagtgtttgaaagggcatgcggtatctgggccatggaggaggaaatggggcattggtgggtgggatggcagggctgccagcatctgacccaggaggctgggaggaggctgctgtgtgaatacacgctcggcctctcacagtggctgccgccgcattagccccttgtgcttcagggaacagagcatccgtgatgg

SEQ ID NO: 669530 - DNA, 636 bp, Homo sapiens
tgcaacctccgccacctccccctcccaggttcaagcaattctcccccctcagtctcccaagtagctgggattacaggcatgcgccaccacacccagctaatttttgtatttttagtagagatggggtttcacatattggccaggctggtctcgaattcctgacttcaggtgatccacccacctcggcctcccaaagtgctgggattacagtcatgagccactgcacccggccacaagggcaattcttacaggatctcttcttttgccaggttcttcagctctggttgttaagtaaagacaagtagggctgcatgggttgtggcctctagagtctccagcagagctggagctgtggtcatgttcctaagttagcattgccacatagtgtacaattgaagacaggcagtaagaaacaagcccaggttaggctgaggctcaagaaagtgcttggtccgttattatttaaaaattcagctaatatggaacatactggcttgaatgcagtacggaacatactggcttgaatgcagttcattttgaacagttagaatcttctaggagtgaagtctgttaaccctatcagccagtactgcaaacgtgtgggggtccacaytggcacatcaaaattcagttcca

SEQ ID NO: 669531 - DNA, 613 bp, Homo sapiens
gagtaaaaagaaaattcacattgtttgtgccatggtactcagtcaacttaggttttactcaatagcatgttsttaattaatcttccaaattgttggggtatttcatatgaagtagcccctacccccaccttgtcctttccccagactccattcctagataatcacttctgtcaattcctagataatcacttgccttactgacagattcagaggaagccatcagttttttgggcagaatgaagggacaaatggtgaactggtatccgggatgctgcctagaaccctgtccatttaagaagacacccaggtgatacgcaatgcacaaaaagcactggaactcccagcaggcaagcactgcagtctataaaccctctattgagaaaggccatgacatgtctaccagggacacagatttgggaggcagaacacaagacagggtgagggtgaaaagcaatggctacctggccacgtcagccaaatcagctccaaaaatcaatgcgatgacagtggtcacaggcagatcactctcaccttataacctgggatggcacagaccagacagattatttcattttgttttttcattatttttatttacttttttggagagagg

SEQ ID NO: 669532 - DNA, 658 bp, Homo sapiens
taccatgactaacagtaaaatgaagaattaaggaaattataaggttaatttccttgaagtctctcagtagtcatttgtgtctataggtgattttgtattttacaacattgtattttctaatttcatgaaaggaaagctaaccaaattcgtggattttattttttgcctcagcctcaaaaagccttagggctgattcaggcctggttgtagcaatyggctgtctcaaaggcctcctgcatgtttaaatagcttctctcctgtttattttgcactgttttatcctgtaagctgtctcgaggcccttccaatataagcatgaggatttaaatcttaataaattgagatttgaataacagaggtaatctgggcttggggggtcttgaattattgggataaacatctctgtttctcatctgcacattatgcatgtgctgtacacattgccccatgaccaaggtcagaaataataaaatagtcatagcagaaataatactgataatatttagagttaaatagcactttttctgtttgtaaggacttttttatgtacaggttctccttctattcttggaatagtcctaaccagtagaaagatcaggtgttatacccactttaaaaatgaagcaactgagtgacaaagagattaagacacattcaa

SEQ ID NO: 669533 - DNA, 2862 bp, Homo sapiens
agacagtcacgagatctgtggaggccaagacgcttaggataaatggactcactgtagattgacttgtatttccaaacgggggccattcacttagatctttgtccccatgtgtctgtgcttagttccagtgggctaaagaatcagatttaattgaaacaggcttcaccgggaatctctcggtaaggtggtagaagggtttctggatagcaagttgaggtattctgattggttaaactattctcctaggcttcctcctgcttggttctcttatctcagatgacaatttcagttgcaaatgcactttaggaaatgactaaaatcctcctactccaaaagcaaaccctctgaatgtgatctgatcacacgtgttgatattcccagaaagcgagcatttgcagattggagcagggcacttgctcagcccttcatttaacccaacaatgcacaaaagccctccccatcccccattttagtcaatttccagaattcaaatgaatccatgagaaaaaaatgcagtcaatgccttgcaaatttttcaaaaggaggcagtttagttttgtgaatttgagttttcagtccaacaagaaggaggaagacaaaaatccctctgccctttgcctttcatcgtgtaggcttttcagtttcccaccaggtagtgtggtgtcttctcaaaacaatcttcttttaacacaaattatgaatcttggcccatatatatactgcacacattaactcagccagcatttcaaaggatgagttctgtcagacagcactactgtcaacgttcacaagtatattgattaaattagcccacatacatattcatcccagcaaagaggtttattgtgtagtggaatatctggagcaagatgcgcacatataatcatgaattggcttcacaatgaacactcttgctatgaaaaattctaatttgcccacattttcagccctattgcctaaataatttgctctctcatgcaccctgtgtaattcaagcaggctctccacacctgcagaggcaaatgcagtttcaaggagctgacaacaagtggcagcgggcatcaggaaatcctggaatgcaagggtgctaattaaccaagtggtccttggggctaggctgtcatttagcactgcacttctagaagaagtttgctttgaatttttaattataaaaggaacaagaacttgggcactagcattcttaagatgacatttattcctcaggacctatcttaggagataacatggtccagagaacaatgcccattttcccaaagaattaaaaaaataaaaattgtatgacaggcacccagtacttcattctgtgggtgagtagtgatctctcaataataatctaatttataataataatatctacatgtatttgtgctaataatgtgtcacgcattatatctcactcactcctccaataccctatgcggtaggcatcacttacttaattgttactgtcatcattgtcatcatcatcattgcactcttattaagcaatcactaaccagggctcaaaagacatcccctaagtagtttgtttaaacttaacacactactcaggaattgatgtcaacatctcttgctgggagttatccccttagtttataactaaaaataaccatcaaccttctaggccactgatctcagtttcacaaaattctggttagaattttaaccctaaaatgaccaatgtcaacgtttgacagttcttaaggccaggcagattacttaacctctctgagcctcagtttcatacttgaagattcaaggatgtgatacataaatgacataccatatatatgatatctgtatgagcattttatatatgtattctctatatatgcccatcacatagttcttagaaatagctggcactcagtaaatagtagttattattattgttgttgttgataagaaatcctgccttatagtgaaatgaaattctttcctccagactttaagctctttccgaggtggggatagagaaaagctgcttatcctccaaataacatgacaggcagttcctaccagctaccacagcaatccttcacaacattgctgcttaactgtttgccacaacacagtggtatgttgcaataagttgcaggaatgtcacagggaattggttactaataaaagttttacaaaattaaagttttttattggttcacataaaaactaaactaatatagacccaaggttaccccaataatatcgttcactctagctcaattgcacaaccaaatattttcttgaattggactgaatggggtggggttactgctggcttgccaggaaacggccaatggccgaaccttgggtacacctatgagaacatgtctgtcatacttatgaatgtcaaccaattttgtgtgtcttgcaaaaacggtcaaaaactagtgctttaaaaagcctatctatcttttacacagatctgttgatggtgtttttttctggagtgcagagaatatggaggacttttcacttgctatgttasatatttctctaatgtttgaattttttacaaccagcatctattacttttctaagcagaaaaaccaataaagattaaaaagaaaaaccctaaggcatttgattttattttcagtaaaatggcttgagtcctttatggattagtcactttattttatcccctgtttaaaactgccagggtattaaaggcttctgcagctgcctgaatggcggcctggcttgcgtgtcaaggttagccgggggagagctgcagagtcttcaccttattccctggagggacttcaggagcaccaggcttctagaattttgtggcccccttgtttcagggcttctaaagatggtcatgcaggttgtgct

SEQ ID NO: 669534 - DNA, 2862 bp, Homo sapiens
agacagtcacgagatctgtggaggccaagacgcttaggataaatggactcactgtagattgacttgtatttccaaacgggggccattcacttagatctttgtccccatgtgtctgtgcttagttccagtgggctaaagaatcagatttaattgaaacaggcttcaccgggaatctctcggtaaggtggtagaagggtttctggatagcaagttgaggtattctgattggttaaactattctcctaggcttcctcctgcttggttctcttatctcagatgacaatttcagttgcaaatgcactttaggaaatgactaaaatcctcctactccaaaagcaaaccctctgaatgtgatctgatcacacgtgttgatattcccagaaagcgagcatttgcagattggagcagggcacttgctcagcccttcatttaacccaacaatgcacaaaagccctccccatcccccattttagtcaatttccagaattcaaatgaatccatgagaaaaaaatgcagtcaatgccttgcaaatttttcaaaaggaggcagtttagttttgtgaatttgagttttcagtccaacaagaaggaggaagacaaaaatccctctgccctttgcctttcatcgtgtaggcttttcagtttcccaccaggtagtgtggtgtcttctcaaaacaatcttcttttaacacaaattatgaatcttggcccatatatatactgcacacattaactcagccagcatttcaaaggatgagttctgtcagacagcactactgtcaacgttcacaagtatattgattaaattagcccacatacatattcatcccagcaaagaggtttattgtgtagtggaatatctggagcaagatgcgcacatataatcatgaattggcttcacaatgaacactcttgctatgaaaaattctaatttgcccacattttcagccctattgcctaaataatttgctctctcatgcaccctgtgtaattcaagcaggctctccacacctgcagaggcaaatgcagtttcaaggagctgacaacaagtggcagcgggcatcaggaaatcctggaatgcaagggtgctaattaaccaagtggtccttggggctaggctgtcatttagcactgcacttctagaagaagtttgctttgaatttttaattataaaaggaacaagaacttgggcactagcattcttaagatgacatttattcctcaggacctatcttaggagataacatggtccagagaacaatgcccattttcccaaagaattaaaaaaataaaaattgtatgacaggcacccagtacttcattctgtgggtgagtagtgatctctcaataataatctaatttataataataatatctacatgtatttgtgctaataatgtgtcacgcattatatctcactcactcctccaataccctatgcggtaggcatcacttacttaattgttactgtcatcattgtcatcatcatcattgcactcttattaagcaatcactaaccagggctcaaaagacatcccctaagtagtttgtttaaacttaacacactactcaggaattgatgtcaacatctcttgctgggagttatccccttagtttataactaaaaataaccatcaaccttctaggccactgatctcagtttcacaaaattctggttagaattttaaccctaaaatgaccaatgtcaacgtttgacagttcttaaggccaggcagattacttaacctctctgagcctcagtttcatacttgaagattcaaggatgtgatacataaatgacataccatatatatgatatctgtatgagcattttatatatgtattctctatatatgcccatcacatagttcttagaaatagctggcactcagtaaatagtagttattattattgttgttgttgataagaaatcctgccttatagtgaaatgaaattctttcctccagactttaagctctttccgaggtggggatagagaaaagctgcttatcctccaaataacatgacaggcagttcctaccagctaccacagcaatccttcacaacattgctgcttaactgtttgccacaacacagtggtatgttgcaataagttgcaggaatgtcacagggaattggttactaataaaagttttacaaaattaaagttttttattggttcacataaaaactaaactaatatagacccaaggttaccccaataatatcgttcactctagctcaattgcacaaccaaatattttcttgaattggactgaatggggtggggttactgctggcttgccaggaaacggccaatggccgaaccttgggtacacctatgagaacatgtctgtcatacttatgaatgtcaaccaattttgtgtgtcttgcaaaaacggtcaaaaactagtgctttaaaaagcctatctatcttttacacagatctgttgatggtgtttttttctggagtgcagagaatatggaggacttttcacttgctatgttacatatttctctaatgtttgaattttttacaaccagcatstattacttttctaagcagaaaaaccaataaagattaaaaagaaaaaccctaaggcatttgattttattttcagtaaaatggcttgagtcctttatggattagtcactttattttatcccctgtttaaaactgccagggtattaaaggcttctgcagctgcctgaatggcggcctggcttgcgtgtcaaggttagccgggggagagctgcagagtcttcaccttattccctggagggacttcaggagcaccaggcttctagaattttgtggcccccttgtttcagggcttctaaagatggtcatgcaggttgtgct

SEQ ID NO: 669535 - DNA, 582 bp, Homo sapiens
ccaaagttatcacrtaagttttctcactgctattttccatttcttttgcaaccttgatattcaaaacacaatgtgcattttagtggatgcttaaaaaacggataaacaaatataaccgagtaagctttacttcctacacaatttgagaatattccacaacctatataccatgaataccacaccctccctttaaatatatttgtggtgtgcttgtccacacatatgtgcatgtatatatacaggtacacacatgcacgtgcagtataagtatatacatgcacatatatactcatacatatatgtgcatatacatacatatatgtatacacaaacctacacatattttcccccccaaaaaggcccaatttactgaaactatagaagttaggtatggtattatgcattaacatgtgcatttatcaagctgaaattctttgaaatgactctcaaaaatgcaaaaatgtcttcccaaagaaatattattttcctgaaatgtaaaacaaggaaaaatgtctttttcggaaacttttggtggtggtggtggtggcatctaactgtagagttactgtctgtatgaggagg

SEQ ID NO: 669536 - DNA, 663 bp, Homo sapiens
gaagagcttgcatagtcattggaatgtatatttgacagtaggcttgttctttgaccaagggtaaactaatggggtgaactttggtcaaacaatggaaataatggtccataaggaaaacaaaacactgttctatatgaggaaggagcttgatttggttagcaacctaaagaactgaaatatcatgagaagttccacagagtcacattttttaaagggtattttaaatttcccatggtaaagcctttttgcttgggtttgatttatgtttgcccttggagcttagctattaactgyaaggttccttaacacaggtctcaatttgtggggaaaaaaaaatttccaattgaagactggcagagtagaaagaaaagctaagagccaggaataaataatactaagataactcataagatcaaatcgattcaactaaaaatttttaaaaaattagtatgctttaaatatttgacattatgataaatacctcacatatattatgatatgtggtccttacagtataatcatttgtagctattttgattcttattttaaatattatgaatctcattagggctattttaaggttcagttcaataatttacataaggtttcacagctagtaagtggcagagatagattgaacacagcccatggtccaaattccat

SEQ ID NO: 669537 - DNA, 618 bp, Homo sapiens
cactgacctgtcygtactcagactcttacatggtcatatcacaaactaacctgattcaatttgaaagtttctgatgtctagcttgtgtcagaaaaataaacaatatttaagtataatctctattttttattgttttgcatgtttcaataattaaagacatatggaaaatgttacttttagaccttggctactctgggcacactgcctatggggtaatcctgctccacaaggagcagtgaaaaaaaaaaaaaaaagacctactagatgtcacaaatacaataggaatgtattaaactaaattattatatccagtaacgtactaattattcctagttgtcaacctgctctgcacccattaaaataaaatttgtattgctccaggaaaaagataaatagagattagaattagaaacttaatatttggctttgtctttcaaaacagtcttctaagatctaagtctctatacttaagtctgaagtttttggttttcaaaattgaagttttgctggaaaaaaaaaagctttacaaaataatttcaaatctaaaccataacaaggtaaaaacaaggtgtcaagccttactttttggtctttctgcctcttttgttataggctatt

SEQ ID NO: 669538 - DNA, 1822 bp, Homo sapiens
ttcaaatattttctttcactaccatcaaagagtagggccttacataacaaccatctttgggaggaatttttttttgtgtgtgaaatgaaaccttcttcagggtctactttcccttttgaaatactacattcaattgtttcattgctgaaccaattaaatatatacacaaaaaacttgttgacagtagtaaaagaaagattggatgaaaaaattctaaaaggtagactgtccgtgtctcgaggagttttttcctatttatgtgaagaaagttcacaaaacaattgtgtaaatttcttaaagtatgttggatataattctgtgactcatgaattctataaagaaggtacctagtcaaataaacttccagttaaagtttaactttgaaaataatcatatatatatatatatatatwtatatatatatatatatataactatatatatcttcagggaattcaagtgctctgcatcatatctgaaactgcctatggacttattttttaaatctcaggcaaaaaaaaatgtatagtctgctcactgtatgcagaacaatggatggagacacaaagagaggaaaagattgctgtccttaaggattctaacagtgtcatgagggaaacagagtatttgttccttgaaacagaagtaacagttattctgtgtgtcatatttagctagactaggaaaatccaatataaggttttgggcattggaaagggagggtgagtgacacaattcaaaaagtgcaaagttcaaatttatcagccccattcttcttttggtatatattttcaaattcacataacataaggatatgctcgattctaaggtcttaagttttattgttttctaagtccttttcctaatggaagagttagaaccatacaagactccttctatcttgaactacttagctataaggtttacagctatgccttatgttctgaaaaaattttgttgtaatttaatgttggttacgaagctattaagcagcatcaaaccaacctatcttttgattaaacacaatgaggaaagtgtaccataacttacggcatattattgggaaaatatttacctggtcagaaaacagccagaaaaaccttgattgtgtgatattctataggtaaacatcaatatcataataaacaagagaaacgggaaaatattctggattaaagaagactagaaacctatgacaattataggcaatgcattatccttggttggatcctggattcggtaaaataattacaaataatactctggggacagttggagaagtttgaatgggaattagatattatacaatattatacctatgtaagggttatataagaatatgtattgttcctagaaagatttaggtgtaaacacatcatgtctgcatgtattaaaatggtttggcaaaaaacatgtataaacatacaaatgtatgcgtgatgtgaacatgacaaatatgtattagagacagatgaagaaaaaatgcaacaaaatgtaatgattgataaatccagtgtatacaggtgtttatcatactattcttctgatttttctgtcagcttaaagttcacaatgaaaagcagagggagcaaattcaacttttaaaacaagtaacaagtaatctttatgagataagctggtgactaaagacgtcttagaatatattttaaaggtcaggcacggtggctcacgcctataatcccagcacttctggggggccgaggcaggtggatcaggcagtcaagagattgagaccatcctggccaacatgatgaaaccccgtctctactaaaaatacaaaaattagctgggcgtggtggtg

SEQ ID NO: 669539 - DNA, 1822 bp, Homo sapiens
ttcaaatattttctttcactaccatcaaagagtagggccttacataacaaccatctttgggaggaatttttttttgtgtgtgaaatgaaaccttcttcagggtctactttcccttttgaaatactacattcaattgtttcattgctgaaccaattaaatatatacacaaaaaacttgttgacagtagtaaaagaaagattggatgaaaaaattctaaaaggtagactgtccgtgtctcgaggagttttttcctatttatgtgaagaaagttcacaaaacaattgtgtaaatttcttaaagtatgttggatataattctgtgactcatgaattctataaagaaggtacctagtcaaataaacttccagttaaagtttaactttgaaaataatcatatatatatatatatatatayatatatatatatatatataactatatatatcttcagggaattcaagtgctctgcatcatatctgaaactgcctatggacttattttttaaatctcaggcaaaaaaaaatgtatagtctgctcactgtatgcagaacaatggatggagacacaaagagaggaaaagattgctgtccttaaggattctaacagtgtcatgagggaaacagagtatttgttccttgaaacagaagtaacagttattctgtgtgtcatatttagctagactaggaaaatccaatataaggttttgggcattggaaagggagggtgagtgacacaattcaaaaagtgcaaagttcaaatttatcagccccattcttcttttggtatatattttcaaattcacataacataaggatatgctcgattctaaggtcttaagttttattgttttctaagtccttttcctaatggaagagttagaaccatacaagactccttctatcttgaactacttagctataaggtttacagctatgccttatgttctgaaaaaattttgttgtaatttaatgttggttacgaagctattaagcagcatcaaaccaacctatcttttgattaaacacaatgaggaaagtgtaccataacttacggcatattattgggaaaatatttacctggtcagaaaacagccagaaaaaccttgattgtgtgatattctataggtaaacatcaatatcataataaacaagagaaacgggaaaatattctggattaaagaagactagaaacctatgacaattataggcaatgcattatccttggttggatcctggattcggtaaaataattacaaataatactctggggacagttggagaagtttgaatgggaattagatattatacaatattatacctatgtaagggttatataagaatatgtattgttcctagaaagatttaggtgtaaacacatcatgtctgcatgtattaaaatggtttggcaaaaaacatgtataaacatacaaatgtatgcgtgatgtgaacatgacaaatatgtattagagacagatgaagaaaaaatgcaacaaaatgtaatgattgataaatccagtgtatacaggtgtttatcatactattcttctgatttttctgtcagcttaaagttcacaatgaaaagcagagggagcaaattcaacttttaaaacaagtaacaagtaatctttatgagataagctggtgactaaagacgtcttagaatatattttaaaggtcaggcacggtggctcacgcctataatcccagcacttctggggggccgaggcaggtggatcaggcagtcaagagattgagaccatcctggccaacatgatgaaaccccgtctctactaaaaatacaaaaattagctgggcgtggtggtg

SEQ ID NO: 669540 - DNA, 1249 bp, Homo sapiens
tcttttggtttcaggcttgagggttagagatgtctgtgacttcaattcccatgtggtatggcagaattctctgtgaggcagcccttctgcctggacatacttgaagcatcacctcagaacttgttagaaatgcaaattataaggcctccccatcaacctcctaaatcagaaagtcagcagactgcaaattctccaatgttccatgctacaaatgttctgcccaggaaggagtgggcaggcatcaccactctctccttcccttggaggagagacggtatgtgaatctcattctagttcctcctctcttaatcttgattttttttcctcagatgacaatccttccatctcaagagttctgcttcagagtcacctagaataatattaatagaattagttataagcaaggaagtactcttagttttaaactgggaagtactggaagaaaaaaaagacatcttacctgccacaaaacatttttgcagatgaagtttaaggcttcaggttaggcgatgggttcagaaaaccacagagaggaaaagcatagcaagaacctgtaaccactttttcagactattaaactcaaggttcttcccacttatgccatcatcctgccacttttttcctttgatgacaatcaataggatacaagaactctccaaggagagcccacagaggaggcattttacacacttgagctccaatcctcacaacactgtgagatggcttataatttccatctcagaagkgaggaagctacagctaaagagagaatgtatgtcctaggtgagtaaagaagccaaggttataatacaactgagctactccaaagcctgcccttttctctaaactgccttctatgacccataactttgtaaaaatcagctaccagttcttaaacacttactgtgtcaagtgtgtttataatctccataatctccactcctttgatcattcttcacagaaagtgctaacacagcattttcctgatgaggggactgaggctgagaaactaactcacccaaggttttggtgcaacaagagtaaaacttgaaatgaagtcaggtttctagccccggattctcccaaggtagctgcttttgatactaaaacaatgtgcctcccggtgaaggaaatggggataatactaatcacacttatttctctattgtaatgaaaatcaaatcagatttgagagatatggaatatgatgatgttaatactatgacgctaatacatttaactccaattt

SEQ ID NO: 669541 - DNA, 665 bp, Homo sapiens
taacaaacgtttggcggctattactggcgtttcccagcccgttattattttttacatgtgagcaagttaattcagaggattacttcaagaaacaaatacttgaatacctatctgtccaagcagccggggttacagggaattcactacataaagcctctggtcttacattatatagaaaggcgatgaagagacaagaaacaggttaaacagaaaaacacgataatttcacacayaaccactgccatatttaaagcactgtacaccggccctcggagccagaattctttccctcgaggttgccccaggaatccctttgacctctgccattggacgtcacagaaggcgcgactaatcgtggctggctcccggagcttcactcttccctctcttcctgcgaaacttgacacgccatttgtttctacgtctgacatcctcctcttttctctggtccgtgggagcttttgcaagcgggaccaggccccaacacccgaaccagcagcgagagaaggagcccggcatgcggcgactcagagtgacgacacacgcgagtctccgcccgagtacgtcacttccgcaacgcttccttcgcggggctttgtgggtagccgactggggtctcctggcgacgaccatggcgggggatgtgggcggtcgcagctgcacgg

SEQ ID NO: 669542 - DNA, 665 bp, Homo sapiens
taacaaacgtttggcggctattactggcgtttcccagcccgttattattttttacatgtgagcaagttaattcagaggattacttcaagaaacaaatacttgaatacctatctgtccaagcagccggggttacagggaattcactacataaagcctctggtcttacattatatagaaaggcgatgaagagacaagaaacaggttaaacagaaaaacacgataatttcacacataaccactgccatatttaaagcactgtacaccggccctcggagccagaattctttccctcgaggttgccccaggaatccctttgacctctgccattggacgtcacagaaggcgcgactaatcgtggctggctcccggagcttcactcttccctctcttcctgcgaaacttgacacgccatttgtttctaygtctgacatcctcctcttttctctggtccgtgggagcttttgcaagcgggaccaggccccaacacccgaaccagcagcgagagaaggagcccggcatgcggcgactcagagtgacgacacacgcgagtctccgcccgagtacgtcacttccgcaacgcttccttcgcggggctttgtgggtagccgactggggtctcctggcgacgaccatggcgggggatgtgggcggtcgcagctgcacgg

SEQ ID NO: 669543 - DNA, 665 bp, Homo sapiens
taacaaacgtttggcggctattactggcgtttcccagcccgttattattttttacatgtgagcaagttaattcagaggattacttcaagaaacaaatacttgaatacctatctgtccaagcagccggggttacagggaattcactacataaagcctctggtcttacattatatagaaaggcgatgaagagacaagaaacaggttaaacagaaaaacacgataatttcacacataaccactgccatatttaaagcactgtacaccggccctcggagccagaattctttccctcgaggttgccccaggaatccctttgacctctgccattggacgtcacagaaggcgcgactaatcgtggctggctcccggagcttcactcttccctctcttcctgcgaaacttgacacgccatttgtttctacgtctgacatcctcctcttttctctggtccgtgggagcttttgcaagcgggaccaggccccarcacccgaaccagcagcgagagaaggagcccggcatgcggcgactcagagtgacgacacacgcgagtctccgcccgagtacgtcacttccgcaacgcttccttcgcggggctttgtgggtagccgactggggtctcctggcgacgaccatggcgggggatgtgggcggtcgcagctgcacgg

SEQ ID NO: 669544 - DNA, 665 bp, Homo sapiens
taacaaacgtttggcggctattactggcgtttcccagcccgttattattttttacatgtgagcaagttaattcagaggattacttcaagaaacaaatacttgaatacctatctgtccaagcagccggggttacagggaattcactacataaagcctctggtcttacattatatagaaaggcgatgaagagacaagaaacaggttaaacagaaaaacacgataatttcacacataaccactgccatatttaaagcactgtacaccggccctcggagccagaattctttccctcgaggttgccccaggaatccctttgacctctgccattggacgtcacagaaggcgcgactaatcgtggctggctcccggagcttcactcttccctctcttcctgcgaaacttgacacgccatttgtttctacgtctgacatcctcctcttttctctggtccgtgggagcttttgcaagcgggaccaggccccaacacccgaaccascagcgagagaaggagcccggcatgcggcgactcagagtgacgacacacgcgagtctccgcccgagtacgtcacttccgcaacgcttccttcgcggggctttgtgggtagccgactggggtctcctggcgacgaccatggcgggggatgtgggcggtcgcagctgcacgg

SEQ ID NO: 669545 - DNA, 615 bp, Homo sapiens
aaatgcctgtctcttagtaataccttgcacaatttcccccattcttttcaactttccagtaccattgtcctgtgacatttgtaagaagagaatacatagagcccaaaaatrtacagtgcccaagagtggactacactttatttatttatttgtttgtttgtttatttatttatttatttatttttgagatagagtctcgctctgtcgccaggatggagtgcagtggcacgatctcggctcactgcaccccccgactccctagttcaagtgattctcctgcctcagcctcctgagtagctgggattacaggcactctccaccatgcccagctaatttttgtatttttagtagagacaggtttcaccatgttggccaggatggtctggatctcttgacctcgtgatccgcccgcctcggccggactatacttttaatttagagtaacgttttgggcacatgggcaactagcctttatggaacaactgttccataacaagggattcactttcactataataggtcatcttcacaacatccctttgaaataggcacattgttattttttgataaagaaactccagctcaaagagggtaagcatctcacccagtatcaca

SEQ ID NO: 669546 - DNA, 604 bp, Homo sapiens
tttgattggtgaatggataaacattcaccatgtattcatamaatgtgttatgtatcaacacaatatagaacttctcaacaattacaaggaattcattactgatattcacaataacatggaagaatctcttggattgaggtgcatgcaaacatacacataatgtattattccatttacatgaaattctagaaatagtaaatctaatctatagtgatagaaagcaagtcagtaattgtctaggattaggagtgcaggctggggattgactggaaggggcacaagggaaccttttaggatgacagaaatgtatattttgattgtggtattggtttcatgggtgtatacatttgtcaactttttaaatctgtacattttaaatgaatgcattttcttgtatgtaaattataccacagcaaagttatatatgatatattacaaagctccattaattctctcatcatactgttactagtttgtaacagcagttacaagtatgcgtgcaaacatactataaaacaagcaacacaaattagtaggggaggcaaagattattcaacaaaaatatcatgaacaattagctggctatttggaagaaaatcaaggt

SEQ ID NO: 669547 - DNA, 604 bp, Homo sapiens
tttgattggtgaatggataaacattcaccatgtattcataaaatgtgttatgtatcaacacaatatagaacttctcaacaattacaaggaattcattactgatattcacaataacatggaagaatctcttggattgaggtgcatgcaaacatacacataatgtattattccatttacatgaaattctagaaatagtaaatctaatctatagtgatagaaagcaagtcagtaattgtctaggattaggagtgcaggctggggattgactggaaggggcacaagggaaccttttaggatgacagaaatgtatattttgattgtggtattggtttcatgggtgtatacatttgtcaactttttaaatctgtacattttaaatgaatgcattttcttgtatgtaaattataccacagcaaagttatatatgatayattacaaagctccattaattctctcatcatactgttactagtttgtaacagcagttacaagtatgcgtgcaaacatactataaaacaagcaacacaaattagtaggggaggcaaagattattcaacaaaaatatcatgaacaattagctggctatttggaagaaaatcaaggt

SEQ ID NO: 669548 - DNA, 636 bp, Homo sapiens
atttatttatttattttgagacggagtctcactcttgttgcccaggctggagtgcaatggcacaatctcggctcaccacaacctccgcttcctgggttcaagcaattctcctgcctcagcctcccaagtagctgggattacaggcatgtgccaccacgcccagctaattttgtatttttagtagagatggggtgtctccatgttggccaggctggtctcgaactcccracctcacgtgatccacccacctcggcctcccaaagtgctgggattacaagcatgagctaccgtgcccagccagaatgtgatgaactttttaagattctcaaggtggtgtggaggatgtgaggagtggacaaggggagactctttgggggaaatattcctcttgaaaatattcaagatgagtggtagcaaccagggctggggctggcttgtagagataaagggcttaaagaaagttcatgaaagttgtgaaagctgtggaataaaatacgtcatttaaggatagttacaagtttttaaatttgaattaagatccctcttaagccagtaactgttgtttgtatgggtgagacagagccagtgccctacagtagctctcgttgcttatagcactgtgacgtagacagggca

SEQ ID NO: 669549 - DNA, 722 bp, Homo sapiens
cctgcaggctttctgggctgcagagatgacagctgcaaactcttgtttttgcagtccttcctctccctactcagctaatgaacaagaatgtcttgtttcccctagcagcccctacaccctgcttctttctctagctcagaaaggaataataacaataacaataataaataataacaacaacaataatcgcagctgcgtgccatgtactactttaaattccttacttgtattttgtattatgttttttgggtttttttaacgcagcttttttaaattttgtattatgttttaattctcacacagccttatgaggttagtactgtgaaccccattctcattttacagatgagaaattggggaacagagagcttaagcaaactgcccaagatcacacagttaataagtgacagagccagaattgtgggccaagtccaggaccagcccttcctcttgttaatgaggaggggtgttctctcagggttagaaagtgtcaagtattcgtaggctgttcctgarcttattctactgttgtcagcttaaaaatctggttttttttgaaagacagcagctgtttttattaggagttctttgcatccaaacacacgttcattaaaataacaattcactttgggaataaaatcgtaattgagtgtgtagcacggagtttacatcatcagcctggccagactgaacacctttgggatgtgccagaataggattag

SEQ ID NO: 669550 - DNA, 2554 bp, Homo sapiens
tggggataattaacactgggtattctaaaaggaggtaggaaaaaagggttgaaaaactaactattgggtactatgtttactgtttgggtgacgagatcatcagaagccccaaaccccagtatcacataatatatccacgtaacaaacctacacgtgtacctctgaaaataaaataaattaaaataaaataaaaatgttggtaaaacctagggtatcattatatgaacacaattttttaaaatatcttatactcacattggaccattggaccccttagggacatcacaaaatgaaaaattacaaaacaaataattacaaagaaacatttttacgttcctgtaaatgagagttattgtaaagtaataactatattttggcctttggaaatttataatacacagcagctgaaactaattttatacacacacacacacacacacacacacacacacacacacacacaaacagggtgaagaaatcctatacacatataaggaagaacaccttggcacaagaatgtaaattgctctccttacgtgtaaaggataatcctctaactgacatgaactgaaaaatacaacgaatcaagtagtttcccagaaagtgagtgtagcaggaaggagttcttttctgtggggttacaagggagtttaaagtacagaaagaaaatccctgcaggaggggaagaaaagttactgaaagaagattaattttttaaaaaatttttttcttgtttcattaaaaaaaaagtaagtgttgtaggaatggatccattgtggttttgaaaaaggattggttgacatgatctttcagtgacgtagtttagtgaattttatatttagaagttttattgcgtaggggaatgtatctgctttttaagtggcagaattcttagagaagggaactctaaggaactgcctgatggacatttggcaatatgggaggtgaaattaactgaagcctgggctaagacatcacaaacgcagcagtgtagtattttaacaaaatggtctggcttgggagtctgcactcaacacaggttattttcctttttctctttcattgtcttaagaagctttatttattgtttataacccaaaatgtagtcattttttaaagagccaaattcaattaaaatcacattataaaactttcctgtgaccattaggaaacaatttcttcttacactgaatctattacacttacaattagcttattttcacaatattgctttggaaattcataaaccatagttatatgaataaatccctattgctctttactttgaagcatatctcatggagttccctatggaagatgcagcttaattataaatcgattcttataaactcaagtccctggcctcatgactttttatttgaacctcatgtttgaaaacagcattatctctgttcatgttgtctacacattatggcgagtctgttgtctgttacagttagtatccacataggcctctggtatcaaggtttcagttactcttggcattattttgatcgcctaaagttgtaacgtgggcatggaaagtgaattccmtgagtgccacatggcctgtatttatgttcaaacttactcttgaaattaaaaatcaattcatgcttttttttttttttttttttttgaaacagggtctcactctgttgcccaggttggagggcagtggcgcaatctcagctcactgcaacctccacgtcccaggttcaagcgattctcctacctcagactcccaagtagctaggattacaggcatacgccacgacgcctggctaatttctgtatttttagtaaagacgggttttaccttgttggccaggctgatctgaaactcctgacctcaagtgatttgcccacctcagcctttcaaagtgctgggattacaagcgtgagccactgcacccagccaattcatattattcatatgatgccaaaagaggaaatcacagacttttagtgtaccacacatttgggttatctactgtattattatgcttgatttgtgataatgtaacacatttatttaagaatatttgaaaatattcatctgtgtttgtgtttatctctttcttgctgtgtatgtgtgtgtgagagagggacagagagagaaagagagagagagactcatctttctaactagattctagtcactgagagcagatgagcactgtataacttgcaccctacacaataataacagttgatagagtaaaaaaataaacacagtatattgctcaacaataagctgagtagtgggatctggaatcaaatatgggatactggagttaatccatggcattattatttctgtattctttaaacttctggcacatacacacatgcagattttagttacatttagttatgtaaggcataattcatacttattaataaaaaaaacttggattacacacataaatgtccatttctagacaggatggccaccagcactggatttctgctcagttccttaattgagcaacaaatgcttgttgaacaaatagttggcataagcaaatgatgcttcagaaaaagatgtatg

SEQ ID NO: 669551 - DNA, 2554 bp, Homo sapiens
tggggataattaacactgggtattctaaaaggaggtaggaaaaaagggttgaaaaactaactattgggtactatgtttactgtttgggtgacgagatcatcagaagccccaaaccccagtatcacataatatatccacgtaacaaacctacacgtgtacctctgaaaataaaataaattaaaataaaataaaaatgttggtaaaacctagggtatcattatatgaacacaattttttaaaatatcttatactcacattggaccattggaccccttagggacatcacaaaatgaaaaattacaaaacaaataattacaaagaaacatttttacgttcctgtaaatgagagttattgtaaagtaataactatattttggcctttggaaatttataatacacagcagctgaaactaattttatacacacacacacacacacacacacacacacacacacacacacaaacagggtgaagaaatcctatacacatataaggaagaacaccttggcacaagaatgtaaattgctctccttacgtgtaaaggataatcctctaactgacatgaactgaaaaatacaacgaatcaagtagtttcccagaaagtgagtgtagcaggaaggagttcttttctgtggggttacaagggagtttaaagtacagaaagaaaatccctgcaggaggggaagaaaagttactgaaagaagattaattttttaaaaaatttttttcttgtttcattaaaaaaaaagtaagtgttgtaggaatggatccattgtggttttgaaaaaggattggttgacatgatctttcagtgacgtagtttagtgaattttatatttagaagttttattgcgtaggggaatgtatctgctttttaagtggcagaattcttagagaagggaactctaaggaactgcctgatggacatttggcaatatgggaggtgaaattaactgaagcctgggctaagacatcacaaacgcagcagtgtagtattttaacaaaatggtctggcttgggagtctgcactcaacacaggttattttcctttttctctttcattgtcttaagaagctttatttattgtttataacccaaaatgtagtcattttttaaagagccaaattcaattaaaatcacattataaaactttcctgtgaccattaggaaacaatttcttcttacactgaatctattacacttacaattagcttattttcacaatattgctttggaaattcataaaccatagttatatgaataaatccctattgctctttactttgaagcatatctcatggagttccctatggaagatgcagcttaattataaatcgattcttataaactcaagtccctggcctcatgactttttatttgaacctcatgtttgaaaacagcattatctctgttcatgttgtctacacattatggcgagtctgttgtctgttacagttagtatccacataggcctctggtatcaaggtttcagttactcttggcattattttgatcgcctaaagttgtaacgtgggcatggaaagtgaattccatgagtgccacrtggcctgtatttatgttcaaacttactcttgaaattaaaaatcaattcatgcttttttttttttttttttttttgaaacagggtctcactctgttgcccaggttggagggcagtggcgcaatctcagctcactgcaacctccacgtcccaggttcaagcgattctcctacctcagactcccaagtagctaggattacaggcatacgccacgacgcctggctaatttctgtatttttagtaaagacgggttttaccttgttggccaggctgatctgaaactcctgacctcaagtgatttgcccacctcagcctttcaaagtgctgggattacaagcgtgagccactgcacccagccaattcatattattcatatgatgccaaaagaggaaatcacagacttttagtgtaccacacatttgggttatctactgtattattatgcttgatttgtgataatgtaacacatttatttaagaatatttgaaaatattcatctgtgtttgtgtttatctctttcttgctgtgtatgtgtgtgtgagagagggacagagagagaaagagagagagagactcatctttctaactagattctagtcactgagagcagatgagcactgtataacttgcaccctacacaataataacagttgatagagtaaaaaaataaacacagtatattgctcaacaataagctgagtagtgggatctggaatcaaatatgggatactggagttaatccatggcattattatttctgtattctttaaacttctggcacatacacacatgcagattttagttacatttagttatgtaaggcataattcatacttattaataaaaaaaacttggattacacacataaatgtccatttctagacaggatggccaccagcactggatttctgctcagttccttaattgagcaacaaatgcttgttgaacaaatagttggcataagcaaatgatgcttcagaaaaagatgtatg

SEQ ID NO: 669552 - DNA, 3607 bp, Homo sapiens
gttggatttggcaggtttcatttacatgggaaagttctgtttcatgtgtttttcattctcttccacagactaataggctagactaggtgtgtctttctcatgatgatggcatcagctcatgtagaactgcattttacacaaagtctcttagattcttgacttggaactagctctctgtaagttccattttattccattggtcaaagcaagttagttagatgaccaaaccccaaatcaggggacagagaagtgtcctcttttgtggaagaaaatgcaaagtctcaaggcaatagctttaatcagagtgattgtgaagtattggagccattaacacaatctatgactcctagaaagatgtcacacagttaagtaattacagcataattcattcattaaacttgtattaagtattatgaagaagaaatactgcatggtaagctctacatggaaaacaacagagaaaacaaatatattgttaagcatttctatttcaagattacaatcctggataattataatattgactatcacatttccatagtaggagctatttaataatgcacatgatatctagtctgcattttgttaaatgcataaaattgacattaagcaacaaaactaatatcctggttacgtaaaaatctctgattatttttctatttaattttgagagctaagcaagccaggctatttccttctatctccaatgatttcgcacaaaacttttacaccatttgggattacatactatgtggttttatatctttaggtttgagaaacatatatattgcttagagattatgagagagtgaggcagggaattactagggaaaaaaattgtcctcaatgtgttacctttgcagagaaagaaaaatgcaccaccatttatactttcttgggtatcttgttcaggacccttctcattattctaccgtccactccctgactcactactctgcaggaggaggaaggagtatctaatttgtccacataatcagttggtgtttcaaagctctcttttctcccttgactgccttcatgcagagtaaattcttctctttttcctcttccatgtaataaatattttcctcttccaaaataaaataatttcctcttccaatgtaataaatattttgggatctatcctctcttacaacagggtggaaaaatgaggaagaaactgctgttttgaaattttatctgcatctaggtaggcaaactcaaataagagtgggataagcaaaatatccctgctgtattttccaatctagttttaccaataatgtatacttagattctgatttggcttcttctgtcagctgttagttgattggatttaagatggctgcaaattctatgacattccttccgttgagaatggggtctatatcccctgctctataaattcagtgaggaagtgatgctatttaacttccaaggctgggacacaaaatttccatgcagcttttaccttgttctcctagaacaatcactttctaggtgctgcctcttgggtatctcagaatccagctgccatgctaagagaaacctaaactacctagggaggccctgtgtgggtatccggcttgcagtcccagctgaggcagattaagtcaggcaccagacaaggaagtgaaagaggctccaaaattatagaccagagaccagctatttttgttggacactgtctgaattcctgatccacaggagcaattaacataatcaaatagtgggtttttttttcaggccaccaaattagggcacatttgttatatagcgataatgactggtacattcgagaaaagagcgtggatgagggacaaccatgcatccatgcaacagatgaatcatacaaaagaaaaggacaattcttgggaaagagaactctgagaaatgtaaatctgtttcaggagttcttcaagcctcatcaggatctaactggccagaattggttgcttcyaattaagcccctaatattcaaagccaactattagcacaagtctgaaatggctttaggaatgtgattttagaatgactgaggccagattgtaatcactggaaaccacaagtatcacccacctggtcagctccatgccagcaccctggaatgatgggaatatatatgtacgcgaccttaattacagcaaatttaaaaatacttgtgtgtgcctgtgtgtgtgtgtgggtgggtgggtgtactaccttagagaaaaagacaaatgacaagaaaacaaatttatatcagagtttgagtttagtcataatacactcatcttcagatattctttagatacacacacatacacatacacacacatacacatacacatacacacacacatacatatctcctggatttacagcaaaccttcatcacctcttctcttgtcttcatttttatctatatttctaactatgaaattactatttatttgaattgaagatcctaagataattgaatatttattttctctaccacatgtcaagtatgttaagaatttaaaatttcaataataaggatgagacaaacaaataaaaacctttaaaataatttaatagctgaggtcatcaaaactgtactattcccagaatttaatgatccaagtttttttgtccctctttcaatactgcagaatggttacaaaatttattttggaattttagtataaaacttatactattttagtgcctaattcacatccttgggagaaaaaaattagcttacctttgtactggttatttagactcagtttcaaattacaggtactcacaggcactagcttaagcaatatggaatatttattacaatgatgctagaatatctcatagaattgaagggtaggcataaatttagttctctggaattgcctggagacaggaactaggaggttttatgcctctctttgtgtctgtttcaattttctcattctcaaggatcagctgattccaattttcctgaccacatagcaaaacaacaacaacaacaacaaaacatggctgctgatgaatcccgagttgacatgttgctccctggagcagacttttgttttttcagtctcaacttcaaattcctagggattgaaccatgaatagcttaggctaagtcactgtctttggggagtggactctgatggcccttccctgtcaggcctggtgaggggacagggttgtgttgtacaaaacagcttcccagacagactattgccctcctgtggtgaaatggggaaagcagctccccaaaaagggtggtatgaaaagtgagttgaaatcggtcaccttaacattagagtcagtgcaggtgcagcaggttctgcagtagtagctggacatcaaataggtagaactatttccacagagcccaggcaatacctgttttagcagaagtgactagtagagatacttctgattcagcacatccagaccaatagagttggggttgtatgaggtcctgtaagaaatggacatttcaggccccaagtggcttctaaggcctgctcttgtatttccttatttaccaatatattgttaaaatatgttcccatcacctgagaaaactgaatgtgattctgtgctatgcaacttaaacgaacctatttcatacacttct

SEQ ID NO: 669553 - DNA, 935 bp, Homo sapiens
cgaacaaattattggacctcagaagagaaccatatcaatatttgtaggaaagatagatgatacaggaaaagaaatattttatataattattgatacttatagacataaggaaataaaaatccaaatgagattgtcatattttttcaatggattagtgacagatttcctaggtttaagaaataacaattaaatgtcaaatcaaaaatttggaaaaggaatatcaagctaatagttgaaaaatgaaataatataattttagacacagcatttcaacttcagcttaatgttgcggagtgagtgagaaaaacctgactttaatacaaataaaagtggaattttaaaatgccctttataaagattatgtgttattttgatacataattgatgagagtataaattggtacaatttttggatccttatttggcaatagatatctagagatgtgaaactgaatatttctcactatgcaaaaaagaaaaccattgaaaatattttcataaagtaatctcctctccaaacaatattttcacctttgagatgacaagtataactgcagtggtgattcatctagagtattaaaaatattactgagcttcatagctgcccaagagggatacagagtaaaagttcttttaaaatttccccttttactgcaatacatctttccttaaaaaaaaaaaaaaaaaactctagaaaactatgcattacaaaaaatgtactttgtctttcacagataggacagagagttaaataaaggactagcttgctacaggctactaggaagaatgaacgaacaggtgtgcctcttcctctcttttccttcttagctctattttctttttaactttactgtcccatagcctcctctgaagttgttkgtctccaccatattgagactgaattgttgtgatggaaatgtgtgcttagccaatag

SEQ ID NO: 669554 - DNA, 2272 bp, Homo sapiens
caattactcctggtatcactgagacccagccaagttttaaaaacaattcatcaatagtggtgaagcccaggtctcctgactccaawtataagtctaaccaatattatatgcatataaataacttcagtacacgtgtacagttcagacgatgcacctactactcagccctctgtaatatccagtgaggcaaaacccaagtcactcaagagtgggaaggattagcgtgctatggttggccaaccaggtcacaccacttttgaacactgggtgtaaacttgatggtcactaacattcctgaccatgtgcttttaccaggatctatgtcactaactctctaggtggcctcatcccacttgtgattcagcaaaatgctttcactctttgtgtatttatctgttaataaataaatccatgttttaaaagttttgaattgtctgtagaaaataaatctagactctttcatcagagacttctagcagatttcagcagcatttgctggagcaaggtgactccagcatttctctagaggacacagctgcaggctctttggagctactcctgggttggggtgagtggggactgaggacttcctggggaaagactgagggaaattataggggactttggccatccactggaaaactggaggaactgggatctagttactcatgctatagaagtaataatgttattaatagaacatgtgctacactactgactatccgttagacagtgctttaagcacttttaatgtattcactcatttaatatgaaatgaaaggcaatgtgccaacatcggagctcaatttggtacagtggaaaaacatactgagcagaaattccaacgtgggcagggctggggaaggagtagggcaggagtgagaaaaatgaaactggactccagttctgccaccaaacggatgtgtaactctaagcaagtcatttctcctttttttggtaaaatttcatacttggcaaataggaaaaacttcacttggaaaaaacagcactgaattggaactgggggtagatgctgtaaccctgattactagtggagatggaacttatgggtagaattcatgccccttggggcattctccattgcctccctcactttctccttccctccctccctctctctttttaaaatagaaatcagatttgcattcaagtcttttaaaaaaggaggaatttgctcactaatctatctattcctggtataaaatggaagtagaaattcattgaaatgcatgtaatctaggggtttacagaaacagtatcattccagaaaaatgaattcaatttgttttaatttcctcaaagtttaaccacattaaatgctagcatatatacatgtcaacaggaaaattattaggttttttttttatcttaacggatgtttgaatgattgataaaccatgacctccatcaagacaaaacaaagacaattcaacaaagtgtcttacagctcgattgttcttgctgtttacaaagttttttcacggtaaagtataattacccttgacccgattttataggcattacatatcccagttccggataaaaggataaaagacttttatccttcttttcaatattatttttatagtaatcacaagatactttaataagtaaggtcaaaagataaataatgaaaatgtagatttcaatatgctataattccagttgtaaaaaaatgaagtgcaataacttagggtttgttctttagcaattataaacataaatagaatttccttcagcttttacacagattctaagtctgctgtaacagtcctgctgtcagaaatgcaaacagctgaaagaacaaacaccaactttacctactattctataaataaggttaaactatactgctggcaggggaaacgcagcccataaatttggtaccaccatttgcttggtacatttatatgattgacctgtataaatgtatgctgttttcactgttgacacttttataaatataaagaactgctgaataaatccggctatatatctctttgtatcaaaatggaacactcgactgttgtgaaatctggcggttaataaaaatagcctgcttttttattagcttcatccaactacgggaacagaatagtttaacagtaactaagtatgcttcaaaaggtaactctctaaaagtaaaactgtaaatactagaaaatgtatcatactagaaaaggtataaagggaaacattttgttcattatccccccaccaaaaaaaaaaacttgccctgttttttaaggaa

SEQ ID NO: 669555 - DNA, 632 bp, Homo sapiens
atgcagatgacagaggtaacccttaggaagcttaacttatctcactggtaggtttcacagcctcatgccagtgacgtcacagaaaacaactttaaatcttccatgaaacaagcaaactggaggagagatgaattcaatgagctatcagaggtgctttccatcctattagaaaaaaggaggaaagcaggaaggraggcagtaagaaaaggaggagaaattaacatttgtcgagcatccattgacaaccaggcgccacactaaactcttcatattttatctcatttgaagcttattatatttccagggggtggaaattcattggttcattttattttattcatttatttactttatttattttagagacagctctcactttgtcatccaggctggagtgcactggcacaatcatagctcactgcagcctcgaactcctgggcttaagggatcttcctgcctcacattcccaaagtgctggaattacaggcgcgagccaccatgcccagctagtatgttcattttatagatgagggaaatagggctcagagaggttcatccccatgccccaacagctaatgaacaataaagctgggactaaagtaatagcaaatatttactaaggacttaacgtc

SEQ ID NO: 669556 - DNA, 570 bp, Homo sapiens
tgattaagtgaaagctgataagccccaaactggaaatgcaacaaggatacccatttgtgattggttcatgtgtcaattatatgtgtatgaacagaagcaaatagcaactctatgaccttccttcccttcccctcctccaaaagaaagaaaaggtaaggaaaaagttccaattccagagaaataggaacttctaacttattagttctatatgacaggggaaagtaagtcacaaggaaaaacctaatgtggatggctctactgaaaatgtgtcttattaactaaactggttaatcatactcctcacccccataaatattgtaaatatcacttactcatcatattcagtaatatattttcaagaaaaaattgattrattatagcttataatgacagacacagcagtggccaccactctactaggtattgctgagttgacttgtgtctaggattctacttgacagctgtcaggtactcagggactttgggtgacagaagacagtttttacctaaaactttcagtattttcaaaagtaatgaagttgtatagaatatgtgaccttggcccaaggt

SEQ ID NO: 669557 - DNA, 607 bp, Homo sapiens
aatgcaaagactgaagagaagttgaatgtttccaggactcagtttggtatgtccctgagtgactgaggctgctgtgcttctgaaggtcttcttggtggtattggtatggctttgcatgggagagacctgctgctgttgcccagtgaaccaatgaagaagaaacatatatagaatattgaattagtgccaagaactctgccagatctgtgcctcaaaaaaactcattaagatattcatgcattcatttatgcactcattaattcattcatcaaaagtgttgaaagttccctttgggtcaaattgtgtgtaacaatcccagyaaagaagttataatatagtataaaaagtacagtaaaatatgtaaaatgtatagaaatgatacagagaaaaggatcccctactccttggggtggaagagaaagtttccaggaagaaatgacataaagtgaggtttgtaagagaataggctttcagagaaaggataattcaggcaggcataggaacacacatgtgaaaacagaggaggcttgacctagtatagcttattatggaaatgtccatatgttgatattatagaagcttaacatgccaaagggggttgtgaaaa

SEQ ID NO: 669558 - DNA, 610 bp, Homo sapiens
atacccaaagaactataaatcatgctggtataaagacacatgcacacgtatgtttattgcggcattattctcaataggccaagacttggaaccaacccaaatgtccaacaatgatagactggattaagaaaatgtggcacatatacaccatggaatactatgcagccataaaaaatgatgagttcatgtcctttgtagggacatggatgaaattggaaatcatcattctcagtaaactattgcaagaacaaaaaaccaaacaccgcatattctcactcataggtgggaattgaataatgagatcacatggacacaggaaggggaatatcacactctggggactgttgtggggtggggggagsggggagggatagcactgggagatatacctaatgctagatgacgagttagtaggtgcagcgcaccagcatggcacatgtatacatatgtaactaacctgcacaatgtgcacatgtaccctaaaacttaaagtataataaaaaataaaaaataaaaaaataaaaataaataagaacacacagagcagcatttgctcataattgtatgaatgaggttaactttttatttggcactttaaacacaggactga

SEQ ID NO: 669559 - DNA, 609 bp, Homo sapiens
aaaaaggcctatcttctcattgatgagaccttcctgccataatttatgtgtggctttatcaaaaactgtatttagattcaataaatatcatttcctaaaaaatccttttggtctacttagttcttagttacactatgtttgtacttaaacattagaaagcgggcaaagcttatttaaaacaaacactaaacaaaatatgtatgggcaaagaactttataaatttttaccccatgttggtgtctagccaaatccaagtctctggaaaatgctttcggacatgtggactgctacccaaagaaaagtcatgaatatctacaatatgtccttcattttcctccataaacctctcagcatattctgcattgtcatctataaataaacattgacagtagttagaaaaacagtcactggagagaatgaattgtaaactccacatacaaaatgaatgtcaatcacttgaggtgtccagagacataatgtgccagtgagagtatcaggttccttctrttacagtgaaaaggtagaagaaggttttcagaaaaggtaaaggatacagtaagtattactggcaatagaatgggtattacagtgggcatcaagaaggattc

SEQ ID NO: 669560 - DNA, 421 bp, Homo sapiens
aatattttactgcatttttctgtgaaagaaatgggggaatcttgggatttcaagataatccaacaagctgagtagggctggccataggtttggaactcatggagatcacagtggaaacccaggaaacattctcctgagggctgcgtctccattaatgttttctgcctaaggaatgtgctkgctctggctctatgggtaaacaggagggtgaagaggaggctgactgagttaaagacatcagcaggttgggaactattaacactgaggatcatctttctgtttttattttccagacagggtctcactctgactcctaggctggagtgcatcatggggctctgcagcctcaacctcccaggaccaagcggttctcccaccacagccccctcagtagctggaaccacaaacactcatcacccca

SEQ ID NO: 669561 - DNA, 750 bp, Homo sapiens
gttttataaaaagcttcttttgtgattttgtggtgatgactgtattggacttttaataaatttaccacctatagatgatggctgtagatacagacaccaacacaaagagtgaataagaattaaaggaaatctgtgaaagatcaaaataacaaggagatcatcatggtatttttccggggtggttcagatattggagaggcrtgggagtgttcagtagtcagtgacttctgcatgatatttgcatagagagaactttaaaaaggttgcatttcttttctgctttcatatttactttgggttaaggttataggatctccttggcaatgttgctgatgctatttttgtaaaccccaaatcagtgttcaaatgtggtgggatggaaattttgagctacagcaataataaatacattttatgtccccgtaacattcaagctgtagtatgtctaagagtcagtgaaagttgtttcctgccttgaactctgaagtaagaaagaaacttttgtttataaatgttagagattttgtttttgcatttaccgcaaagttaagtgcagatataatctaatcagttttggcaaaatatcaagcgtgcttgtttgtttgataagggagggaaacccccaacttttcatgagcgcaagtcctttacctgtgttgaagatacatgacttctgtccataaagtcttcgatcttgtggactcatacagaaaacacgggtcctgtacaggaaataagaggcagacatgt

SEQ ID NO: 669562 - DNA, 1531 bp, Homo sapiens
cttgcttccccaataggttgacccattctaactaactccatttctctttaaaaaagcaaacttcatttgtatgacttgcaattgtaaacgacaccaattggccagttatcattcaaattctctgttacttaatcctgccttttcctgacgtatgcaactttcgcctaaaaaattggacactttgttgcttactcattgtctttacacattttaaaatgttgctttgtgccctcaatccctaactacattttcaatgttttgcaagtggggtccatgtgttcttgatttacatgaagctcaaaataatggttatagtaactagtacttcataattaagcaaaaagctcttattgaaaaatgacagaactatacatagggatgagaacatggagagatatttcgtgagatcacaaagttatggtatggcagaaatagaacgctgagtagagactctgtgttcccaatcattatttctaccaccagctttctattttgatgttaataatgttcttaggtgggaaaccctacatatttgccaatgtttagttcattgacaaagaaatagaaagagcttcaagaacactctaatctttaaaaattaaaatacctataattggccatacgaaaaaattggtacttgacatatactgagatcgttttattttgtgctagacaaatgaagtcatagaacagaatgtgctttaaatattatgaatagtgcttacatgtgtgtgtgtctatagatgcatattaggccgctgaaaagttttattattctttccaggagagagactgccaacttttgaacctaactagaacaagtaaattgcttcttcatatttttattaaggcaaagagagtctagttaaaaataattcaaattgtcgtggaaatgctataaattgctgtgaagtgagttgctggctatggcttgtcagagcaaatatattgtacaaatcttaggggagagttagtgcttgtgcattaaaatcaaatcatcttgcagcacaccgagaaaaaggttagatttgtaaaataatttcaaagtcatgaaaasagcaaatatgctccacaaagagcctagcaaccctcaatgacaaatgccccttttatatagtttggtatctgaattagaatcccagaatctacaaattcctctgcgtgtgggtgctgcattttgaggattttataacactgccatcaccaagctctcttttgatattcactttaaggagataatttacgggcaaccagagagcataaaccaaagtagatatctatctagatagctagatacatctccatatgattgacaggatacattctggccgagtgtgagtacaacctatggatgtggttggagagaacaactgttccacctgaatggcagatcaggattattccttctcatctgctgcaatggcttaatgtgttaaggagaggagcgagacggcaagaaccgcattcattcagtcatacagaccaaaaggaggaatgtcgcccagccctctaaactgacccagaacccagc

SEQ ID NO: 669563 - DNA, 1531 bp, Homo sapiens
cttgcttccccaataggttgacccattctaactaactccatttctctttaaaaaagcaaacttcatttgtatgacttgcaattgtaaacgacaccaattggccagttatcattcaaattctctgttacttaatcctgccttttcctgacgtatgcaactttcgcctaaaaaattggacactttgttgcttactcattgtctttacacattttaaaatgttgctttgtgccctcaatccctaactacattttcaatgttttgcaagtggggtccatgtgttcttgatttacatgaagctcaaaataatggttatagtaactagtacttcataattaagcaaaaagctcttattgaaaaatgacagaactatacatagggatgagaacatggagagatatttcgtgagatcacaaagttatggtatggcagaaatagaacgctgagtagagactctgtgttcccaatcattatttctaccaccagctttctattttgatgttaataatgttcttaggtgggaaaccctacatatttgccaatgtttagttcattgacaaagaaatagaaagagcttcaagaacactctaatctttaaaaattaaaatacctataattggccatacgaaaaaattggtacttgacatatactgagatcgttttattttgtgctagacaaatgaagtcatagaacagaatgtgctttaaatattatgaatagtgcttacatgtgtgtgtgtctatagatgcatattaggccgctgaaaagttttattattctttccaggagagagactgccaacttttgaacctaactagaacaagtaaattgcttcttcatatttttattaaggcaaagagagtctagttaaaaataattcaaattgtcgtggaaatgctataaattgctgtgaagtgagttgctggctatggcttgtcagagcaaatatattgtacaaatcttaggggagagttagtgcttgtgcattaaaatcaaatcatcttgcagcacaccgagaaaaaggttagatttgtaaaataatttcaaagtcatgaaaagagcaaatatgctccacaaagagcctagcaaccctcaatgacaaatgccccttttatatagtttggtatctgaattagaatcccagaatctacaaattcctctgsgtgtgggtgctgcattttgaggattttataacactgccatcaccaagctctcttttgatattcactttaaggagataatttacgggcaaccagagagcataaaccaaagtagatatctatctagatagctagatacatctccatatgattgacaggatacattctggccgagtgtgagtacaacctatggatgtggttggagagaacaactgttccacctgaatggcagatcaggattattccttctcatctgctgcaatggcttaatgtgttaaggagaggagcgagacggcaagaaccgcattcattcagtcatacagaccaaaaggaggaatgtcgcccagccctctaaactgacccagaacccagc

SEQ ID NO: 669564 - DNA, 1531 bp, Homo sapiens
cttgcttccccaataggttgacccattctaactaactccatttctctttaaaaaagcaaacttcatttgtatgacttgcaattgtaaacgacaccaattggccagttatcattcaaattctctgttacttaatcctgccttttcctgacgtatgcaactttcgcctaaaaaattggacactttgttgcttactcattgtctttacacattttaaaatgttgctttgtgccctcaatccctaactacattttcaatgttttgcaagtggggtccatgtgttcttgatttacatgaagctcaaaataatggttatagtaactagtacttcataattaagcaaaaagctcttattgaaaaatgacagaactatacatagggatgagaacatggagagatatttcgtgagatcacaaagttatggtatggcagaaatagaacgctgagtagagactctgtgttcccaatcattatttctaccaccagctttctattttgatgttaataatgttcttaggtgggaaaccctacatatttgccaatgtttagttcattgacaaagaaatagaaagagcttcaagaacactctaatctttaaaaattaaaatacctataattggccatacgaaaaaattggtacttgacatatactgagatcgttttattttgtgctagacaaatgaagtcatagaacagaatgtgctttaaatattatgaatagtgcttacatgtgtgtgtgtctatagatgcatattaggccgctgaaaagttttattattctttccaggagagagactgccaacttttgaacctaactagaacaagtaaattgcttcttcatatttttattaaggcaaagagagtctagttaaaaataattcaaattgtcgtggaaatgctataaattgctgtgaagtgagttgctggctatggcttgtcagagcaaatatattgtacaaatcttaggggagagttagtgcttgtgcattaaaatcaaatcatcttgcagcacaccgagaaaaaggttagatttgtaaaataatttcaaagtcatgaaaagagcaaatatgctccacaaagagcctagcaaccctcaatgacaaatgccccttttatatagtttggtatctgaattagaatcccagaatctacaaattcctctgcgtgtgggtgctgcattttgaggattttataacactgccatcaccaagctctcttttgatattcactttaaggagataatttacgggcaaccagagagcataaaccaaagtagatatctatctagatagctagatacatctccatatgattgacaggatacattctggccgagtgtgagtacaacctatggatgtggttggagagaacaactgttccacctgaatggcagatcaggattattccttctcatctgctgcaatggcttaatgtgttaaggagaggagcgagacrgcaagaaccgcattcattcagtcatacagaccaaaaggaggaatgtcgcccagccctctaaactgacccagaacccagc

SEQ ID NO: 669565 - DNA, 1531 bp, Homo sapiens
cttgcttccccaataggttgacccattctaactaactccatttctctttaaaaaagcaaacttcatttgtatgacttgcaattgtaaacgacaccaattggccagttatcattcaaattctctgttacttaatcctgccttttcctgacgtatgcaactttcgcctaaaaaattggacactttgttgcttactcattgtctttacacattttaaaatgttgctttgtgccctcaatccctaactacattttcaatgttttgcaagtggggtccatgtgttcttgatttacatgaagctcaaaataatggttatagtaactagtacttcataattaagcaaaaagctcttattgaaaaatgacagaactatacatagggatgagaacatggagagatatttcgtgagatcacaaagttatggtatggcagaaatagaacgctgagtagagactctgtgttcccaatcattatttctaccaccagctttctattttgatgttaataatgttcttaggtgggaaaccctacatatttgccaatgtttagttcattgacaaagaaatagaaagagcttcaagaacactctaatctttaaaaattaaaatacctataattggccatacgaaaaaattggtacttgacatatactgagatcgttttattttgtgctagacaaatgaagtcatagaacagaatgtgctttaaatattatgaatagtgcttacatgtgtgtgtgtctatagatgcatattaggccgctgaaaagttttattattctttccaggagagagactgccaacttttgaacctaactagaacaagtaaattgcttcttcatatttttattaaggcaaagagagtctagttaaaaataattcaaattgtcgtggaaatgctataaattgctgtgaagtgagttgctggctatggcttgtcagagcaaatatattgtacaaatcttaggggagagttagtgcttgtgcattaaaatcaaatcatcttgcagcacaccgagaaaaaggttagatttgtaaaataatttcaaagtcatgaaaagagcaaatatgctccacaaagagcctagcaaccctcaatgacaaatgccccttttatatagtttggtatctgaattagaatcccagaatctacaaattcctctgcgtgtgggtgctgcattttgaggattttataacactgccatcaccaagctctcttttgatattcactttaaggagataatttacgggcaaccagagagcataaaccaaagtagatatctatctagatagctagatacatctccatatgattgacaggatacattctggccgagtgtgagtacaacctatggatgtggttggagagaacaactgttccacctgaatggcagatcaggattattccttctcatctgctgcaatggcttaatgtgttaaggagaggagcgagacggcaagaacygcattcattcagtcatacagaccaaaaggaggaatgtcgcccagccctctaaactgacccagaacccagc

SEQ ID NO: 669566 - DNA, 1531 bp, Homo sapiens
cttgcttccccaataggttgacccattctaactaactccatttctctttaaaaaagcaaacttcatttgtatgacttgcaattgtaaacgacaccaattggccagttatcattcaaattctctgttacttaatcctgccttttcctgacgtatgcaactttcgcctaaaaaattggacactttgttgcttactcattgtctttacacattttaaaatgttgctttgtgccctcaatccctaactacattttcaatgttttgcaagtggggtccatgtgttcttgatttacatgaagctcaaaataatggttatagtaactagtacttcataattaagcaaaaagctcttattgaaaaatgacagaactatacatagggatgagaacatggagagatatttcgtgagatcacaaagttatggtatggcagaaatagaacgctgagtagagactctgtgttcccaatcattatttctaccaccagctttctattttgatgttaataatgttcttaggtgggaaaccctacatatttgccaatgtttagttcattgacaaagaaatagaaagagcttcaagaacactctaatctttaaaaattaaaatacctataattggccatacgaaaaaattggtacttgacatatactgagatcgttttattttgtgctagacaaatgaagtcatagaacagaatgtgctttaaatattatgaatagtgcttacatgtgtgtgtgtctatagatgcatattaggccgctgaaaagttttattattctttccaggagagagactgccaacttttgaacctaactagaacaagtaaattgcttcttcatatttttattaaggcaaagagagtctagttaaaaataattcaaattgtcgtggaaatgctataaattgctgtgaagtgagttgctggctatggcttgtcagagcaaatatattgtacaaatcttaggggagagttagtgcttgtgcattaaaatcaaatcatcttgcagcacaccgagaaaaaggttagatttgtaaaataatttcaaagtcatgaaaagagcaaatatgctccacaaagagcctagcaaccctcaatgacaaatgccccttttatatagtttggtatctgaattagaatcccagaatctacaaattcctctgcgtgtgggtgctgcattttgaggattttataacactgccatcaccaagctctcttttgatattcactttaaggagataatttacgggcaaccagagagcataaaccaaagtagatatctatctagatagctagatacatctccatatgattgacaggatacattctggccgagtgtgagtacaacctatggatgtggttggagagaacaactgttccacctgaatggcagatcaggattattccttctcatctgctgcaatggcttaatgtgttaaggagaggagcgagacggcaagaaccgcattcattcagtcatacagaccaaaaggaggaatgtcrcccagccctctaaactgacccagaacccagc

SEQ ID NO: 669567 - DNA, 1448 bp, Homo sapiens
tgagcaaatcatatatttaataggcaaaaagtatcacaggtatgagtgtgccagggtgtaaactatcctccattactgagacttctcctccgggtgctatgttcttgcatgaagatggggattatccattccttgaagaagtggtgttaaaaaataaacaaagcttggaaaaagcctggtgcctttatgcaggagggattttattttttactctattcctggatatatctaaaaagtctagaatagcatcctgtgtgattcaaaaatccacttgctcaaaggcacaaacctagaattatcttaaaagcctttgtaagcacatgaggtaaaggactagagtaaaaactcccaggtttaaattggaaagaggtatcctaaaatgtgtccttaaatggaagtaaagaagaggatattaggaaatcaattaatgctgcactttgaatttttcctggatgacaccaacttataggctctcaagtaagaatgaggccttcagccctcccytacccaactgacactagttctgctttgagtatgtcaagaaccactaactaactaaatactaatgtgcccagtaaatacagaatacacagtaaatggaaaatatgattaataccttttttttttattaaaatcaactttagggggtgtgtgtaaactctgactctggtctttctactgagtgtgtaccagcaaactctacccatcaatctaaaccctccagtgggaataattacaaccttcatatacactcaaccactaagaaatgagcagcccatcaagggtggaaaaggctccaactggatcctgaccaaatgctatttcacagcaacacagaaagaaaagggtggagaatgccatatatagtcaaaccagtggttaataaaaatgggtactttccactccatggaagttttcagattttcatgccaagccacctaataggaccaaatgtttctccaaatccaatgagaaactgagcaccaatgtgggaagacacaggattttggagtctggaacctaaacccaagtcttgcttctaagcaccaactccttcattggaatttggataaaagactcaacttgatgctcaaacatgtctatggatatacctagaaaatctgcccttggaagggtacacagagccagttttagtttccttataatgggcttataatgggctaagacctggagaaatacgctaatcaaagcaaagatagcattcccgttgaaaaccagaatgtttgggacccacacacccccatcctggacagatggtttaggcagccctggccacttacctggagcacagctgtctaccagggctcccagggctttgccgtcttgccagttctggttaaagttggtgatgggcaagtaggggatcttgttctgaatccaccccagcagcctctgctttggcgtctgcttcttggcatcatcatccc

SEQ ID NO: 669568 - DNA, 1036 bp, Homo sapiens
aaaaattagcttggcatggtagtgggtgtctgtagtcccagctactggggaggctgaagcagaagaatcacttgaacccaggaggcagaggttgcagtgagctgagatagcgccactgcactccagcccgggtgacagcgagactccgtctcaataaataaataaataaatgttttgtttttgcttatatttgtgtttttaaaaatgatttggctatgaatagctcagttatttaacaacggactgtgacttctcagtaatcaatgatgtataccacagaaattaaccaggcatggtggcatgtgcctgcagtcccagctattcaggcagctgaggcaggaggatagactgagccctaacataagctctaactttctaaaaaataataataatgtctttctgaaattaacagacttacctaaaaacctgtttatcacattttttaagggctagactgtagacacagatgggaagtctaaagttcaaatggacatcagatctacagcagagaggttagactacctgggttaacattccattctgccactgaatgatctcaccctctcaaaaactccattttcctcatctgtaaaatgggctgacaatgtctataccttgcaggaatggtacacactaagtacagtactgagaggcataaatagcagttgcctagcagaaaaaaatacccccatgtacacacaaaatggaggaggcacacaaactagacttggcacaggcagaagtgtagaaatgcgagggtgaccatggggtttcagtgctatagctgctttaaatccggacagggcagggcatkccctttacacaaagctgtgctccctaacgtcctctgagcatactgtccatatcattagtactgctcctatgctgtgcccagcactgaagtcacttggggcaggtcagttcacacacctcggccatcagccagcccgcaagctgtgtgctgccaccctgactgctcagatgacaacctgccatccacaccgatgtcatgaccacggcacactaaagtctggaa

SEQ ID NO: 669569 - DNA, 617 bp, Homo sapiens
gacaagcctggccaacatggtaaaacccagtctctactaaaaatacaaaaattagcccagtgtggtggcagacacctgtaatcccagctactagggaggctgaggcaggaggatggcttgaacccagcaggtggaggtttcagtgaaccgagatcatgccactgcactccagcctgggtaacagaggagtaagacgctgtctctttaaaaaaaaaaaaaaggccagacgcagtagctcacacctgtaatcccagcactttgggaggccgaggtgggtggatcacgaggtcaggagttcaagacaagcctggccaacatggtgaaaccccatttctactaaaaatacaaaattagccaggcatggtggcatacacctgcagtcccagctactygggaggctgagacaggagaatcgcttgtacctaggaggcggaggttgcagtgagctgagatcgtgccactgcactccagcctatgtgacagagcaagactccatctcaaaaaaaaaaaaaaaaaatagggaatgggtgaacttctcttgatattcagcttaggagcaagactagacccatcctggacaggtgacttccctgaaggtgccaccacctcagtttcag

SEQ ID NO: 669570 - DNA, 1819 bp, Homo sapiens
atgggactccatctcaaaaatagaaaatacaaaaagaaagtttgaaaaccatwaagtttgagccaggcacggtggctcacgcctgtaatcccaacactttgggaggctgaggcgggtggatcatgaggtcaggagatcgagaccatcctggctaacatggtgaaaccccgtctctactaaaaatacaaaaaaaaaattagccgggcgtggaggcgggcgcctgtagtcccagggctgaggcaggagaatggcgtgaacccaggaggcagagtttgcagtgagccaaccaagatggtgccactgcactctagcctgggtgagagagcaagactctgtctcaaaaaaaaaaaaaaaaaaaaaaaagaaagaaagaaaaccagaaaaccattagtctgagaaccactgctgtgaaggcttcctgaataacctcggctcccacacttcccacactccaagggggccacagagcctgttacgactcacacatcgtggtggggtcctgcagagaccatctggtctccccagccatagcctcctgcttcacagtctgaactggtctgccgtgactacaggagctcaggcagctcccaaagcaggacgctgactccagctttcagattctttgattcagggctgtgagctcctcccgtcacaagtgagcctggctcctggctgacttgacatgacagaacagtgactctctgataaccttaactgtgaaagtcaagccggctactggcatgccaagactatagacggatttaaaaaggaaagagccagtttgcaacaagctcactaaaaagctgtggagagatactggggactctcagacctgcgaataagaaagcaggcggtgggctcgttgttttcatcaatggctctgtgcaggagcgtctgaaggcacccaccaggtcccggaccccagcatgtggcatcacagccatgtctgacctgcagaaaaacataggttattcacaaacactgctgagcaaaggcaaacagttttattaccaagtctgagctctatgtatagcattaaatccactttcagataagatacggttgataataaattgataattactttaatctgtatcactcattattttacaaacactaattaaaatttgctgtgtgcaagttcgtgcactaggtcctgtgggacagacttgggaagtataaacaagttatgtttaatttgtgtcctttagagctgagttctagaagggacagaaaacagaaagtgtctgtgtacacatgcaccaacgggtcctcagtaacacacacctgcaattaacaggtaatctcaacaactaggtaaaacctccaggtgcacaacgccttcatatcacactgcaggcccttcggagagctgaatgagaatgtgcaggtttgcctccacttttggggcctgtcttgcaaacaagggagataaacctaagattgaggaaattatcactatggtgataatgaggacaccccatagcaaatcaaccaaccccaggagaaggctcctgaggaaacgccgccattctcttgcttcttggtagttttcttggtaaagatgacctaaaaacaaaaggtcagccaagaccatgttgaactgcaagtttctttaacatgctttcaactgcttgtccttgtcccactatgttacttgacagatcttgctcctgtgacagctacgcaggcagcagatccatctctgacacaacatatccccatctgtaaacagaggctaacgttgtgcctgtctcaccagagtggatgcgatgtcctccagattgtttgccaatgcaagccacagcggggggttccc

SEQ ID NO: 669571 - DNA, 1819 bp, Homo sapiens
atgggactccatctcaaaaatagaaaatacaaaaagaaagtttgaaaaccataaagtttgagccaggcacggtggctcacgcctgtaatcccaacactttgggaggctgaggcgggtggatcatgaggtcaggagatcgagaccatcctggctaacatggtgaaaccccgtctctactaaaaatacaaaaaaaaaattagccgggcgtggaggcgggcgcctgtagtcccagggctgaggcaggagaatggcgtgaacccaggaggcagagtttgcagtgagccaaccaagatggtgccactgcactctagcctggrtgagagagcaagactctgtctcaaaaaaaaaaaaaaaaaaaaaaaagaaagaaagaaaaccagaaaaccattagtctgagaaccactgctgtgaaggcttcctgaataacctcggctcccacacttcccacactccaagggggccacagagcctgttacgactcacacatcgtggtggggtcctgcagagaccatctggtctccccagccatagcctcctgcttcacagtctgaactggtctgccgtgactacaggagctcaggcagctcccaaagcaggacgctgactccagctttcagattctttgattcagggctgtgagctcctcccgtcacaagtgagcctggctcctggctgacttgacatgacagaacagtgactctctgataaccttaactgtgaaagtcaagccggctactggcatgccaagactatagacggatttaaaaaggaaagagccagtttgcaacaagctcactaaaaagctgtggagagatactggggactctcagacctgcgaataagaaagcaggcggtgggctcgttgttttcatcaatggctctgtgcaggagcgtctgaaggcacccaccaggtcccggaccccagcatgtggcatcacagccatgtctgacctgcagaaaaacataggttattcacaaacactgctgagcaaaggcaaacagttttattaccaagtctgagctctatgtatagcattaaatccactttcagataagatacggttgataataaattgataattactttaatctgtatcactcattattttacaaacactaattaaaatttgctgtgtgcaagttcgtgcactaggtcctgtgggacagacttgggaagtataaacaagttatgtttaatttgtgtcctttagagctgagttctagaagggacagaaaacagaaagtgtctgtgtacacatgcaccaacgggtcctcagtaacacacacctgcaattaacaggtaatctcaacaactaggtaaaacctccaggtgcacaacgccttcatatcacactgcaggcccttcggagagctgaatgagaatgtgcaggtttgcctccacttttggggcctgtcttgcaaacaagggagataaacctaagattgaggaaattatcactatggtgataatgaggacaccccatagcaaatcaaccaaccccaggagaaggctcctgaggaaacgccgccattctcttgcttcttggtagttttcttggtaaagatgacctaaaaacaaaaggtcagccaagaccatgttgaactgcaagtttctttaacatgctttcaactgcttgtccttgtcccactatgttacttgacagatcttgctcctgtgacagctacgcaggcagcagatccatctctgacacaacatatccccatctgtaaacagaggctaacgttgtgcctgtctcaccagagtggatgcgatgtcctccagattgtttgccaatgcaagccacagcggggggttccc

SEQ ID NO: 669572 - DNA, 678 bp, Homo sapiens
ctagttgatggttgctctaatctggagactcctagttgatggttactctaatctggagatgcctagttgatggttactctaatctggagactcttagttgatggttgctctaatctggagactcctagttgatggttaatctggagactcctagttgatggttgctctaatctggagactcctagttgatggttgctctaatctggagactcctagttgatggttactctaatctggagacgcctagttgatggttactctaatctggagactcttagttgatggttgctctaatctggagactcctagttgatggttaatctggagactcctagttgatggctgctctaatstggagactcctagttgatggttaatctggagactcttagttgatggttgctctaatctggagactcctagttgatggttactctaatctggagactcctagttgatggttaatctggagactcttagttgatggttgctctaatctggagactcctagttgatggttactctaatctggagactcctagttgatggttaatctggagactcctagttgatggttaatctggagactccgaattccatgtttatgcttgcagtcattccactgtacacaagacttaaattctatatctcccaatagaacaaagataacccatgact

SEQ ID NO: 669573 - DNA, 678 bp, Homo sapiens
ctagttgatggttgctctaatctggagactcctagttgatggttactctaatctggagatgcctagttgatggttactctaatctggagactcttagttgatggttgctctaatctggagactcctagttgatggttaatctggagactcctagttgatggttgctctaatctggagactcctagttgatggttgctctaatctggagactcctagttgatggttactctaatctggagacgcctagttgatggttactctaatctggagactcttagttgatggttgctctaatctggagactcctagttgatggttaatctggagactcctagttgatggctgctctaatctggagactcctagttgatggttaatctggagactcttagttgatkgttgctctaatctggagactcctagttgatggttactctaatctggagactcctagttgatggttaatctggagactcttagttgatggttgctctaatctggagactcctagttgatggttactctaatctggagactcctagttgatggttaatctggagactcctagttgatggttaatctggagactccgaattccatgtttatgcttgcagtcattccactgtacacaagacttaaattctatatctcccaatagaacaaagataacccatgact

SEQ ID NO: 669574 - DNA, 1448 bp, Homo sapiens
  misc_feature 1159, 1160, 1161, 1162, 1163, 1164, 1165, 1166, 1167, 1168,1169, 1170, 1171, 1172, 1173, 1174, 1175, 1176, 1177, 1178,1179, 1180, 1181, 1182, 1183, 1184, 1185, 1186, 1187, 1188,1189, 1190, 1191, 1192, 1193, 1194, 1195, 1196, 1197: n = A,T,C or G
  misc_feature 1198, 1199, 1200, 1201, 1202, 1203, 1204, 1205, 1206, 1207,1208, 1209, 1210, 1211, 1212, 1213, 1214, 1215, 1216, 1217,1218, 1219, 1220, 1221, 1222, 1223, 1224, 1225, 1226, 1227,1228, 1229, 1230, 1231, 1232, 1233, 1234, 1235, 1236: n = A,T,C or G
  misc_feature 1237, 1238, 1239, 1240, 1241, 1242, 1243, 1244, 1245, 1246,1247, 1248, 1249, 1250, 1251, 1252, 1253, 1254, 1255, 1256,1257, 1258: n = A,T,C or G
tttttgcttgcttttctgtctcaagaaaattaaatatttctttttagatatatttgatagtttcctgttcttctgagttaattttcgacttgtccaaactctgtttagctactgtactaaaagaataatggtgtactaaattgggaggaaataggaaactatttytttgttctcttatgttttctttttatttaatttgtacctaaagaagtaaactatcacatcattttcatttttgattgtattctgtgcacaatcagtattgggactaatttgaattgaagtacatataccaaatataaaacgaatagtggggttagtatttctgtattttgagtatttggggagataactaagattgctagtatcttaataagcttacagtctctgcagatgtttctgtggtgttattggcataaattgtttacaaagggatatttaggaaggtgcacaaatgatcagaattttgttgttttgtgtgtgtgtgttttttttttttttagaacaacgagggttttcattagtcattagcaacatttacaggttttgaaattcactccatagttaaattcttttatcaagcacatgccacatgtacagcactgctagatctatgtatacctaaatagacattaccgtccaatgtaattggtttcactcttaatggtttctctcctttaaaataaaaaaagaaaaggagcaaaagggtgtatgtatactttactaccacagatgtctacctttgaggatgacattaagagataatttatactaagctgaaaaaaatgtaggtgaactactgactcagtagttaggtgagctgctgtattattggtatacaataatatgaagtgcagggtagtttaaagtttgccagcaaatcatgcacctggcccatgaaaactgaaatagatactaattcactggaatgtttatggtaagaagagtgtacatgtcttgaccaagacatggctataaggttaagattaatttgttacacatattgtaggccaaagcatattaagttgagaagtcagaaagctgcattataaaacaacttactttcttttgaagatataacaactgaaatagatagttgggtctgagtaaaaggagagacattacaaaatagttaaaaatggaaaaaaagaattgattnnnnnnnnnnnnnnnnnnnnnnnnnnnnnnnnnnnnnnnnnnnnnnnnnnnnnnnnnnnnnnnnnnnnnnnnnnnnnnnnnnnnnnnnnnnnnnnnnnnntgtcagatatttttcaaggtttgagccttgtatcttcaatatgtcctataaccggccaggttgtgacctgatatctattctcctcctttgtctttttctttgaactgtaccttgccagaatataagaatatgtgtacttatccttagagatacaatgtgagaagtcctttgataaattagttcttgaata

SEQ ID NO: 669575 - DNA, 1430 bp, Homo sapiens
catgtcttcatttgtgtgcctcctataattcctggtacatagccttatacttaaagggtacctaataattcataggttttgcacctatgaattattattatgtgcctaataattcatagattttgaaagactgattgataaactggaaccagttctcacttggaacaaagaaacttgggttcattctgcttagttcaagttagagtagatgatcctaataatttaacagtcttaggtggatcatcaaactggctactgttttagataaactgtgcagaaaaactcattgaaaaagaactgtaaaatttagcatgtgtctccaaaacattctaataacaatcttaacccacttgttaccttacttccacgaacagatggtacataaacaacaagatgagacaaagatggatagtcttgaagtcttaatgtcagatactaaaataaaaaaaaaagaaactacttttatttcttagagattaatgcatgtttaaagaaaaataaataacacttatttcttacttaattcgttatcttaaaaagcaggcttccaatttatgttcagtacttcataaaatgcccatgtttacatttccaggtcaataatcctgttgaaaatcaagttcctaataattattatgttaaataggaactgccaaaaatattctttggatcccttcatataaaacaaatgacatttaacattaaatttaattattatctataattatttccaaatttggtgtctttctttttataatttggttatttgttacatatagtatcacagtattgtttctacatttattttggtagtatataacacaaaacattcaatagctgatgaatgaataaatgctaaatataatgaaagagttacaatttaatctcaaattattttgatctagcccaagtagtaaagagttgctgtctaatggcatatctgcacatcatcccctggaatttatttagcaaatgataaagacaagtatgtctaaataatgcacctcaccaaataagtaattatttatttctcaaaattaagaccagtcctatagtccatattttgaggaatgaattggtagaagactgctctatttaatgaaaagccaaggcaccaaatacaggtttttttgttttctttcttgttttaatttaacttttattttaagttcagggatagatgtgcaaatttgttacacaggtaaacttgtgtcatgggggtttgttgtacagattatttcatcacccaggtactaagcctagttacccactagttatttttcctgattctcttcctcctcctactctccaccctccaataggcccgagtgtgtgttgttccccctacatgtccatgtgttctcatcattcagctcccacttataagtgagaagatgcagcattyggttttctcttcctgcattcatttg

SEQ ID NO: 669576 - DNA, 955 bp, Homo sapiens
ttttttgtttgagatggagtctcgctctgccgtcaggctggagtacagtggcgtgacagctcactgcaacctctgcctcctggatttgagcaattctcctgcctcaatctcctgagtagctgggactataggcgcatgccaccacgtccagctaatttttgtatttttagtagagacgagatttcaccatgttggccaggatggtctcggtatcttgatcttgtgatccgcctgcctcggcctcccaaagtggtgggattataggcgtgaaccaccggcacctggcctatggcacagttttaaaactgcatttgcctagaaagtggactgctgtatatagaccaagtgttgggctatatatgrctgcattgtcttaggctatttggggttggaggaaggaagaggcgtgaagtagaaaaggaacaagctaataaatgttttttaaaaagtagaatttaaaacaaaaccacgttcagctgaacaccagaacgcaacaccaggataaaaatccaattttcaaagagctagaagatcaagctaagcacttactgtattttgctgaacgttaaaattatataaatgtactacagttgcctcaagatgttaaaaagtcagcttttcaaatctagtcacggcctactcatatgacagacccaattcaaatgagcaaaattgaaaagttacacatacagacaacttctcaaccaccaggctgtttagtttaagttagaagtcagaagttctgagactctccttttacccaccttgagcaaccgcagcaagttttcccttttcttcagggctgagctgcaacatcgtatttataacaggaagaagtctctctctttcactacctggtttcaagaaaatgaactgcagcaagacgttcttcaagtattccaggttagctgcagacttctctcgctcttgattcctttccaatcttcttatttca

SEQ ID NO: 669577 - DNA, 955 bp, Homo sapiens
ttttttgtttgagatggagtctcgctctgccgtcaggctggagtacagtggcgtgacagctcactgcaacctctgcctcctggatttgagcaattctcctgcctcaatctcctgagtagctgggactataggcgcatgccaccacgtccagctaatttttgtatttttagtagagacgagatttcaccatgttggccaggatggtctcggtatcttgatcttgtgatccgcctgcctcggcctcccaaagtggtgggattataggcgtgaaccaccggcacctggcctatggcacagttttaaaactgcatttgcctagaaagtggactgctgtatatagaccaagtgttgggctatatatgactscattgtcttaggctatttggggttggaggaaggaagaggcgtgaagtagaaaaggaacaagctaataaatgttttttaaaaagtagaatttaaaacaaaaccacgttcagctgaacaccagaacgcaacaccaggataaaaatccaattttcaaagagctagaagatcaagctaagcacttactgtattttgctgaacgttaaaattatataaatgtactacagttgcctcaagatgttaaaaagtcagcttttcaaatctagtcacggcctactcatatgacagacccaattcaaatgagcaaaattgaaaagttacacatacagacaacttctcaaccaccaggctgtttagtttaagttagaagtcagaagttctgagactctccttttacccaccttgagcaaccgcagcaagttttcccttttcttcagggctgagctgcaacatcgtatttataacaggaagaagtctctctctttcactacctggtttcaagaaaatgaactgcagcaagacgttcttcaagtattccaggttagctgcagacttctctcgctcttgattcctttccaatcttcttatttca

SEQ ID NO: 669578 - DNA, 955 bp, Homo sapiens
ttttttgtttgagatggagtctcgctctgccgtcaggctggagtacagtggcgtgacagctcactgcaacctctgcctcctggatttgagcaattctcctgcctcaatctcctgagtagctgggactataggcgcatgccaccacgtccagctaatttttgtatttttagtagagacgagatttcaccatgttggccaggatggtctcggtatcttgatcttgtgatccgcctgcctcggcctcccaaagtggtgggattataggcgtgaaccaccggcacctggcctatggcacagttttaaaactgcatttgcctagaaagtggactgctgtatatagaccaagtgttgggctatatatgactgcattgtcttaggctatttggggttggaggaaggaagaggcgtgaagtagaaaaggaacaagctaataaatgttttttaaaaagtagaatttaaaacaaaaccacgttcagctgaacaccagaackcaacaccaggataaaaatccaattttcaaagagctagaagatcaagctaagcacttactgtattttgctgaacgttaaaattatataaatgtactacagttgcctcaagatgttaaaaagtcagcttttcaaatctagtcacggcctactcatatgacagacccaattcaaatgagcaaaattgaaaagttacacatacagacaacttctcaaccaccaggctgtttagtttaagttagaagtcagaagttctgagactctccttttacccaccttgagcaaccgcagcaagttttcccttttcttcagggctgagctgcaacatcgtatttataacaggaagaagtctctctctttcactacctggtttcaagaaaatgaactgcagcaagacgttcttcaagtattccaggttagctgcagacttctctcgctcttgattcctttccaatcttcttatttca

SEQ ID NO: 669579 - DNA, 955 bp, Homo sapiens
ttttttgtttgagatggagtctcgctctgccgtcaggctggagtacagtggcgtgacagctcactgcaacctctgcctcctggatttgagcaattctcctgcctcaatctcctgagtagctgggactataggcgcatgccaccacgtccagctaatttttgtatttttagtagagacgagatttcaccatgttggccaggatggtctcggtatcttgatcttgtgatccgcctgcctcggcctcccaaagtggtgggattataggcgtgaaccaccggcacctggcctatggcacagttttaaaactgcatttgcctagaaagtggactgctgtatatagaccaagtgttgggctatatatgactgcattgtcttaggctatttggggttggaggaaggaagaggcgtgaagtagaaaaggaacaagctaataaatgttttttaaaaagtagaatttaaaacaaaaccacgttcagctgaacaccagaacgcaacaccaggataaaaatccaattttcaaagagctagaagatcaagctaagcacttaytgtattttgctgaacgttaaaattatataaatgtactacagttgcctcaagatgttaaaaagtcagcttttcaaatctagtcacggcctactcatatgacagacccaattcaaatgagcaaaattgaaaagttacacatacagacaacttctcaaccaccaggctgtttagtttaagttagaagtcagaagttctgagactctccttttacccaccttgagcaaccgcagcaagttttcccttttcttcagggctgagctgcaacatcgtatttataacaggaagaagtctctctctttcactacctggtttcaagaaaatgaactgcagcaagacgttcttcaagtattccaggttagctgcagacttctctcgctcttgattcctttccaatcttcttatttca

SEQ ID NO: 669580 - DNA, 581 bp, Homo sapiens
tacaaaattttaytctactgtggtacacaaaagagaagtgctgctataaaaatatgggaaatattttgggaggtcgaggtgggcagatcgcttgagatcaggagttcgagaccagccttgccaatatggtgaaaccccatctctactaaagagataaaaattggccgggcgtggtggcacatgcctgtagtcctagctacttgggaggctgaggcaggaaaatcacttgaacctgggaggtgaagattgcagtgagccgagattgcatcactgcactccagcctgggtgacagagctagactccatctcaaaaaagagaatatatatatacatatatttacagtagagtaaaaaaatatatatatataaaatatatatatatgtggaaactaatagggtgaggagactaaatgaatgtctgcctgactctctaagccaccttttgcccctctactctgttccttctagcttttactcccattaccttactcctcatgtgcacccttcttctcccttttgttacacattccactctcaagtattctgccttccttcccagtttgttaccacctgcttcactc

SEQ ID NO: 669581 - DNA, 581 bp, Homo sapiens
tacaaaattttattctactgtggtacacaaaagagaagtgctgctataaaaatatgggaaatattttgggargtcgaggtgggcagatcgcttgagatcaggagttcgagaccagccttgccaatatggtgaaaccccatctctactaaagagataaaaattggccgggcgtggtggcacatgcctgtagtcctagctacttgggaggctgaggcaggaaaatcacttgaacctgggaggtgaagattgcagtgagccgagattgcatcactgcactccagcctgggtgacagagctagactccatctcaaaaaagagaatatatatatacatatatttacagtagagtaaaaaaatatatatatataaaatatatatatatgtggaaactaatagggtgaggagactaaatgaatgtctgcctgactctctaagccaccttttgcccctctactctgttccttctagcttttactcccattaccttactcctcatgtgcacccttcttctcccttttgttacacattccactctcaagtattctgccttccttcccagtttgttaccacctgcttcactc

SEQ ID NO: 669582 - DNA, 1740 bp, Homo sapiens
ttttatatagtgtgtaaggaccaggtagaaggaagtggtattgctatcattttgtcattgggaagtgtaagatggaaagggattggaagctaaaataacttaaaatattgactctggtttcaaaaatgtttggattttaaaaggttggcagttaaaattattcttttcaacattttaggcttatttggcctcttagtttcctctgaatctataagacatactatatttttacaaaagtgttttaaaatatatattttttcttttcttggcaattttataggtaatgtgtgaagtgctgttttcagctacagcaaatgtgcatgaaaatttaacatcttccatccaaagcagattaaaggctcagggtcacagccacatgaatgcccaggctctgctggaagaaggtgatgcagggagctcggaggtatgacgtgcatgcatttgtcaggattctcttgattaagctttacataatggcttcattttaaacagtttacagattattcacacattatggcattatgttagttagacatatttctcaagaccagttgtagctcctcaacctgggagttggaacttttacatgaagtctatggaagtaatgaaaatgattaaagattgaaagaagctttagaacaccaccaaatcaccccaaacggcaggagacttgaagttattttggcttggagaaaataaagcaaagggacaagttaaagggggcagcacaccaacatggcacatgtatacatatgtaacaaacctgcacgttgtacacatgtaccctagaacttaaagtgtaatttaaaaaaaaataaagcaaagggatgatttgaatatgatatatgattttatgtgtgtacgtgtgtatgtgtatgtgtgtgtgtgtgtagatagatagacagacagacagattgcatatgaagataacttttcacttgccctggctcaggaagaaattatcctgtattttactgtgaaaagaataaagctcatcttagaaattaacagatgaaaccaattatgaagaagagtgtatgccccccccyttttttttccaaagatttctagtacaggcttctgcattctttttctcttatgctatgatttctttaatactcaggattcctttttttcccacttaaccagaattcatctgagaaatctgatatgcttggaaataccaattcttcagttttgtattttatactgggtctacactttgaagaggataaaaaggcgttagaaagcatccttccaacagcacccagcgctggcttaaagagacagtttccggatgacgtggaggatgcacctgacctgaacgcccctggaaaaattcccaagaaaggtcagtgaactgttttcatcaggcagttctgtgactccaaagtgatagaatgttaactagtattcaatatattttttaaatttttacaacatttaatattagtaatgaaatgattatatcagctctaagattatagagcattttagatgttttatactgcaaagacttcatagtcaaaaatagcagagaaaatttagctataatttaaaattttattcatgcttaccatccagataaattattgctgtatgctgttaactgggcaggaactatttctgcccagtgtgatttgttacattgatacaacacgtttggtccagagaaaatacatttcttgcatgctgttgttcaggtgcttaggtgttaattacagcgttttaaattttttc

SEQ ID NO: 669583 - DNA, 1740 bp, Homo sapiens
ttttatatagtgtgtaaggaccaggtagaaggaagtggtattgctatcattttgtcattgggaagtgtaagatggaaagggattggaagctaaaataacttaaaatattgactctggtttcaaaaatgtttggattttaaaaggttggcagttaaaattattcttttcaacattttaggcttatttggcctcttagtttcctctgaatctataagacatactatatttttacaaaagtgttttaaaatatatattttttcttttcttggcaattttataggtaatgtgtgaagtgctgttttcagctacagcaaatgtgcatgaaaatttaacatcttccatccaaagcagattaaaggctcagggtcacagccacatgaatgcccaggctctgctggaagaaggtgatgcagggagctcggaggtatgacgtgcatgcatttgtcaggattctcttgattaagctttacataatggcttcattttaaacagtttacagattattcacacattatggcattatgttagttagacatatttctcaagaccagttgtagctcctcaacctgggagttggaacttttacatgaagtctatggaagtaatgaaaatgattaaagattgaaagaagctttagaacaccaccaaatcaccccaaacggcaggagacttgaagttattttggcttggagaaaataaagcaaagggacaagttaaagggggcagcacaccaacatggcacatgtatacatatgtaacaaacctgcacgttgtacacatgtaccctagaacttaaagtgtaatttaaaaaaaaataaagcaaagggatgatttgaatatgatatatgattttatgtgtgtacgtgtgtatgtgtatgtgtgtgtgtgtgtagatagatagacagacagacagattgcatatgaagataacttttcacttgccctggctcaggaagaaattatcctgtattttactgtgaaaagaataaagctcatcttagaaattaacagatgaaaccaattatgaagaagagtgtatgcccccccctttttttttccaaagatttctagtacaggcttctgcattctttttctcttatgctatgatttctttaatactcaggattcctttttttcccacttaaccagaattcatctgagaaatctgatatgcttggaaataccaattcttcagttttgtattttatactgggtctacacttygaagaggataaaaaggcgttagaaagcatccttccaacagcacccagcgctggcttaaagagacagtttccggatgacgtggaggatgcacctgacctgaacgcccctggaaaaattcccaagaaaggtcagtgaactgttttcatcaggcagttctgtgactccaaagtgatagaatgttaactagtattcaatatattttttaaatttttacaacatttaatattagtaatgaaatgattatatcagctctaagattatagagcattttagatgttttatactgcaaagacttcatagtcaaaaatagcagagaaaatttagctataatttaaaattttattcatgcttaccatccagataaattattgctgtatgctgttaactgggcaggaactatttctgcccagtgtgatttgttacattgatacaacacgtttggtccagagaaaatacatttcttgcatgctgttgttcaggtgcttaggtgttaattacagcgttttaaattttttc

SEQ ID NO: 669584 - DNA, 1740 bp, Homo sapiens
ttttatatagtgtgtaaggaccaggtagaaggaagtggtattgctatcattttgtcattgggaagtgtaagatggaaagggattggaagctaaaataacttaaaatattgactctggtttcaaaaatgtttggattttaaaaggttggcagttaaaattattcttttcaacattttaggcttatttggcctcttagtttcctctgaatctataagacatactatatttttacaaaagtgttttaaaatatatattttttcttttcttggcaattttataggtaatgtgtgaagtgctgttttcagctacagcaaatgtgcatgaaaatttaacatcttccatccaaagcagattaaaggctcagggtcacagccacatgaatgcccaggctctgctggaagaaggtgatgcagggagctcggaggtatgacgtgcatgcatttgtcaggattctcttgattaagctttacataatggcttcattttaaacagtttacagattattcacacattatggcattatgttagttagacatatttctcaagaccagttgtagctcctcaacctgggagttggaacttttacatgaagtctatggaagtaatgaaaatgattaaagattgaaagaagctttagaacaccaccaaatcaccccaaacggcaggagacttgaagttattttggcttggagaaaataaagcaaagggacaagttaaagggggcagcacaccaacatggcacatgtatacatatgtaacaaacctgcacgttgtacacatgtaccctagaacttaaagtgtaatttaaaaaaaaataaagcaaagggatgatttgaatatgatatatgattttatgtgtgtacgtgtgtatgtgtatgtgtgtgtgtgtgtagatagatagacagacagacagattgcatatgaagataacttttcacttgccctggctcaggaagaaattatcctgtattttactgtgaaaagaataaagctcatcttagaaattaacagatgaaaccaattatgaagaagagtgtatgcccccccctttttttttccaaagatttctagtacaggcttctgcattctttttctcttatgctatgatttctttaatactcaggattcctttttttcccacttaaccagaattcatctgagaaatctgatatgcttggaaataccaattcttcagttttgtattttatactgggtctacactttgaagaggataaaaaggcgttagaaagcatccttccaacagcacccagcgctggcttaaagagacagtttccggatgacgtggaggatgcacctgacctgaacgcccctggaaaaattcccaagaaaggtcagtgaactgttttcatcaggcagttctgtgactccaaagtgatagaatgttaactagtattcaatatattttttaaatttttacaacatttaatattagtaatgaaatgattatatcagctctargattatagagcattttagatgttttatactgcaaagacttcatagtcaaaaatagcagagaaaatttagctataatttaaaattttattcatgcttaccatccagataaattattgctgtatgctgttaactgggcaggaactatttctgcccagtgtgatttgttacattgatacaacacgtttggtccagagaaaatacatttcttgcatgctgttgttcaggtgcttaggtgttaattacagcgttttaaattttttc

SEQ ID NO: 669585 - DNA, 1387 bp, Homo sapiens
tctttcagagtatattagaaaggcataatagattatttgagatatatttaatatagagttcctctaaaatttaagatgaatattcgtgtaattactgwtgatatcagttttttaccagcagttaaaaataaatccaatgaacaacaaatctctggaactgtttagattagtttctttaagcgcagctcacgtttactggaattttgttttgctctttggctaaagtcataacacttagagtcacataacccttccaaccttttaagaaataagcccaacatctgaattcaggagatcaggataatatatatactaaaaaatacattcttggggatagaaaaaaaaccaaaaacttttaaataattgatagtattaatgattacaagtgatcttactaataaccttaatgattgttttgtgtgaacattaatatttggacaaaattcacttattttgtagctgattcagggcctgtggattgtgatattgatcattccattgatttgctgtctggcaccaagagaggtacttaatagctatctgctaatacttcttaaaatatggagttgattgtactcataatactgttttgaaaagtcagtggtaaaatgtcaaaacaattacaaatcaacatattttaataatgtcactttcatgtattgctaacatgactgccaatttgttgtcatattttaaaaactgcttatttatcttcagtcttctacaatgcccatcaattcacaattcttatagggtagaacttcccaaaacagaatgaaaaatatatttaagcaaaaatttaaaaagtatttaggttaatactttaaaactctttataaatattttaggagagtaaataatagccttgctgtgagaaaagagtaggcattttccctctgtaaaaccacagttttgaaactgggatctcagagaaaatatgcataaaaatagaaaacttttaagaatttaaagataaactattacctcagaaaatttggcttacagattgtgcacacatatacatgtgtgcgtgcaaacacacacacacacacacacacacacacacacactcccataattgagatttgggctgtaatttccaactgcattaaatattttacataatgaactgagaaagaaaaaatgagcttttctgaagacacttacagtaagctaaagcatggagctttttttttctctgccttaatacattacgtgtgagagaggtaagaaagtaagaaaccacaaaaatgcatttagcagctactgtgagtcaaacctcattcaatcagtttctacaaccatgtaaaatagaaaacactcagaaaaaaccttaaggtgtctccaaagaaattagaaaaaaatggtgtttgggcgcaggggcggg

SEQ ID NO: 669586 - DNA, 1387 bp, Homo sapiens
tctttcagagtatattagaaaggcataatagattatttgagatatatttaatatagagttcctctaaaatttaagatgaatattcgtgtaattactgttgatatcagttttttaccagcagttaaaaataaatccaatgaacaacaaatctctggaactgtttagattagtttctttaagcgcagctcacgtttactggaattttgttttgctctttggctaaagtcataacacttagagtcacataacccttccaaccttttaaraaataagcccaacatctgaattcaggagatcaggataatatatatactaaaaaatacattcttggggatagaaaaaaaaccaaaaacttttaaataattgatagtattaatgattacaagtgatcttactaataaccttaatgattgttttgtgtgaacattaatatttggacaaaattcacttattttgtagctgattcagggcctgtggattgtgatattgatcattccattgatttgctgtctggcaccaagagaggtacttaatagctatctgctaatacttcttaaaatatggagttgattgtactcataatactgttttgaaaagtcagtggtaaaatgtcaaaacaattacaaatcaacatattttaataatgtcactttcatgtattgctaacatgactgccaatttgttgtcatattttaaaaactgcttatttatcttcagtcttctacaatgcccatcaattcacaattcttatagggtagaacttcccaaaacagaatgaaaaatatatttaagcaaaaatttaaaaagtatttaggttaatactttaaaactctttataaatattttaggagagtaaataatagccttgctgtgagaaaagagtaggcattttccctctgtaaaaccacagttttgaaactgggatctcagagaaaatatgcataaaaatagaaaacttttaagaatttaaagataaactattacctcagaaaatttggcttacagattgtgcacacatatacatgtgtgcgtgcaaacacacacacacacacacacacacacacacacactcccataattgagatttgggctgtaatttccaactgcattaaatattttacataatgaactgagaaagaaaaaatgagcttttctgaagacacttacagtaagctaaagcatggagctttttttttctctgccttaatacattacgtgtgagagaggtaagaaagtaagaaaccacaaaaatgcatttagcagctactgtgagtcaaacctcattcaatcagtttctacaaccatgtaaaatagaaaacactcagaaaaaaccttaaggtgtctccaaagaaattagaaaaaaatggtgtttgggcgcaggggcggg

SEQ ID NO: 669587 - DNA, 635 bp, Homo sapiens
taaaatattctcacaaagggagttgtccttcattttggaaaactccactaagcaatgtagtcatctttgggccttcagtgtctgtaggaactgggtagaggtcagtagaaaggctgtaaccaggacattcatagaaggtaacaacaggacctgagcattcatagaaggtatcaacaggacccgagcatctaagctctactcttcacacccctttacttttctttaaagagagtcatggaactgaattaaaacacagtgccaaacaattgtgcaatataagctaatgctatcatagacattgtaactcaagtattagagtttaactaacttgcccaggttacagaactagyaaaaactaaaatagtatttgaatctatgttcaacagaggttgcaaatccatgtttactacatttccatagattatactcagtacaggccaaagtacagttatatcactgcagagaaggtagcagatagttatttacacattgctctgaaatttctccaaagaagccagacaaattcctgtgctcataaaaacccaatggcattatctcactcacactaaggagcctgactgatgctagtcatttctattgtggtacgtttgtgaaagttttctcaaataatttaa

SEQ ID NO: 669588 - DNA, 588 bp, Homo sapiens
tacccaaaatttaaaaattaacctggcgtgttggtgggcacctctaatcccagctacttaggaagctgagacaggagaatcacttgaacccaggaggcgaaggttgcagtgagccgagattgcaccactgcactccagcctgggcaacagagcaagattccatctcaaaaaaayaaacaaaacaacaacaacaaaaaaccagtggtatattaaactggagttcagagagtatctcttccaacttcagcttccttgtaagtgtttaacgagcagagtggttggctgtcactattaacagccaatagtgactatgagtagtcttctatgtcttctgcctcaacccattcaaagggcttcaaagtttcatatgatctaaatattttccattacatattaccagacaggagaagtgatactgtcagccatgtaacttatttgctaaaataactagacacatcataatttctactcctaaaaaagaaagacatcaatcaagttacatgtacaacatgaaccagaataactagaatagaaaaatctagaagttaacataattattataataatatctcccataaggtaatataa

SEQ ID NO: 669589 - DNA, 624 bp, Homo sapiens
aatggttggataacatctgggccataatcaacatgagttagcaaaagagaactctttctacaactttaaaaaagttttaaaatactgcaatagctagataaaaataaagttcaaaatatatttttataaaatgggaacaataaatacatattattggctaaagacaaggcactaactgtccaacagagtgaatatacaaaagagaaaggatatgttcaatgatgaaagttcrtaagttatgtggtcaaggagaacaacaatggcccagataggaaaagaaggactaatcgtttcaacaaatgagactagataaacaagacctatatgcagatgtttctaagtttgtgaaagacacaacaattttatgggaaattatggaagaaagcaacacattttttttttttgaaagtgcagctaggatttctattattggtctttgcatttggtataatgttttttaaaatgggtgaagtagggtatagaggtaaaataaatgattgataaatagtactgaggacattttaatttaaaattcagaattgttattggtgaccaactagttgaatgattttctccaattgcacacagcaatgcagatgtaggattattatagttttttaattt

SEQ ID NO: 669590 - DNA, 624 bp, Homo sapiens
aatggttggataacatctgggccataatcaacatgagttagcaaaagagaactctttctacaactttaaaaaagttttaaaatactgcaatagctagataaaaataaagttcaaaatatatttttataaaatgggaacaataaatacatattattggctaaagacaaggcactaactgtccaacagagtgaatatacaaaagagaaaggatatgttcaatgatgaaagttcataagttatgtggtcaaggagaacaacaatggcccagataggaaaagaaggactaatcgtttcaacaaatgagactagataaacaagacctatatgcagatgtttctaagtttgtgaaagacacaacaattttatgggaaattatggaagaaagcaacacattttttttttttgaaagtgcagctaggatttctattattggtctttgcatttggtataatgttttttaaaatgggtgaagtagggtatagaggtaaaataartgattgataaatagtactgaggacattttaatttaaaattcagaattgttattggtgaccaactagttgaatgattttctccaattgcacacagcaatgcagatgtaggattattatagttttttaattt

SEQ ID NO: 669591 - DNA, 341 bp, Homo sapiens
tctaaccctgaaaaaatattaattacagtcattaaagaatttcaagcccagtaataccatttaaaaactcaagttttagcatggcttattttatttatagcttccacgtctaccagggattgagaaatagttgtaaaatattctcttcacaattgatcttcaaaattaagtgaattatttgtattcagagtctctgaatcattattatttctgttagttcctttctcccttccatctctaaattaaactctcatctcagtccagtagataagcattgctctcagaatacaatctgtaatatactgtgtggtcttgaygatgctactttaattgttctaact

SEQ ID NO: 669592 - DNA, 766 bp, Homo sapiens
cagcttctaattaaacatcagtggtcagggtgccagtaaatcttgttaaataaataaactaatttctcattagatgtcattcaggataggaatcatgttgtttttatgtccaaaagaaagttaaattaaaattttaaataatttcaatttattttttataccactatataatatcttaccagttgcttaaaatctcctcctatatactcttgtataacactctgtcaccttcccagcccagctcacaatgattttcaaggttatcatgcaacttccactctttyatttggctcagcactcacacttataattaaaccttacttggccactgtacatattttcccaatttctccttctatcaggtaaatatagtctcaactctcaggattctgtcaaataaattatatctgtgtctattccatctggatcatcccatctcaaatttccagaacgtatcctcatccggttgtttatctttttccaatctatatcttagttatctctttaaaaatactaagaacagatataagaaattttaattattccaagtttcacaaagtttgagacttttattactgttttcaataaatacaacttgttattctatgcatcatagaaaactttttcttagtgttcatgaaaatgatagaatagctctaatctctgcctgtctgccatttaaatgaagaactaagttatgtggatcataactgccataacctacaatgctgagactccatcaatttggcattttgagttatactta

SEQ ID NO: 669593 - DNA, 656 bp, Homo sapiens
aatataaacgacctcacatttagatttatcttcagcaattaaaaaaactatactgaaactatttggctacaaattttagtccgaccaaacagctgagaccagtttttgctatcatgcaaccaatcagaaattaacagagtgaagtcattctaatcttgccctttgtagaaatggaccctaaccaaactgttgattaatgttatggttgaaactattctaaaccaacaaacacaatctgttaatgtaaatgaacttttctgactgttctcctaagaatcagctaatttagagaaagaccagtgtcatgttctacactgttcatctgtcctttagtgagccatttgttacaggagrtctgtcaaacctaaagccagatccatctggaattttgagtctggaatttggaaaaaaaactccaaatactataatcattataataattaatcacacaaatagtactctggaatctacaaaaagaatgagttacagaaaaactgaagaaaaataaaaagaccaaccccagagttctactcaatgtcactatgcctggactcaaaaataactgcaggagagctcatgaccaagcaactgacagccacatttgggggtgggagcaggcagttgggttaaggaaggctctcacatacttttacaca

SEQ ID NO: 669594 - DNA, 1735 bp, Homo sapiens
aaaatatttaaaataatgggcagttgagatatatagatttccattgacactttgaaacgtgtttgggtttaactttaaaattcaattgatgaaaatctaatgcagcaataaaaatttttctgtggattaatgcgtaaagcacccacaggaaatttatcctcacttcaccgtaagtcattgcaatttcacgtagatacaaattttgaaagtattgtcacacctattatttagatgttttgtgacctgacttttaaattacagctttgcagaactctttggcatcacctaaagacagtggcatattatctgtatttcttgtagtgttggttaattcgtaaagactttctaattttcaaagtatttttgactatgaatgctccaggtgtgtttctgtatttgaatttcttgtgcatttccacttttttcaacaattttataatttctgataatcctgcccatgattcatattcataaaaatccctgactagtcacttttaactcattgtgatcacaaagccttggttggcattcttcgagagagtttgtacaattatcttgatctcaccaccttcatattgttgtattaatattgaagtgaagataaatttccacagaaatttcagatagtgaagactggggaaggttggagctaaaagcaaatgttcttgctttatacaataggaatgtaggatcctaacaggcaatccatcttcgatcatgtttttagcactgaaatgatcagataaatcatatgattcagaaacttagatgtgtgaaggctggattcaaggcctaagagattataagcaaaaagtttaactagaaggctattataatagtccatagggaatgaaggattcaaaaataggagtgaagaatcaggaaattgttaaattaatgcataaggccatgtcagtgtggaggaaggagtgtttaccgggggttttactttgccgactcattctaatagctcttatattagggtaactgtacttactttttgcaggaattttaagcacatttctcatcttgtttgaataacatagctgtcatctgcttagcaccatgaccctttactatgataaaaaattgtaagcattaatgtcacatgcttgtctacagctagtaatctatttctgctaattcatcggtgatcccatatttcaggtaggtttttcactttgaagccttatcatttatactttccattggaaaataagagtttttactaatcttttaatgaagatgtcattgcaaactgcacaaatgctacttgaaacatatggaagctttgtggtctttgggaataaatggttttcagcaaataatgaaacaaaatctttcatctggatgagatatattgcataaatgaagctggttgaacaaatagacattgctgatatttttcacttcaytaattagaatagacaccggcaaccagtccagtactcttcttatagttgcctaagccaactggacagtccgaatacaagtaatggtttattttcttccaactgtataaattggtcaggtttgcaagagtgggttttttatccccagagatgctgaatggttagtggggttgatgtataagtaatagaaggtctagttgtcagattcacactgatttctgtgattctttgatctgaatatgatattcagtgtgaccaaccagagccatcataaaagggaagttacaggtcaggactctggggccagactcccaggttttaaa

SEQ ID NO: 669595 - DNA, 631 bp, Homo sapiens
aaaaaaaaaaaaagacatttaagctggtctaagtcctattacataacatactagctatttgtgattcttcaagccattcctgtgctctgcatcttaaaaatctgcaaactttctgcagtagatgtggaccagtcttttggaaatgaggtgttgaaggtgagcaatgcagtgagcagtgtactcacatcatacttggcagaatccaattcccggtaccatataattgaatagctctagctttcctgactggaattcccttggagcttaactccacactgttcattttctttcaccatctgttgataacaataygccaccactctctggggctactggcctgcagtccagtggttgctgccttccagaactgcatgaaaacattttcagagatctagcctagtctcaggagatacacagaaacaggggcacagacacaccagtcatccttaattatagaatctgtgctgctactctagagttcctaataatgatgtcagctataggtatacatcagcagtaaatttaatgagttagctagcacactggttcaaactggcaaatcagacacaaatcagaaatctgtattgttttaccaaaaaatattacaggatattgtctaccaagaggctca

SEQ ID NO: 669596 - DNA, 586 bp, Homo sapiens
aaatgaatgaggtatatcgacataaatcgtacttcatggacattgattcaaaatgtagttttgcttggttctctcttgcagacacttcttatcttctgcacttttacttttcttcccatgcctttacctagtcttggctctagaaaagcacaataaataatgtatagaactttctcatatttggcaccaaattatatactagcacaggttagaagtctgaatctgccttagtcaagtcattttctctcaaaaactctactattctaagaaattttttctgtagcttccaatatgtgacactgcctgagtttggctctcctgctttactgggcaaatgaagtagcaatatgctcgtaatggatatgcattacctacatgcaattaccattctgaaccatgtggatcagactgaataccatcacctgaagccttctgccatgtatgtaaaatccataaaaatggtaatttgagaaaaggtaggatttactaagttatgggaacagagacctgctctcaaggcattattaygtgtaatgagagtttgttctcccaaagcaaggcttttaactagcagtttcatttgcca

SEQ ID NO: 669597 - DNA, 632 bp, Homo sapiens
tcagaaagctggtttcagcagagcatgcgacacatactgagccttcatcaccctcaaaaagtctgtgcaaatacacgctgatcaccaatggagacttttggaagattaattttagttcttatggactttctgatttgtcttcaggcatactaagaataactttgctcctggtcctgttaatgagcataatcacgaaagcacgcggagcatggctttgggtcatcaaaggacgaacctcccagagagatcctctcaaatccaagttgaatataattgagaagacatactggtcattttttttcacccatggaggaggagcttcataattcaagaccagcttcccgaattcagtcctcattgytgccacaactaactcaactttcattcattgaaaatgtaataacattagttaaaagttattggttgctaacaatgtgtgaagcatgttctaagcattttccagctattaattaatttaatcaccacaatcaatttctaagacaggtacttttattgttcccattttatgaatgaggaaactagggagaagagaggtcaactaacttacccaagcgtgcacagtaagtggtggagccactggctgcagggtttgttctttaaaccgttacctt

SEQ ID NO: 669598 - DNA, 632 bp, Homo sapiens
tcagaaagctggtttcagcagagcatgcgacacatactgagccttcatcaccctcaaaaagtctgtgcaaatacacgctgatcaccaatggagacttttggaagattaattttagttcttatggactttctgatttgtcttcaggcatactaagaataactttgctcctggtcctgttaatgagcataatcacgaaagcacgcggagcatggctttgggtcatcaaaggacgaacctcccagagagatcctctcaaatccaagttgaatataattgagaagacatactggtcattttttttcacccatggaggaggagcttcataattcaagaccagcttcccgaattcagtcctcattgctgccacaactaaytcaactttcattcattgaaaatgtaataacattagttaaaagttattggttgctaacaatgtgtgaagcatgttctaagcattttccagctattaattaatttaatcaccacaatcaatttctaagacaggtacttttattgttcccattttatgaatgaggaaactagggagaagagaggtcaactaacttacccaagcgtgcacagtaagtggtggagccactggctgcagggtttgttctttaaaccgttacctt

SEQ ID NO: 669599 - DNA, 1429 bp, Homo sapiens
atagaaaaggtacagtaaaaatatggcattataatcttatgggaccaccgtcgcaccaatgtggtctcttgttgatcaaaacatgttgcatgtgactgtactttgaaggatatataatcactaatgctatttacagctaagagtgacagtgctagccagaaaaagttaatttgcaatcagtttattgtttatatgcaaattagtcttctattttcacgttatgtgccttaacgttttggtccctgaagtagatttgagtctccctgaaatactgcatctactctttgtttagggaggtggtgartgtggtgttaatggaaagacatgcagatctggaggaagaaaggtctgggcaaacttcctcaagctatctaacttctctgcaccagagctcatttggaaagtggaacaataatagcacctgcatttctgcctttctgatgggcaggaccacaggggactggaggcagtgctgggacagtgcatggttccgtcattgatagtctctgttcttcatagggaaccccagagtgaaggacggccaatgtgttttgtttgcatgaacacaaattctgagtgagtggggtttgtttccctgaggaaacctgacatcctgtttataatacttgttattacaaaggtggtggtttgtcagaggtgtatactcatcacctttaccaacacagaaaagatagtttgaaccaaagttcttccatagttctcagctaagacactgtttttggagggcaattccacagccacagaggccaggatgctggcttctgccagttactgagagcctaactcttggtgtttaattcccaactgaaaatacatcattcccagcaggttttccctttcgcagtctgcattcaggttctggagtgccaactctcctttatggggtcgaaggcctccatgatattgcaaaagacatgctttctcaagataggctggaggtaaaaaacctccatatttaatgatgctattctagtgaagcagggccttaatgatgataataataataataattaatggcacagctagagaactgacaaataatggggaacagatgatcccttcctggcctcaaaaaaaaaaaaaaaagtctgtacgcttgcagaaaatgaaacagatcctttcctggcaatttaaaactcagatgccgcagccagactcagttagtggtttctgtttttctctgtggagagctaaaagtataaaattccaactacttctaactcctgcattgccacatgaagcaaaatcaggcatatggcattagctctgggtcttaagtttagctgcagttctcacttcctaactggtcccaccagcaattttaagttcttttaagttgtatagtttctcaattgtgctaatgaagtgtaactttctcactctgtttttgcttctaccatcttttaaa

SEQ ID NO: 669600 - DNA, 1429 bp, Homo sapiens
atagaaaaggtacagtaaaaatatggcattataatcttatgggaccaccgtcgcaccaatgtggtctcttgttgatcaaaacatgttgcatgtgactgtactttgaaggatatataatcactaatgctatttacagctaagagtgacagtgctagccagaaaaagttaatttgcaatcagtttattgtttatatgcaaattagtcttctattttcacgttatgtgccttaacgttttggtccctgaagtagatttgagtctccctgaaatactgcatctactctttgtttagggaggtggtgagtgtggtgttaatggaaagacatgcagatstggaggaagaaaggtctgggcaaacttcctcaagctatctaacttctctgcaccagagctcatttggaaagtggaacaataatagcacctgcatttctgcctttctgatgggcaggaccacaggggactggaggcagtgctgggacagtgcatggttccgtcattgatagtctctgttcttcatagggaaccccagagtgaaggacggccaatgtgttttgtttgcatgaacacaaattctgagtgagtggggtttgtttccctgaggaaacctgacatcctgtttataatacttgttattacaaaggtggtggtttgtcagaggtgtatactcatcacctttaccaacacagaaaagatagtttgaaccaaagttcttccatagttctcagctaagacactgtttttggagggcaattccacagccacagaggccaggatgctggcttctgccagttactgagagcctaactcttggtgtttaattcccaactgaaaatacatcattcccagcaggttttccctttcgcagtctgcattcaggttctggagtgccaactctcctttatggggtcgaaggcctccatgatattgcaaaagacatgctttctcaagataggctggaggtaaaaaacctccatatttaatgatgctattctagtgaagcagggccttaatgatgataataataataataattaatggcacagctagagaactgacaaataatggggaacagatgatcccttcctggcctcaaaaaaaaaaaaaaaagtctgtacgcttgcagaaaatgaaacagatcctttcctggcaatttaaaactcagatgccgcagccagactcagttagtggtttctgtttttctctgtggagagctaaaagtataaaattccaactacttctaactcctgcattgccacatgaagcaaaatcaggcatatggcattagctctgggtcttaagtttagctgcagttctcacttcctaactggtcccaccagcaattttaagttcttttaagttgtatagtttctcaattgtgctaatgaagtgtaactttctcactctgtttttgcttctaccatcttttaaa

SEQ ID NO: 669601 - DNA, 1429 bp, Homo sapiens
atagaaaaggtacagtaaaaatatggcattataatcttatgggaccaccgtcgcaccaatgtggtctcttgttgatcaaaacatgttgcatgtgactgtactttgaaggatatataatcactaatgctatttacagctaagagtgacagtgctagccagaaaaagttaatttgcaatcagtttattgtttatatgcaaattagtcttctattttcacgttatgtgccttaacgttttggtccctgaagtagatttgagtctccctgaaatactgcatctactctttgtttagggaggtggtgagtgtggtgttaatggaaagacatgcagatctggaggaagaaaggtctgggcaaacttcctcaagctatctaacttctctgcaccagagctcatttggaaagtggaacaataatagcacctgcatttctgcctttctgatgggcaggaccacaggggactggaggcagtgctgggacagtgcatggttccgtcattgatagtctctgttcttcatagggaaccccagagtgaaggacggccaatgtgttttgtttgcatgaacacaaattctgagtgagtggggtttgtttccctgaggaaacctgacatcctgtttataatacttgttattacaaaggtggtggtttgtcagaggtgtatactcatcacctttaccaacacagaaaagatagtttgaaccaaagttcttccatagttctcagctaagacactgtttttggagggcaattccacagccacagaggccaggatgctggcttctgccagttactgagagcctaactcttggtgtttaattcccaactgaaaatacatcattcccagcaggttttccctttcgcagtctgcattcaggttctggagtgccaactctcctttatggggtcgaaggcctccatgatattgcaaaagacatgctttctcaagataggctggaggtaaaaaacctccatatttaatgatgctattctagtgaagcagggccttaatgatgataataataataataattaatggcrcagctagagaactgacaaataatggggaacagatgatcccttcctggcctcaaaaaaaaaaaaaaaagtctgtacgcttgcagaaaatgaaacagatcctttcctggcaatttaaaactcagatgccgcagccagactcagttagtggtttctgtttttctctgtggagagctaaaagtataaaattccaactacttctaactcctgcattgccacatgaagcaaaatcaggcatatggcattagctctgggtcttaagtttagctgcagttctcacttcctaactggtcccaccagcaattttaagttcttttaagttgtatagtttctcaattgtgctaatgaagtgtaactttctcactctgtttttgcttctaccatcttttaaa

SEQ ID NO: 669602 - DNA, 1429 bp, Homo sapiens
atagaaaaggtacagtaaaaatatggcattataatcttatgggaccaccgtcgcaccaatgtggtctcttgttgatcaaaacatgttgcatgtgactgtactttgaaggatatataatcactaatgctatttacagctaagagtgacagtgctagccagaaaaagttaatttgcaatcagtttattgtttatatgcaaattagtcttctattttcacgttatgtgccttaacgttttggtccctgaagtagatttgagtctccctgaaatactgcatctactctttgtttagggaggtggtgagtgtggtgttaatggaaagacatgcagatctggaggaagaaaggtctgggcaaacttcctcaagctatctaacttctctgcaccagagctcatttggaaagtggaacaataatagcacctgcatttctgcctttctgatgggcaggaccacaggggactggaggcagtgctgggacagtgcatggttccgtcattgatagtctctgttcttcatagggaaccccagagtgaaggacggccaatgtgttttgtttgcatgaacacaaattctgagtgagtggggtttgtttccctgaggaaacctgacatcctgtttataatacttgttattacaaaggtggtggtttgtcagaggtgtatactcatcacctttaccaacacagaaaagatagtttgaaccaaagttcttccatagttctcagctaagacactgtttttggagggcaattccacagccacagaggccaggatgctggcttctgccagttactgagagcctaactcttggtgtttaattcccaactgaaaatacatcattcccagcaggttttccctttcgcagtctgcattcaggttctggagtgccaactctcctttatggggtcgaaggcctccatgatattgcaaaagacatgctttctcaagataggctggaggtaaaaaacctccatatttaatgatgctattctagtgaagcagggccttaatgatgataataataataataattaatggcacagctagagaactgacaaataatggggaacagatgatcccttcctggccycaaaaaaaaaaaaaaaagtctgtacgcttgcagaaaatgaaacagatcctttcctggcaatttaaaactcagatgccgcagccagactcagttagtggtttctgtttttctctgtggagagctaaaagtataaaattccaactacttctaactcctgcattgccacatgaagcaaaatcaggcatatggcattagctctgggtcttaagtttagctgcagttctcacttcctaactggtcccaccagcaattttaagttcttttaagttgtatagtttctcaattgtgctaatgaagtgtaactttctcactctgtttttgcttctaccatcttttaaa

SEQ ID NO: 669603 - DNA, 440 bp, Homo sapiens
tcacctgctgtgtctttataagagtaaccagaatgaagagaaatacgacttgattcattttcagaagataaatttacaatctgtctactctttctctgatgggttagcatgcaggactcctgtatgagtccaaaaaatggactccatctagaatttctgtttagtcaaatcatcctcatggaggcaaaatrtttcctctcagtggtaattctgactttgaaagtattctgtcttaaataaattatttatcatatcatttattggatttattaaacgtgtttccatgtgctggagctttcttggcataaaagtagaagtatgacccttattatctgaaatgcctcgtattccagacacaagctacacagtgctaccaattagagtccaatctaagaaagattgagcagggcatcctgaatgttggcaaattctgcctcaga

SEQ ID NO: 669604 - DNA, 1414 bp, Homo sapiens
ccccagtcagcatagtcttacaagaaatcttgggctaagtagacaaaactcaatgaagattaaggactccaaatgcactggttggtaagaacaactaacttttattaagtaccagttgtaactaaacactctttctaaacactttccctgtaatttttttgtaactgttaaaacaggcttgaaaatttttttttaacttataatttttgtaggtacatagtaggtatatatatttatggggaaaacaggcttcttatacccatttaacatatgaataaaacaagattgagaggttaagtagcttgcccaaggtcaatagctactgaaccaggattcaagcctaactaaactgatcaggctaatactaaaatcgacactttaaatcttctccctatgctgccttttgcatggataaagttagcaacctccttctgcaggggacactgacacaaagcaagatctgcattaaaagtgtacttaaagcaatgaagtttctggtttagaaataggtagatcaatgggacaaagtaacatgtaaagaaatatacttgaatatatataagaatttatataatttaatgcggtatttcaacttgttcaagcaggcagataagctagatatgagcaggagggtgagtcccctgagaaaagggaggtttggaaaaatctcataacccagagaccayccaaaacatgcatcctagctatgagcagagaggaagggaaatacctatggagaaagagatgccccttgactcccagtaatcactcactccacaattaaactgtcctgtcagaatgtagctagctacatgctgttaagcgggtaaagagggaaaaaggagaaattcctaagagatacacaggtgcaataagcacagctttaaccactttccaaccttcctcaggtggtgataatgagtaatgcaggcattatatagaatttgtatccaacactggcctgcacatacatgtgaactaacagtaggggggaatcccacaaatttggagtggaaactaggtggggacttaaggcagaagtgggaactagacaaagacaaaggtggaaacttgaggcagaggcagaagcctgaagaaacagtctgccataataaccacaatgcagaactcttggggctgctgctggcttatcccttttaaacaccctgctctgcctcatctttcagcgtgcactgtctctgctactacctaacctttgaggctactactcctgtttctccagctggaccagcctgctcctttcttggagtgtccttctctcaataaactctgtactctttattttctttcaataaatcttttgcttacattactaattggtctcttggctgaattctttctcccaggtaagacaagaactgaggattcctgtacttcccagtaacaaaatcat

SEQ ID NO: 669605 - DNA, 652 bp, Homo sapiens
ggaaagaaaacagaaaagggggagcgggaacatgcaatattctttcagagttaagaaacttaatctgacaggtttatagaatttcgttggaacctagagcaaaatcacaatggctgaagcgtcaatcaggcctataaaaacatctgtgtttagtttaaatgactaagggtgaaatacatcagcttatggaaaatggggagggctcccagtatttggccagcgttctaggtgatggatgttgatgagcaattcccttcaacaactgatttactgccaacggacaaaatgctggaagcacatccaaaaacttatctgcaattaaaattacaagcaagtggtcactctgttcacctcctttaccagagaggtgaccctgctcccggcaactacctccacccaagggccacagaagaactcctccttcctctaaccctctttccttggcctcaaacctcacgrtaaaacctgccttgctctgtctcccaatcgcttttgtaaaggaagctgggtgtagagctcttctttctccctcccttccttttttctttccttccttcctttcttccttccttcttccatgcctttctgtctttccaaattcattgctttgtaagaaacattctcagatcacctccactccactagaaatcca

SEQ ID NO: 669606 - DNA, 969 bp, Homo sapiens
tcagcttttccctttgttccctcagtcttagggagagtaacagtttcctgtggttgcttcttccacgatgtccctttttactctttttgttatctatttaacaactttatatctagctatctattttttatgttaaattatctctgctccaacttgcagtgtagtttctgcctgccttctgactggcccctggctgatggagttctctcatacaatactttccaaatgtcactccrtgggcctcaatcttgcaattctttcctgtttcttgaaacttgaggaggccttgcgcattgacttcccatcttgctagttatcttgctaggtcttatggtactatttcacagatcagcctgtcttcatttgtgccttcaatatcagaatgtaggacttcgggggctatcaaatattcttgcacaagaggtggcatgagaaaagcagtgtttaagaaagacttataaaaggactttcttttttgagacagagcctcactctgctgtccatgctgggtgattcccctgcctcagcctcccgagtagctggaactacaggtatatgccatcaagcctggctaatttttgtattttttgtagagacaaagtttctccatgttgcccaggctggttttgaactcccaggcttaagccatccacctgccttggcctcctaaagtgctaggattacaggtgtgagcccctgtgcccagtcaataaaaggttttatggaagcaagaagtaagaagagggaaatatcacaaataggcagacttgttaggagtctgctggaagttatgtataatgtgattaccatttgtactggggtagtagcagtgagaataaaaatcaagagccattgtgcacccagcgtggtggctcatgtctgtaatcccagcactttgggaggccgaggtgggcagatcacttgaggtcaggagtcccagaccagtctggccaacatggagaaacccca

SEQ ID NO: 669607 - DNA, 969 bp, Homo sapiens
tcagcttttccctttgttccctcagtcttagggagagtaacagtttcctgtggttgcttcttccacgatgtccctttttactctttttgttatctatttaacaactttatatctagctatctattttttatgttaaattatctctgctccaacttgcagtgtagtttctgcctgccttctgactggcccctggctgatggagttctctcatacaatactttccaaatgtcactccatgggcctcaatcttgcaattctttcctgtttcttgaaacttgaggaggccttgcgcattgacttcccatcttgctagttatcttgctaggtcttatggtactatttcacagatcagcctgtcttcatttgtgccttcaatatcagaatgtaggacttcgggggctatcaaatattcttgcacaagaggtggcatgagaaaagcagtgtttaagaaagacttataaaaggactttcttttttgagacagagcctcactctgctgtccatgctgggtgattcccctgcctcagcctcccgagtagctggaactacaggtatatgccatcaagcctggctaatttttgtattttttgtagagacaaagtttctccatgttgcccaggctggttttgaactcccaggcttaagccatccacctgccttggcctcctaaagtgctaggattacaggtgtgagcccctgtgcccagtcaataaaaggttttatggaagcaagaagtaagaagagggaaatatcacaaataggcagacttgttaggagtctgctgraagttatgtataatgtgattaccatttgtactggggtagtagcagtgagaataaaaatcaagagccattgtgcacccagcgtggtggctcatgtctgtaatcccagcactttgggaggccgaggtgggcagatcacttgaggtcaggagtcccagaccagtctggccaacatggagaaacccca

SEQ ID NO: 669608 - DNA, 889 bp, Homo sapiens
cattaaagcatttctgctatgtgcctgaatatgtctttgatttcatgcataagaaatattagatgcttcattctccttctttagaagaaatactaactgaatatgttggattcttctctatttttattgtttctctcttagatttttaaccacagttgctcaagtctaagttttgtattttaagtttagacgtgtaaagtaaaaggctgggagctgagtgtgtggtgatgcttcctccttttcccttgagaactgaaggcaaaaaattaaatttattataaaaatttgttttacttttaaagatgtgattttccagacagagaaacaaactcatgtatcggtgtattttttaatgaattagaagcatgaaatctaggtactttatgtaagtcattttatttaatcctcagaaataatgttttaaaatagttattattttcattctcattttataattggggaaatgtaagatcatcaaaaccaagtttcagtttcctaaagtcacacacctaatagcagagtcaggatttgaactcaattccgtgtctttcaatggcagaaggggttttgcacattagattacataagccattgtccattgactccttgtcctttgcacttgtccaagagtggtccccaggcacaaacatgcatgtgaagaaagctccagargagattctgattcaaatctccagttgggaactaatacatcaaacatttcaaaaatcaatcaaccaaccaatcaacccagcctttattgtatggtggtatttaaaaatctaaactctattttctgcaagttgctagccaattgaaccaaacttcttcactggataatatttttaaacatagatttagaatgcctttttttcaaatatgaaaataaaag

SEQ ID NO: 669609 - DNA, 889 bp, Homo sapiens
cattaaagcatttctgctatgtgcctgaatatgtctttgatttcatgcataagaaatattagatgcttcattctccttctttagaagaaatactaactgaatatgttggattcttctctatttttattgtttctctcttagatttttaaccacagttgctcaagtctaagttttgtattttaagtttagacgtgtaaagtaaaaggctgggagctgagtgtgtggtgatgcttcctccttttcccttgagaactgaaggcaaaaaattaaatttattataaaaatttgttttacttttaaagatgtgattttccagacagagaaacaaactcatgtatcggtgtattttttaatgaattagaagcatgaaatctaggtactttatgtaagtcattttatttaatcctcagaaataatgttttaaaatagttattattttcattctcattttataattggggaaatgtaagatcatcaaaaccaagtttcagtttcctaaagtcacacacctaatagcagagtcaggatttgaactcaattccgtgtctttcaatggcagaaggggttttgcacattagattacataagccattgtccattgactccttgtcctttgcacttgtccaagagtggtccccaggcacaaacatgcatgtgaagaaagctccagaagagattctgattcaaatctccagttgggaactamtacatcaaacatttcaaaaatcaatcaaccaaccaatcaacccagcctttattgtatggtggtatttaaaaatctaaactctattttctgcaagttgctagccaattgaaccaaacttcttcactggataatatttttaaacatagatttagaatgcctttttttcaaatatgaaaataaaag

SEQ ID NO: 669610 - DNA, 889 bp, Homo sapiens
cattaaagcatttctgctatgtgcctgaatatgtctttgatttcatgcataagaaatattagatgcttcattctccttctttagaagaaatactaactgaatatgttggattcttctctatttttattgtttctctcttagatttttaaccacagttgctcaagtctaagttttgtattttaagtttagacgtgtaaagtaaaaggctgggagctgagtgtgtggtgatgcttcctccttttcccttgagaactgaaggcaaaaaattaaatttattataaaaatttgttttacttttaaagatgtgattttccagacagagaaacaaactcatgtatcggtgtattttttaatgaattagaagcatgaaatctaggtactttatgtaagtcattttatttaatcctcagaaataatgttttaaaatagttattattttcattctcattttataattggggaaatgtaagatcatcaaaaccaagtttcagtttcctaaagtcacacacctaatagcagagtcaggatttgaactcaattccgtgtctttcaatggcagaaggggttttgcacattagattacataagccattgtccattgactccttgtcctttgcacttgtccaagagtggtccccaggcacaaacatgcatgtgaagaaagctccagaagagattctgattcaaatctccagttgggaactaatacatcaaacatttcaaaaatcaatcaaccaaccaatcaacccagcctttattgtatggtggtakttaaaaatctaaactctattttctgcaagttgctagccaattgaaccaaacttcttcactggataatatttttaaacatagatttagaatgcctttttttcaaatatgaaaataaaag

SEQ ID NO: 669611 - DNA, 921 bp, Homo sapiens
tgagcaatcatttttcttccccatggccagcatattgaagctaatggtaaaagcattaatttatcatgagatttttaaagatctctcttgtcagtaatgaaataaacacatgatgggtagccagacagttattgtttataggaaggttattacaataattaagattaatagcaattacttgtcatgtttgtggatttytttttccttgggaaataactgtagccatattaaataactaattaacacatctccatgtctggctaagactgcatggattcacaagttctcccatattctctagtactccatagccaaataaataaatcagcactgtaaaacaaccagctcacattttgaaaggaaatttcaaaattaaaccagttaccagatcagtgatgagggcctaacataaatggggatctaacatcaagactttctcctattcatgttctttggaatcttggtaaacccactgatggctgacaaaacgtagatcccagatctcattgcctgtttgcgtgtttctgtgtacgtacataaataaatatatatcttgagtgttatatatcttatataataacctggataattttatcttcacacaaaatgagattttttactcttcagtcacagaactataagagaaatcttaacgcctcaagtattaaagccttaaagctatttttattgaacgtttttcagagcagcatgaaaatggataggaaagaaatgtttcctcatattagaattctatttttttttaaagggggccttaccacttacacagcttaatattgagggaggaaacggaggtcaaggaaatcacttatcctctcccaaagaacgcagtgggccccttccaggaaacacttgaggccctgtgtggtgtcttcacgaggtaggtagagaagcagcgagggc

SEQ ID NO: 669612 - DNA, 921 bp, Homo sapiens
tgagcaatcatttttcttccccatggccagcatattgaagctaatggtaaaagcattaatttatcatgagatttttaaagatctctcttgtcagtaatgaaataaacacatgatgggtagccagacagttattgtttataggaaggttattacaataattaagattaatagcaattacttgtcatgtttgtggatttctttttccttgggaaataactgtagccatattaaataactaattaacacatctccatgtctggctaagactgcatggattcacaagttctcccatattctctagtactccatagccaaataaataaatcagcactgtaaaacaaccagctcacattttgaaaggaaatttcaaaattaaaccagttaccagatcagtgatgagggcctaacataaatggggatctaacatcaagactttctcctattcatgttctttggaaycttggtaaacccactgatggctgacaaaacgtagatcccagatctcattgcctgtttgcgtgtttctgtgtacgtacataaataaatatatatcttgagtgttatatatcttatataataacctggataattttatcttcacacaaaatgagattttttactcttcagtcacagaactataagagaaatcttaacgcctcaagtattaaagccttaaagctatttttattgaacgtttttcagagcagcatgaaaatggataggaaagaaatgtttcctcatattagaattctatttttttttaaagggggccttaccacttacacagcttaatattgagggaggaaacggaggtcaaggaaatcacttatcctctcccaaagaacgcagtgggccccttccaggaaacacttgaggccctgtgtggtgtcttcacgaggtaggtagagaagcagcgagggc

SEQ ID NO: 669613 - DNA, 620 bp, Homo sapiens
atgtgaaagctgaacagtgccttgaagaatgggtcagatttatgtaactgaacggcactgggcactgatgtaatgatctcaggcacctgtcccttttgggccagctggagggcccagagagtccttctcagggagggatttaactgtgggtgattttcctgggctctgagctaaggcaggtttgtgaattccaaagcatcaaacaagcaayagattccttttagaacatgcgtcatctcatgtagtcactgtaagtgatctgtgtgaagccaaatagtaacacagtggaattctttcagaatgagtggggaaatcaggatagaggatgaggtcttcacaaggcagcagtatggactagtacaattgttctcaacatatggtttccataccagcaacactggcattgcttgggggcttgctggaagtgcaggatggcaggcctccctcacccagcttcactgaatcgcacactctggaagtgaggcccaggaataggtttaacaagtcttccaggtgactttcagacaggtgaaatttgataaccactgcactggtggaaggaagagagggtccagagtcacacggcaagggttcaaatcccagccccagcaagctgaata

SEQ ID NO: 669614 - DNA, 591 bp, Homo sapiens
acagattcattcatttcctgtggtaacaccgtattgttaagttcacctccattttggtgtaaatatagaacgccgcaaaaatattcagcccagaatgatcaacgtgtggccccctttcaaactggctcttgcacagttttcggctgtgcaattagccagcaccttcttgtggagtcaggagacctgagctcctgttaggtactgttttgggaaaaagagtagggacattcagaggcaccatgcagcggtcacctgggatatgaaatgccagatcaagaggcctgggtatcagtaagcaaatcgtttaatggctcaaatccacatcactctataaaagagtgctatcacttttctggttagaataagaaaaggccttgaaagcaatgttcttttctgaatgacacatgtggctctgttagaggttagatttcagggtgcgtcatgtgtacttcaccctcatggcagactgtatcaccccccgctagaacrcagaagcttccagaagagctgtcagctgaggctgggtccagctgtgcactgagaccttggcagaaagagctggcaacctggccctttgctgtcccagtcacg

SEQ ID NO: 669615 - DNA, 927 bp, Homo sapiens
ccaaaaccaaaagaaaacaaaaaaagcaaagcaaacaacaaaaaagatggtttctttttcttactgtggctctttgaattttaaagatattaactctttcttacatattgcgaatgtttttcctaggctttttatttttttaaatttctttcaccatatggaagtttggaaatattatatggtcaaattagctaatctttcccaatattctttgtcactatactacagtgccaactgaagtggtgacaactatggctggaggacggtaattaaaaaacagggaagcttcctaaaaataagaggtgaggataatgggatgaataaagggagaatctttcatctgagataaatacaaatgctcaactcctacttttttgttttgttttgtttttttaaagagatgggggtctcactatattgcccaggctggagtgcagtggctattcacaggtatgatcataacatacggcagcctctaactcctgggctcaagcaatcttcctgcctcagcctcccaagtagctgagactacaggtgcatgccactgtaccaggcctcaactcttattcttaacaacatgcctyggatgagtaaagtatgttatacacaaaaaactagggcagggaaataccagatcacttctggaaagccctgccaagcccagggtggtagagacagggtttttgcttaatccctggctgcagttcctgggtaggagggtcaatatggaggaaagaatctccaaggactgtaagagtagggacaagccaggattgggcggaggtgtcagaaaggtcttactttctggattactgcctagcacacatgaagcccttgcaggacagactgccaaaagcttggtagaaggctgtgcaccacttcgccagccttcaatcaacatgcaccaactgcaaaccaaatgacaac

SEQ ID NO: 669616 - DNA, 651 bp, Homo sapiens
aggagttctttctatatatgctgtttcttttcttttctttttttaaaatatattttatataagttgaactggtttgtgttccctgagaagcagagactgaggtggtagaagtgtaaaaggcttactgtggagtacactatgaaagaaaaggaaagaagatgggattgggtaaggggagccatcgatctgcaatacagccctggtggcctctgataaccccatagggagctctgaagcaaagaccgcccatcaaaggagccctgattcaggtggaaatagctaggcctttgtatcactgccttctttagtcactggctggagcatactctgcaaagagcacrgttggttacctttgcctttctgaattattggccgaggatggcctccaagaagagcatgaccttggctcaaaagctgatgtggacctgaagcatcctgccaaaagcaggacgtcgtgagttcatcacactcctcacagctccacagggggtcctttcttaaaggaggacctgaatggtgcattcacattgccatgagtcctatattgtaaatgccttctcccagtctatgcttatctttcccagtttaaatgatgtcttttgatggacagcagttcttgatcttaatgtagtccaatttttctttttttcc

SEQ ID NO: 669617 - DNA, 651 bp, Homo sapiens
aggagttctttctatatatgctgtttcttttcttttctttttttaaaatatattttatataagttgaactggtttgtgttccctgagaagcagagactgaggtggtagaagtgtaaaaggcttactgtggagtacactatgaaagaaaaggaaagaagatgggattgggtaaggggagccatcgatctgcaatacagccctggtggcctctgataaccccatagggagctctgaagcaaagaccgcccatcaaaggagccctgattcaggtggaaatagctaggcctttgtatcactgccttctttagtcactggctggagcatactctgcaaagagcacggttggttacctttgcctttctgaattattggccgaggatggcctccaagaagagcatgaccttggctcaaaagctgatgtggacctgaagcatcctgccaaaagcaggacgtygtgagttcatcacactcctcacagctccacagggggtcctttcttaaaggaggacctgaatggtgcattcacattgccatgagtcctatattgtaaatgccttctcccagtctatgcttatctttcccagtttaaatgatgtcttttgatggacagcagttcttgatcttaatgtagtccaatttttctttttttcc

SEQ ID NO: 669618 - DNA, 618 bp, Homo sapiens
cacactttatgaccacgcaatatatccatgtaaccaaactgcacctgtaccccttaaatctgtattttaaaaaacaccaaaaatcccatccccaatagtatctacctcacagagttatgatcaggattatttatttatttattttgagacagggcctcagacacccaggctggagtgcagtggcacaatctcrgctcactgcaacctctgcttcctgggttcaagcgattctcctgcctcagcctccccagtagctgggattacaggtgcccaccactacctccggctactttttgtattgttagtagagacagggatgtcattatattggccaggctggtcttgaactcctgacctcaagtgatccacctgccttggcctcccaaagtgttgggattacaggcgtgagccactgcaactggcagatgaagtaatttaaatgttcaatacacatcagttattattaaggcacagacaaatcttctttacctctgtactccttatccttggatctaagcttcttggggctccaagttaaatattttatagcctacattagattggaggaaggggtgagggaaagaaaaagcaagctcacagacactttgcgaagaaaaa

SEQ ID NO: 669619 - DNA, 650 bp, Homo sapiens
tattcccaacattgcactatttgatacgttcktatttctaggtctttaaacacacacatacaaacacacacactgctcatttcttccatccacagagcttacaattaacacctcattatgccatatgttcatgtcctctgtaatccatatgggtctcaggaagagatgttaattacataattctgatcagcctgttaggcagccaaattagtctgtgtaaaatattttacccatcaaaacatgacacacaccacctcccccctcaactttcctcttactgaatattttccagtttgtttccacttatctgctcaagttaaaagcctcaagtcacacttgatccttcatacctttcctggccttctctaatgtgaatgtacttttacattccaaaagtaagtatcataggtcctatctccaaaatatgtcttgaatgcatctaccatgtcatctctactgtcatcactttggctaaacactctcccctgggccacaataacaacttctgatcaatctccttgcagaatgacttaaaaataaatgtcaattcatgtctctccctctgtatttgttttctatctgctgctgtaacaaactgccacaaatttagcagcttaacacaacacaatttatccccttacagttctgca

SEQ ID NO: 669620 - DNA, 807 bp, Homo sapiens
ggtagaacacacatgtaatcccagctactmgggaagctgaggcaggagaattgcttgaacccaggagatggaggttacagtgagctgtgatcatgccattgcacttcagcctgggagtcagagtcagaattttaaataaattcagcccgggaatttatttaaaaaataaattaattaaatgaatcaataaatacatatcttaaaattctctgggttttaatttctaatacaatcactatcaacataagggcagaatacattatttaaaagtctacttgagactaatctataaaccgaaactctaggatcttcaataatttaaagtgtataaaagagtactgagggcaaaacatttgaaaggtctgctaccttagctaaggattaatattcactagtagtgtttctcaagtagatttttctgctcgaatgagaacaaaatattacagtctatgcagagagttgcatctctacatacaaattaaaattatattcaggtttatacatcattatcttatcaattaacttatcatgaaacagttcctcaaaaccctagtgaagtgaaaaagagttactcaaattaaggaccaatcctttaaagtataaaaatttcctataaaacccagcttgatcaatcagctagcctctctttctctctgcattctcctagatataacatgtagtatttgacttttaaaaaataatagaattctatcattgtcttctaagtacttatttgcaaagaagatttttttaaagcttttgttttccttctctaaaattacatcatgtcaatacaagaaggacaaa

SEQ ID NO: 669621 - DNA, 641 bp, Homo sapiens
gaggagtaaaattaagtgcactcatcataagcataggatttgatgagttttgaaaatgcatgtacctatgtagccacgacaacaatcaagatataaaacatttctatcatccgcagagattttttaaaatataatcatattctaagaagtccacaatttaaaatcatcctacttaagaaaacaaagagacggcataataccatcacaagagtagcacagaattttgagtccattgtgggttctaattgaccacttactcattgtgaaatcttaattaagtcattgagactttctgggcttaatagttccaggtacatgttaagccctcaataattgttcattattgttactcacttatgcaatcaaaaacatttattgtaattcatatttttatatagcaggaatagttaaataaaattcacctgtaattttaagagtcttgtattcaaaaagcacatattttgatttttatattcctatcttatttgtatattaactgagattatacrtatttagtaaccatagatccttatattatcttgtagtattgtgtatcatcaccactatacatagtacactggtatattttacaatatgaatattcatggtatcagaataaatacatacaatttaggttgcag

SEQ ID NO: 669622 - DNA, 1361 bp, Homo sapiens
cagcttatctgagagcattctaactactatcagtagctactattagtagctcctctcagtagctagaataataccaactaaacctaatgtcccattaaagaaggacattctttgacttataatctagagaatttcattctgacaagcatcaatggactttttactttgtatcatgagattttaaatcacacaagccagagttggctagatcagtcaacaaaccaatatacctgttaaccaaaagaacgttactgttcatgaaaacaatccatattataaaaatgctttaggatttatgtgataataatagctagcatatatagaatgctgtgtgccaggttttattctcagtgctttacacacaatcactcacttgaaatggttaacagtgttctgaggtagctattatttcaattttttgagatgaggagatggagacaaaagaggtggcatagaggtaaagcaagatttgagcctgcgttgtgtgtctgcaggatctatgtccttagacactatacaatgacaataatgttcctttcttcttcctgagcctatgaagagtataccaatcaagggcaaatgccctttaactgccagtctctgaagctcaattacttctttaaaaaaggacaatagcaatttggagaagaaaaagcagaactgtcttattactagggatagttccttctcttatgtagaatatcaccagcccaaaaaaaaaaaaaaaatctccagtaataatcacacaaaaaagaaaagatgcatctggaattggatgtgcctatattctttcgagaaattctctaaggtttgaggtgcattgacttaaaatatactgaaaatgggagtcctcatagaggtttataattaagagcaatagaagtttgtgtaaatattttataagtttcttattataaaaattataataaatttgataatgtaaattgcctaatattcattttatcatgaggtatttttttcttaaacttgaacattaatttattctcatagttaccacctcacagccccaaacataataaattttgaaaatgtatttatagaaaattatctgtgcaagtgctcatttcaatctttacaatgaagcaattactttgcatgtattaattcctgtcacatttttgatctgtgctctaacattgtcttcttgaggaaattattatgttttatagttcaaatttcttagatttaggacttcaaaggcctaggttctgttcacatttaattttgctacatcaataaaatatgaatgaattggctaataaagcaacaaawctattttatgtcatggaatataggttatcgtttatgaaattgctgaattgccctggtaattcactgta

SEQ ID NO: 669623 - DNA, 1444 bp, Homo sapiens
tgagatgattttaaattgagcaccaatgccttttgaaaaattctctctatagttttgccttaaattacagtttacttctttttcaggttagaacttctttatctttgacctggaccattacagtcagtccacacttcagaagttctcaaatattcatttgtctccaccatagtatattttctccattgccaccataattgcctttcctgtgtgtgtgtgtgtgtgtgwgagagagagagagagagagagagagagacaacattttgttctctgccatggaaatcctttcatgggtccacatagcatctatgtggtaaactccaaactgataattatgacaaaataccctccatatctcggcctctatcttgtttttagttgctctcccacatgcacttgttacattgaacttctcattattccttgattacaccaactattttcatgcttaccttgtttggttcttgcttatcaaagcccataaagtcctattccctcctcaacaaggcaaaagcttattcgttccttcaaggcccaacttagattatcaatactttttgtgatgtgctgcttaatcatcatccctctcaaggtacaaatagttacttttacttctatatcacttgtagatatttgccattgcacttttcacaacctgctgcaaatacttacgagtctatcaccacatggtaagcactgtgtctttatttattctggtattccctaaagccaaacacaggactttgagggtttgttgaagaatctgaaaaattaattaagcatagtatgcctctagacttaggtaagactctccaatgttgctagaataatatttagaagtagccgttatctactttcaccaagggatcaaagttaatgtcagccatgatgggacaaattgacattgtgcaccgcctaatatgatgcgctgagaaggatacaacatcaccaccgtggtattcttcctagtaatgaatgacataaatttgatcacaaggaaacattagataaaccccaattaagcaccattctaaaaaatagctggctagtattctaaaaagtgtcaaggtcttaaaagacaatgaaaggttaaggaactgttccagattacaagagaataaagagatatgacaactaggtgcattaggtgatagtggactagatcctgagccagaaaaatgacattagtgtgtagattgacagaatttgaataaggtctgtaaattagataaaagtactatttactgttaaggctaatttctaatattaatttcttgattttgatgatggcacggaggttaggcaagttaaagtgtggagtgtgggtgaatgtatatgttaattctttttactatttttgcaacttttttgtatgtctgatattatttcaaaataaaatgtttaaaaatttcaaactgagaaattaaaaggattaaacaaaaaa

SEQ ID NO: 669624 - DNA, 1444 bp, Homo sapiens
tgagatgattttaaattgagcaccaatgccttttgaaaaattctctctatagttttgccttaaattacagtttacttctttttcaggttagaacttctttatctttgacctggaccattacagtcagtccacacttcagaagttctcaaatattcatttgtctccaccatagtatattttctccattgccaccataattgcctttcctgtgtgtgtgtgtgtgtgtgagwgagagagagagagagagagagagagacaacattttgttctctgccatggaaatcctttcatgggtccacatagcatctatgtggtaaactccaaactgataattatgacaaaataccctccatatctcggcctctatcttgtttttagttgctctcccacatgcacttgttacattgaacttctcattattccttgattacaccaactattttcatgcttaccttgtttggttcttgcttatcaaagcccataaagtcctattccctcctcaacaaggcaaaagcttattcgttccttcaaggcccaacttagattatcaatactttttgtgatgtgctgcttaatcatcatccctctcaaggtacaaatagttacttttacttctatatcacttgtagatatttgccattgcacttttcacaacctgctgcaaatacttacgagtctatcaccacatggtaagcactgtgtctttatttattctggtattccctaaagccaaacacaggactttgagggtttgttgaagaatctgaaaaattaattaagcatagtatgcctctagacttaggtaagactctccaatgttgctagaataatatttagaagtagccgttatctactttcaccaagggatcaaagttaatgtcagccatgatgggacaaattgacattgtgcaccgcctaatatgatgcgctgagaaggatacaacatcaccaccgtggtattcttcctagtaatgaatgacataaatttgatcacaaggaaacattagataaaccccaattaagcaccattctaaaaaatagctggctagtattctaaaaagtgtcaaggtcttaaaagacaatgaaaggttaaggaactgttccagattacaagagaataaagagatatgacaactaggtgcattaggtgatagtggactagatcctgagccagaaaaatgacattagtgtgtagattgacagaatttgaataaggtctgtaaattagataaaagtactatttactgttaaggctaatttctaatattaatttcttgattttgatgatggcacggaggttaggcaagttaaagtgtggagtgtgggtgaatgtatatgttaattctttttactatttttgcaacttttttgtatgtctgatattatttcaaaataaaatgtttaaaaatttcaaactgagaaattaaaaggattaaacaaaaaa

SEQ ID NO: 669625 - DNA, 1444 bp, Homo sapiens
tgagatgattttaaattgagcaccaatgccttttgaaaaattctctctatagttttgccttaaattacagtttacttctttttcaggttagaacttctttatctttgacctggaccattacagtcagtccacacttcagaagttctcaaatattcatttgtctccaccatagtatattttctccattgccaccataattgcctttcctgtgtgtgtgtgtgtgtgtgagagwgagagagagagagagagagagagacaacattttgttctctgccatggaaatcctttcatgggtccacatagcatctatgtggtaaactccaaactgataattatgacaaaataccctccatatctcggcctctatcttgtttttagttgctctcccacatgcacttgttacattgaacttctcattattccttgattacaccaactattttcatgcttaccttgtttggttcttgcttatcaaagcccataaagtcctattccctcctcaacaaggcaaaagcttattcgttccttcaaggcccaacttagattatcaatactttttgtgatgtgctgcttaatcatcatccctctcaaggtacaaatagttacttttacttctatatcacttgtagatatttgccattgcacttttcacaacctgctgcaaatacttacgagtctatcaccacatggtaagcactgtgtctttatttattctggtattccctaaagccaaacacaggactttgagggtttgttgaagaatctgaaaaattaattaagcatagtatgcctctagacttaggtaagactctccaatgttgctagaataatatttagaagtagccgttatctactttcaccaagggatcaaagttaatgtcagccatgatgggacaaattgacattgtgcaccgcctaatatgatgcgctgagaaggatacaacatcaccaccgtggtattcttcctagtaatgaatgacataaatttgatcacaaggaaacattagataaaccccaattaagcaccattctaaaaaatagctggctagtattctaaaaagtgtcaaggtcttaaaagacaatgaaaggttaaggaactgttccagattacaagagaataaagagatatgacaactaggtgcattaggtgatagtggactagatcctgagccagaaaaatgacattagtgtgtagattgacagaatttgaataaggtctgtaaattagataaaagtactatttactgttaaggctaatttctaatattaatttcttgattttgatgatggcacggaggttaggcaagttaaagtgtggagtgtgggtgaatgtatatgttaattctttttactatttttgcaacttttttgtatgtctgatattatttcaaaataaaatgtttaaaaatttcaaactgagaaattaaaaggattaaacaaaaaa

SEQ ID NO: 669626 - DNA, 1444 bp, Homo sapiens
tgagatgattttaaattgagcaccaatgccttttgaaaaattctctctatagttttgccttaaattacagtttacttctttttcaggttagaacttctttatctttgacctggaccattacagtcagtccacacttcagaagttctcaaatattcatttgtctccaccatagtatattttctccattgccaccataattgcctttcctgtgtgtgtgtgtgtgtgtgagagagwgagagagagagagagagagagacaacattttgttctctgccatggaaatcctttcatgggtccacatagcatctatgtggtaaactccaaactgataattatgacaaaataccctccatatctcggcctctatcttgtttttagttgctctcccacatgcacttgttacattgaacttctcattattccttgattacaccaactattttcatgcttaccttgtttggttcttgcttatcaaagcccataaagtcctattccctcctcaacaaggcaaaagcttattcgttccttcaaggcccaacttagattatcaatactttttgtgatgtgctgcttaatcatcatccctctcaaggtacaaatagttacttttacttctatatcacttgtagatatttgccattgcacttttcacaacctgctgcaaatacttacgagtctatcaccacatggtaagcactgtgtctttatttattctggtattccctaaagccaaacacaggactttgagggtttgttgaagaatctgaaaaattaattaagcatagtatgcctctagacttaggtaagactctccaatgttgctagaataatatttagaagtagccgttatctactttcaccaagggatcaaagttaatgtcagccatgatgggacaaattgacattgtgcaccgcctaatatgatgcgctgagaaggatacaacatcaccaccgtggtattcttcctagtaatgaatgacataaatttgatcacaaggaaacattagataaaccccaattaagcaccattctaaaaaatagctggctagtattctaaaaagtgtcaaggtcttaaaagacaatgaaaggttaaggaactgttccagattacaagagaataaagagatatgacaactaggtgcattaggtgatagtggactagatcctgagccagaaaaatgacattagtgtgtagattgacagaatttgaataaggtctgtaaattagataaaagtactatttactgttaaggctaatttctaatattaatttcttgattttgatgatggcacggaggttaggcaagttaaagtgtggagtgtgggtgaatgtatatgttaattctttttactatttttgcaacttttttgtatgtctgatattatttcaaaataaaatgtttaaaaatttcaaactgagaaattaaaaggattaaacaaaaaa

SEQ ID NO: 669627 - DNA, 624 bp, Homo sapiens
aactagaatactgaaataaatattctctttctgcttctgccattaactcatctgtaaaattaatttccaagccctcttctaatcctgtaagttcatgattcataatagttttcatcattggaaaattatgggaatacaaaatctaagagttgcaatgttaaactacaagaagaaatagataagtacaagctgagcacccataatctaagaaatctgaaatgctccaaaatctgaaacattktgagaggggtcaagatgccacaagtggaaaattctatacctgacctcacgtgatgagtggtagtcacaactttgtttcatgcacaagattatttaaaatattgtataaaattattttcaggctatatgaataggatgtataaaaaaataaatttcatgtttacacttgggtcttatcccaagatacctcattatgtatatgcaaatatttccaaatctgaaatacttctggtcccgggcattttggataaaaaatattcagtctgtattatagattacctaactatttttgaaatttctgtattttttgctacatttcttaagagattgaccatctcttcctctctctttcaaaactctcaaataggatcaaaggtcagaaaa

SEQ ID NO: 669628 - DNA, 1605 bp, Homo sapiens
cccttgggggaaataatttctacaaattaataaagcccaatcacactatttccatgctggcaaaattataaccccaaattgctttaaactgactgatgaaaacctcacatattttcagattagcatatacttgaacataatctgtaacagtgacatctggtggcttttattataatgctgtggcatcctttgtacaaagccatgccctaattaaacagaattgtaccacagctttgtgttttatgcatgacaaaagaaacatagatgcatactggctttcaccaaagcattccttataaatttggtacagcaaaatgtcaagtttttacgtgagttcataagtttgaaactttcagataagtgtatacaaattaatattttaaccttcaactttttagtcacactgccatgaacttgctggcttgaaatttacgtgtttaactttcattcattttccttgtgttgatggggtgtaacctcagattggcatactctttcatagcttcttccaacactagtctgtcactcgcagtagctaaaaccccaggccgtctggaataaatttaattcattgccctcttgagctctaccagggctaaatggagagagaagggtgaataggtgaatctcaatctttctctcagagtgttaaatgttaatgatgaccttgatttgtccatgtgcacttctcccctgccccctagtcctgagatctagcaacacatatgctgaaaaactttctgaacatgatgaaaaaaaatagtgggaaatatactaacaacaagaattctttaaaaaattatgtcttagctgctagttttaaaataccacccttcagtttgcactttattcactgcatggaaatcagtcaagaggctgatctttttggcatttccatctcttaaacttctttgacagtctctttgtaaacattggctgatgcagaacttctaaactgaagttctattgtaaagggacttttaagtttgtatttttagtaggttggtaactcagattatttatattgggtaatctggtttaattcactgttgaatatagaaaagaaattgtgactaacaacacttgtgtttgtgtgtgcaagttgaaagtgatctaagcatcaggccaaactgtggtaattttgactgtaatgtgctgtatttaagcagatccaaatgagcaaagccattggcttacttcaataatctgcaatttctgctttctttctgtctgggcatgtcgtttgtggtagataaaagcacttatcaagagaaacactttattaggaagttaggcagagaaacaaaccatatactcaagcaagattttcttcaaataactgaactgaagtaacaatttaatgtttccacatcagtaagttgtgaatatattcagacagagagaaacagatgtcatttagcaaaatgctatgctgcggaattaccaattcaaggaataattcaatactcttaagttggttttattatctcttaatccttcatggggataagaaatattttttccaatatacgtaatctatgaaatcatgggtcagaactatcaycagactgccctttatgagagtttatgttagtcgccataaaa

SEQ ID NO: 669629 - DNA, 671 bp, Homo sapiens
atcctccctcatattctgagaaacttctctagatgatttcagcccctaattacctctgcctgtgtgccatttgtccttgttgtccttactattcaagtggcccttcagagaacatgctagtattaatactcatctcgagtcaaaatgccatcctcaactatactataaactccttgcagacatggacaatcgctaatggttcttctacaccgcacagcctccagcatagtgctaagtatacaggagagatgctgaaatatccgctgaatgtctaatagaactgtcaggcagaggctgcaagcattagctatgtaaataagtttttattttacatttttatatacgactcaaatattaagaatttccatgaccacaccccccaacaygcctaacagacctcctagatattttctgtgttcatatttcagtttttatttccttaatgtagcaattatttggcatcatcttaagaagttttttccatatttaaagttttctttacatccccttccctgcacaaaatgtttttcctgtattataaacatgttcttttccatctgagtaataagcatgaccaaacttactaaaactaagatacttcaatttgcatagagaagttgtacctatttttgaatgatattcttaaatcaaaccacactgtttgaataaaa

SEQ ID NO: 669630 - DNA, 611 bp, Homo sapiens
cgatggtgaaggtgaagcctgccagagtgtaccccaaggagagagggtggggctggggcccacctcatgccaagtgctactcacgtctgcacttccaccgatcagccactcacagccatctgtgggacaacacagaggctggggagaaggtgaggagcacagcacataagttccagaaacatgccaagatccattcagcatgaactacgtgccaggcacacgactgctatgtgagcacgcagaaacggcaacacccccaggaccctcgcccagctcagagaactcaggaggcttgcccaaggtcatataacttgtaaatggcagagccaggattcaaacccagaccagggctgatacatgggagataggggcaggttggatgaacagcgctttttctgtcatcccatgctgcatcaccattattaaaagtgaccaytcatcaatcacagcatagttattgaatacctaccatatcccaagaactgtgccagttaactgggccatagaagtgaacaaagagtaaatttgttaacattatcacacttcagttgaaacctattttattgaatacacacacatgctcttaataccgaactttctagtcactttca

SEQ ID NO: 669631 - DNA, 636 bp, Homo sapiens
tcctttctgtctaagggtacagacctcctattgtacctaaaaaaaaaaaggttctggttcattggggcaattcacctaagacagcaaagaacccctatgggcaggaaaacaggaattccacacaagcaagaaaggaggacttcagagaagccaggcccacacttaacaatgtcasggtggcaacagccctcctcgattaagccggcctcatcaactaagtggcccttgtctgaaagctgcatccctaaaacagctacaatcaggaacaagcaaagggttccaggtgaggcgtcctcccgctgggtcctagatacttacaactctccccggtatcagcccacccagtcccagctgagattcagagcacctgcccacccaccacctcacccccacttcctagacaggcctaatttacaggcatagaaactcaaaatgctgaacaggcccaagtagtggaggtaaaatgttgcagccacagtatctgaatgtgaggctcctgcactcttggccaccagcatagtgcgctgaggtgcaggtggggacagagcccttggaggtccaattatcttccagctcaaacagtaacccactctgtggctctctgctaagaatgacctctctccatcctcccctcct

SEQ ID NO: 669632 - DNA, 636 bp, Homo sapiens
tcctttctgtctaagggtacagacctcctattgtacctaaaaaaaaaaaggttctggttcattggggcaattcacctaagacagcaaagaacccctatgggcaggaaaacaggaattccacacaagcaagaaaggaggacttcagagaagccaggcccacacttaacaatgtcagggtggcaacagccctcctcgattaagccggcctcatcaactaagtggcccttgtctgaaagctgcatccctaaaacagctacaatcaggaacaagcaaaggsttccaggtgaggcgtcctcccgctgggtcctagatacttacaactctccccggtatcagcccacccagtcccagctgagattcagagcacctgcccacccaccacctcacccccacttcctagacaggcctaatttacaggcatagaaactcaaaatgctgaacaggcccaagtagtggaggtaaaatgttgcagccacagtatctgaatgtgaggctcctgcactcttggccaccagcatagtgcgctgaggtgcaggtggggacagagcccttggaggtccaattatcttccagctcaaacagtaacccactctgtggctctctgctaagaatgacctctctccatcctcccctcct

SEQ ID NO: 669633 - DNA, 629 bp, Homo sapiens
ttgggaggctgaggcatgagaatcacttgaacctgggaggcggaggttccagtgagctgagatcaggccactgtactccagcctsggctacagggtgagactctgcctccaaacaaacaactctaaaattctgatggaaatatggatttgaaaatgaaaaaagcaagcaaaagcctagacatattttgctccaatagactgtgtcaaaggtgtctgcctttgctcactgtatgacaaactctaaatactaaaacattaatgagctgccttaatatgttctaatacagtgtgacaaatatgtacactaaagatttcactgaaaaggtacttatggcatatctgccacaatagtatcttagctatttagttctttgtgcaaaaaataatcatacagatccattactgaatgacttgaaaagtaccattctggctgacatgctcataacaactattcatcattgaaaaaccttgacaggcaaagcatcccaaggtgggtcaccgaatttcaagctggcattagagaatcacagggctggtgcacggagagctggctctccagcaaggacgtctggcctggccgggaatgattcattgagcaaaaggacatgccagagaaaatgaggaggatg

SEQ ID NO: 669634 - DNA, 1633 bp, Homo sapiens
gtggtaaaatgcacatgggaaggtagtgatcctaatgaaaataatttcagtttaaaaaagcgaaaaggaagaacttatgaaggaacagcttcatattggtacacagaaaatggctgtggtactaaatcaacttgcagtgctgatatcacctggttcaagtgtttatatctgtgaaccaaataggaacatctactgggaaaaaaaatgacaaaacaaaaaaacacccttgtcckttttcagaaaagtggtcaaaagtcaagccttggcaaaaaccacaaacgcagcctgctccgtcttacacttcccagcttccttgaaggaaccaggactcctctgttgagcacttgtcaccttgcctagatcagcaccagacaccagaaagaggtcagaccccagcctgatgaactggcatggtgggtagaccaccaggagatgcccagccctgcccattgagctgacctcaggcaggtgatggcctctaaccaccttggggacgcatatcctatggtcaatggggcctgtctgctactaaacctgaagagaccatggtaccactccccacctggagaagcccagggatctccatcctctgcccttggggggatggggagaaaatatctttatagggtggaggttggggtaatagggcagtcagcaatttcactctttacttctcccatgtgttttaaattttccccaataattatatattccagttatgttaaagtggggagggaagcattaaagccaaaagccaaaccccctgctctaagaataactgactctgggccgggtgccagtggctcatgcctataatcccagtactttgggaggctgaggtgggcagatcacctgaggtcaggagttcgagaccagcctggccaacatggcgaaaccctgtctctactaaaaaatacaaaaattagccaggtgtggtggtgcacgcctgtaataccagctactcaggaggctgaagcagaattgcttgaatccggaaggcggaggttgcagtgagccgagattgcaccactgcactccagcctgggtgacagagcaagactccaactcgaaaagaaaaaaaaaaaaaaaagaatgactgactctgggatgtgtttcctcacatgaaaggttcagatgaccctgggagctcaagatggcacaatctttaatgtatctgcaattatgcagggttgaaagttccaagttttaagtcaaaggcaatgaatttataattttgagatttcaatttgagagcagttaggtttgttctgtgatcttgaatcactgatctggccttggatattcagccttcttttcccaaaaggtgatcatttgctttggtggttcaaacacattgcagtggggttatttggctttacaaataatacactacaaaattctagctgggaaggacacacaccaatttaaaagagagtaaacacctgtgaaacgggagcgagaagaagggggaaggggttggagtaacaggaggtcttcagcagaaggtttttatttttagtaaagaaagagatgttacaaatacctgatgtgaatatggaaaatattaacgtttattaaatctggtagaataccacttgcccgtaattcaaatgtttcacgtttttataatacg

SEQ ID NO: 669635 - DNA, 1348 bp, Homo sapiens
catccctcctcccccttaccccttatcttatattaccttctaacatgctatgcaatttacccatatgttatatttcttgtttatttcctgttcctccctccccagtgtaagctcctaaaggcagaaatcaagctgacctaagcaaagacctgaaggagctatgaggacatctggcagaagaggtaatgctacgggtaaggaattgtacaaacacatgagaaatatccacagaaagcatagcacctggtaggcacagaatgagtactagctattattaatatttagtccacccctcccttcaaaatggaaaagcaatgctgtgaattttagtgaatcgtttataattaaaccaaccatgtttatttaaagctacttggcagaaaggcactaggtaagaaggcagggcggggggagaatgccaaaagctgataccccacacacacctaactcatgcctagaagacccagggaggaatgtggcattcccagcagaatagaagccctgatcctttgcttcgaaggatgtgctttcaatcacattattcgatttctctggccctgtctgtaaaaatgaagggggtagttgataatgcctagagttgggtaaattaatagccaaatattagcttttgataaagagtccctcctggaataagacaggaaataacaattattgttaggactggcagctttattctctgcataaacttggtttgacactctctcctgtgtattttaacaaacacaatttcagctcctcccttcctatctctattcccagactctcagggggatcaaaaggaaacagtaaaattttgaagatgtgactatttgacagtcagcatgatggttcagagtcaaacattctataactttttcttataatttctgttctgcaatctctcaaattgctaggactcgggaatggagaatgaattagcagcttcttttagggtaaatgtattccccttccatcctccacctaccccaagcatgcccagggtcttctggccacaggtccactccaaccctgctccaggccctggagtgaggagtcctgccaaaggaagttggatgagcagctctggcacagtgagagccttctgggcctaattmtcttacataaaatggacctgatcaaaataagaccttccctgggtcgcttttaaatgacccatcctgctctctaatacttctacccagcgtcagactgtctggggaggaggtagaagggggaagcacacactttggtatcaggataatttatctacatggcaccaaacatcagcatgccgctgtgcctgcctgctccatctttgtccatgtagttgctccacacagcactcccc

SEQ ID NO: 669636 - DNA, 1722 bp, Homo sapiens
tccttcgctctctgctatgatgataagtttcctgagactccgcagccacggtgaactgtgagtcaattaaacttcttttctttataaattacacagtcttgggcaatgctttatagcagtttgaaaatggactaatacagatacttttgtggggaagcattcttgtgataaatatgtatcatatataatgtatattgatgtattagtatacataaatacgtatcacaaatgactatacatatgtattttctaaatgtatctacacaaatagtagaatatgtgtatatacgtatgtgtgtgtgtgtgtatatagctacagataggtacatatactacatatatatatttgcctatatatacccatatgatatatatatatttatctactatgaaaacacacacacacacacatatatttacctacctatatgtagacatactgatatgtagaaatgtcaggagattgtattttaatataaatatgtcacctctgccgtactagaatgtgtaaagttgagcccattgttggtgggatagggaggttacagaaaggactactggtgggaaggtagtgggaatatactcacacaagggggtaaggcataaagtagtataagaactaacttcataatactgccaaagactgattctgtttgtcagtcagaataggatgtaaaagactatttcaaagagttaaattatttgttaatatcagagatcagccacagacaagaagtttatggatgagtgcagcagtggtccattggacatgttaaatacttrtggatatccacaatttgaattgacattaaaaatgaatggatacccaactttgaattccatatcgtttttcatatcaaaaatattattttaactatttaaacattttaaaattattctcagctcatgggccattctaaaagaggcaaagggctataatttgacttatgccatatggtttactgatgcctggactagatcatttataataaatgaaaatgcctctcttgatcattatttcaaatttggtcaaagaaactgcatgatatcttaagtctgtatgtctttggtagttactatattctttaaaaagtatcagaacacattttctttttgaatggacacaagtacaagagcatcaataatgaaatcattttttattatagaatacagatattaaagccagacctatgtgtttcctagctgaataaaaatagtgtgctatgtatatataaatcaataggcttttcattagtgaaaataacgaaaaataacaaagctaaatcattatgaatttcttaaatgtataaagtccatttcaaaagaattttctaataaagaaagaacataaacaaagtgtaggtaagtttctttcacattaatctagcatccctcttctcaatatttgcctcagaggatgtcataggtaaataaaaaccatatgaatatccatgaaataagttgatagtgtgagagataacttctaaaactaactgtataggctttaaagaggcagctagatttcatttggaaggcaggcagagaaatatatcggtgaaatttaggtcataacttccaatgttaattaatttgcacctcaagcctactagaccagtggaattaggatatgatagaaatatgcaggatgtattaaggttttggccaatgggaatgacctgcttctcatattataaccttagcctagttaatttactgggaaca

SEQ ID NO: 669637 - DNA, 3415 bp, Homo sapiens
tgtcttttcacattggccaactctctttcgagtttatcttttactgcttttctatgttctattttcttttatctattaagataggcaaaagttgttttgcctaaaatagttactaattcctgtgcaaaatccatttctcagatatgtttttctggagcttttgagaaaatgaatctttgatgaagcagaatactccagatgccctcatcttccactttctctccctgtctctctcttcatcatctttgaatgaagagaggtacagccagtggtttgttgtggtttggtttgttttgcccatcatggtgtctattggtagaatcaggctctttgatcttaagctggcaggcaacgggacatggayaacttttacataaatctctagtttctagcaagatccttctatttcatttgcctttgctggaaagaagctgaattaactactttctcctcccactgcttgatattcttgatataagttctttaattcctgaatggcttgaaggactccgaagctcttattttcagaagtagaaaacagagactccttggagggtactcttaccccccagacccttctccacgtctgcctgtgatgaaccacatgtcctaagatgcaaggtgagccccttcttcctgggaagaagagggactgacaggactgcagggagtggggaggtgttgacagagatatggcagctgatgcacaggcactgctgaggaagaggtggtgactgtggggcaggtggcctctccctgcctgtccagccctgaatcagcttctgaggtctgggaatcaatgggtcctagataatttctccattcaacccattcacaatgatcaggaagaatttctttgaaagctgcaaaattattaattggagaccttaatttccagtgcaggtgtaattatttgcatgcttggatgtatttgtctgtgagaaggctctgcctcttctgtggctcctctgcttcctgagaacaagttcacactttcctggaggagccaagaatcctgagtggaagaatgatgtaaagtcccccaacagtccgtgaggatcctggggactgactcaccccacaggtctcatgtgatgggacttgtttgaagaggccccagagcccatccctgccacgtctcctccagcagcccacacttggctacttggaattgcctgattacaaaatgctccccttgattttgtgtctttggacattctatgtccttaatttggaattcattcgactcttcctgcctcaaggtggcatcggccacagaggccttccctgaggatcccccgctaaggttctcctcaaacacctgcagagagcatgcgccacttgcatttctcccccaggtcatatgttgacaggctagcccccgaggtgatggcatgaggaggctagccctttgggaggctcaaaaatggccaacaggcttgtttacaacagagcgtgataacaggcgaccatcatcctcctggtcacgaatgagtgcagtgtatataaaaatggggtcctttataatgattattaaagcttagatagcttttccaaattcatccaaattgtgcttttatattatctgagactctgtgccatgcagttcattcttaatcaacagtaagtgaggggtggtccggtattagtctcacccccatctctaccagagagattccaacttagctcaacaaacgatccagttcattcaaacaaacctgccttctgggttacatcatttgagttcatagtataaattgctattatccctaaaacaacagtgcaaattttaaaagtacttaaagaatgatcattacagaaaaattactacctctccaagaaaagaaaataagcttagctcactagacctgtttacaatgagtgagtttgattcactcttccagctctttgggagctctgtttctgcttctatgattaacttgaaggggatcgataaaatatatctgattctaaggccacttatttctgaatataaaactttataacaagattgatctttgtaatataactattatataatagatttatacattatatattttaaatgtagtacatgcatatatttgtaaatgcatacttttataatatatatttgtgatacaaattattataacatataaatttatcaattcataataggatatgaaaacttaatagtaatttttagtaattacagcatatatgaacatttacgtgtgagtgttttaataaggttctattttctcattaactgcagtaaaattaaaacgatttacctcaatttttaacttacttggagcttaccctacctaccaccttcacttgtccccgttcttatcccagttctctgttaagcagttagtaacacataaataaccccttagatgctttctttggcctaagagacattcaatatgtgcatgccaaagttgggtaaattcaaagaattctgaaatttatcaaaaaagtaaagttttcatgaagcaactcagaaattaccatctcaaaacaaatacatttgattattattaaattacctttggtgtcaggtacatttctccccaaaacataattaaaattgtaggtgttatattcatatatgatccgtaaattaaaaaaaaagggcagagaagagaaaaatctaagctttgttgaatagtagactaggttagaatgaaaggttgttctgctatttatcatgtttataagaaatattattttattttgttcttaaaaatagatccattaatggataccccattctccatgatgtgcttatttcacattgcatgcctgtgtcaaaacatctcacgtaccccacaaatatatacacctactatgtacccacaaaaaattataataatttgtaaaaatttaaaaaatagatacatccaaaaatcaaagaaggtaaaatcaatacaaatatgtttctaatgaagtattgcatatttgccacacaatagtaagtaaatgatgtccataagatggaaaatctatgagaggtggccataagcctctccaactaaaagatatttagcacatttatatatgaatttcctaagaagaaggtgaaggcatggtggaaaatgtctatattatactcaggggtgaactgagagaagggaagttcacataaagactttgtaggaacaggtgagctgatttcaccattttttaaactacatttgctggttattttcatgacagttattgccagtgcgttaggaaattaaaataataccttttcatataccaaaagaaccctccaaagtcatgtcatactcatataacacatgccactgaatcatcttttatcatcattaaattaaataggaaacatgatcatcttagtgtaaaatgtttataaatgtgtgcatgtaccatgctcactcagatttcaattaatccctaatgc

SEQ ID NO: 669638 - DNA, 610 bp, Homo sapiens
tcacatacacggtttcagcttcctggatgtgcctgctaagatgatctcatgtcatgctccatttcttatcaaagtatgagaaataaaaatattcayctgcttcccatttcacgtctgttcctcgtgcttataagatccaagcatgctgggacctggaacagcctgggccaggagggaaggaaggagtccatgggcactaaaagggtctggccacaaccagtgacctcagcaaatggaacagtgaaaactttgatgggctggatttagtggcacatgtgtatcagcagccaaatcttaccagcagtatttattgctccttgatcttaaaatagcatgtgtgtatatacaggcaaaaacatatgatcaatatgtaaatatgtgcatatgtttccgggactcagatatccgtaggcacagagtttatgatgaagaagatattgcaaatcaacaggcgaaatggattattcggctgatgctgttgagaaaacagggcagccgcctggtgaaatacacatctcgccccttctcctggataaattccacgtgcaaacaagaccaccatgcaaaaaatgaaaccataaaacttccagaggaaaccatgagagaatta

SEQ ID NO: 669639 - DNA, 610 bp, Homo sapiens
tcacatacacggtttcagcttcctggatgtgcctgctaagatgatctcatgtcatgctccatttcttatcaaagtatgagaaataaaaatattcacctgcttcccatttcacgtctgttcctcgtgcttataagatccaagcatgctgggacctggaacagcctgggccaggagggaaggaaggagtccatgggcactaaaagggtctggccacaaccagtgacctcagcaaatggaacagtgaaaactttgatgggctggatttagtggcacatgtgtatcagcagccaaatcttaccagcagtatttattgctccttgatcttaaaatagcatgtgtgtatatacaggcaaaaacatatgatcartatgtaaatatgtgcatatgtttccgggactcagatatccgtaggcacagagtttatgatgaagaagatattgcaaatcaacaggcgaaatggattattcggctgatgctgttgagaaaacagggcagccgcctggtgaaatacacatctcgccccttctcctggataaattccacgtgcaaacaagaccaccatgcaaaaaatgaaaccataaaacttccagaggaaaccatgagagaatta

SEQ ID NO: 669640 - DNA, 621 bp, Homo sapiens
ctgagggctgcgctgggccaggcccatctgcactgtgtcagctgctttcaaacagggtgcttaggaaggaaagtgctaaattacagaggcayagaagcatgagattagaacaaaaattaaaagaatctcgcgtgtctgtaagagacaatggtgagataaagctcaaccaagtaagtctgtctaatgtggctatttggcagaaccatggaaaacagagtgaagctgcgtcttggtgaccgagttatccagagtgagtggcccatgttgagagatgccagcccagagggaaggacaagaaacacagagattaaagcactcagccagaagcatctcgcacagtctccagcgtgagggtgaacctgggaagggcatcttctcgaacatcatgcaagggactaccaggaaggaaggggtggtctctttacgtatgttcatcctgacattttggtattttacacatgatttgtaatgtatattataacattatctttaagtttgtaagtttacgaataaaatttttacaggttttctagtaataggaaatatctttgtttcttgtgagaaaataaggtcaggataaataattggcataacagagcattcagaaacacttgtctcaaa

SEQ ID NO: 669641 - DNA, 997 bp, Homo sapiens
catatctttgtttataggaatgggagtaaagttgcttgaatattataggagagaaaaaggaatgagcagaagaaaacagtagccaagaaaaactgtatagtaatggaaagaatacagaaccatatgggaattcatattctggcttggaagaattaggtcagttgctgccaaaaatcttttaagtgtgtaataaaaagtggtagctacaataactggaaaaatctgtgtacatttggatagctgtatcgcagcatttcatttcctttttttgtatttaaatggatccaaagtgtaaatttttttatatattgatactacttgcttatcgagttatttatatcctrctgctcatggtcattgccaaggtctgattgcaaaaattcaaaaaattgcaacctcaagcataaatgggataaaaaggagcagacagttcctgaacagtttcttttcttctaagagcttcaagtttactctctactgctttgctgttacgttgtttaaaatccaatttgcggccgtgcattgtgggcatataattccagcactgtgggaggccaaggcaggtgaatcacttgagaacagagtttgagatcagcctggccaatatgatgaaacgccgtctctactaaagatacagaaattagccgggcatggtggcagacatctgtaatcccagctcctctggaggctgaggtaggagaatcacttgaatccaggaggcggaggttgcagtgagcctagattgcaccactgcactccagcctttttatataaataaataaaccaaataaaatccactttgctagacttttagattattatcagcccatttatttgctgaattaaattctcttttagtaaaaacgagttcactgacagaaaactgcagaaaatagatttttggttttttgttcatttgactgcatgccttcctccaagttccaattcatgatgttcctcaagaatatgtagtacccactcctgttcaatttcttgt

SEQ ID NO: 669642 - DNA, 1293 bp, Homo sapiens
gactctcttctttacaggatttcctcttcgctttacagttatcaaggctgctctggattctgtctttaaatttttcaaactaataaaaataggagtttctattagaatcttagctgccctgcacagtggtgccagctgtcccttcccctcagatgaaaagccacaaaaaacaggaaacttttcatactgttcccatcttcaaagtattggttcccttctggtttctgcctgcttttgatcactctccagtaccttgaagcacttattttcaatcttgtgtacagagttttaaatggtgggattttttgtttgtttgtttgttttggtgagtgtgttggttcaatacaagatacttcaccattagcataaatattacctccctatacttattttgacattttaactgatggattgtacctaggaaaacagtgtttattttgagtggtttcatttattgcatgtgatctgcattgtattgtagaatttttctttctggtaagtatctgtcatcacttaatcataaatcacatgcaagttcaaagtacaagtttcttaattgaagagtaattattataataatcacttgtaataattagttataatgatgtgcatgtcttttcatttgtggaaggaattataattcccaatatgacaaaactttgaaattcccttagtaattactaaatgattatgactctatcaagttgcaagtgactgttttggaatagtatgacctcatatctratatgaggcatttaaactaaataatacaactgctaactctcttcaaacccttagaattttctaaactaatttgttaaactaaattgttaagctaataattagtttttactttggaacacaggtttgtgaaactgtgcattaataaaacctgatcttttttttaagttaggaggaaagctacattttcagtggaacactgccttagtaagcaaaccatgataaggttgcaactgaggctgagccattacaggcaagtttcacatgcaccactcaatttagaccgggtggatttcaagctgttctaggaaaattcttcaggctaagaagagggctctttcttatagtccagggcagtgctctttaaacattttggtccacttactccgtaagtttattttgaaatcccgtgaacgccttctcacatttatattggcacctaaaatttttcgttgtaaatgctcagtatttacaaagagtataatttcccatatattgttgatgttgataatttaatataaaattgttagatccttgttttaaatatgtcaa

SEQ ID NO: 669643 - DNA, 1401 bp, Homo sapiens
acagttcaatagtaacttgcttagttttgggggtaacatttggtttgtgtgagagagaactgtactattaagagtgcatcctttacttcactacagcacagtttttgttaactgagcagaggtgtgaagaaacatgtgattcctaaaacctagaaattcaaagcaaagggttttaatatgttttgctgtcacaggtagataacttctgcttctgctgagatgcagaaatgaccaattctgaattgaaagaacacatatgaactaggaattaggggcaggtatttcatgcaggaagataattttcactgagcaaaaaaaaattactgtagggtctctgcatatgattttggattacagtaagaaaatggaaaggaataaatgggtactgctaatagtaatagctaacaattattgagcactttctatgttcttaatagtagtgttttatattgatgaatatagtgtatccttacaacaatcctataaagtaggtcatattattatactgttttccagaaaactgagtcagagaggattaagtagcttgctcaaggcaacaaagctggtaaacagtggaggaagaactcgagtctagactgtctggttacacagcccatgttcttcaccaccacactgttcattctgtcaacacaggtaggcaaaatcacgacactgatacaaacatcaaaatgcatccatctactgagtgtctcttagcaaaaagagtgggatttgttatcagatatccctgagttccacatctggctttatggcttacgtaaccttgcacaagtgactcagcctctgaacttcaatttcttcatctgaagacagaatagtcatatattcctgatagtcatctatcaaaaaaatgttgttgaatatctatctattaaattccaggcattgtgataggcacagggttcaaaaagctatcatggagctcaatcctcatgcagatggaggggaaatcaaatagtcacactaactcaagaatgatcaacacaatgaacaatcagggaagcaatgagggttttttacggaaaattccattatgagggaayatgttacacactaagttgagttctgagagcccacttgttatggggaaaggtgggacagtgaaggctttccccaggaaatatacagagcttagaggtacataagaagtaaagaggtagaaagcactgcagacaatgaacagcagccttgaaagccactgtgaacttaattctttatcctatgagcaatctggattagtggattctgagtgaggagagttacacagattaaattcgataataactgggagagcctaggcacaatgaccagggtataataataataagatccctacccctccattccaaaagtatctctgctctgactcattttgatttc

SEQ ID NO: 669644 - DNA, 1423 bp, Homo sapiens
taacaaatgtggacagtgagaaaacagatgccttccttgaacttttttttgttcttaagttttaaaagtaaactccaacccatcgacttatggcatcttccaaatcagataatccaactccaaaatctgtagccaatttcttgattttgtaattaacactactacgtaaataagtaaaagcactcataaacaactataatttccagagacttccacagtctagtcctcmgctgacttgaaggcaaagtggtctctacagtcaggaactgggaggttctgtgacgggaagagagggaaaggttaaaagcagggtgtctatcacagagtccacaatgatgctgtaactggctcttaaataaagactaagccaaacatccaacatcctgttctgttgaagcatatgtctcctggcttagggtgtacttgtgcaaggtcatactgagacatatgtcataattgggattcctttggcatatgtgcattaatacccactatgtaccaggaatgacagtagtcacctaagcatatggaaatgaacaggtcactcactagaagctcataatctagtgagagacagtagttcaccagatagttataataaaggtaatatgccagtaagtgccatgtaaactgagcaggatctgggggtggtccctgatggatgagtggagttttgacagaatatggaaaacagggtctttaggcagagggaacagtacaagcaaaggcatgaggtaggaaggggcatgaagggtacagggaatgagtggtatagtatagactgtgctgtatatgccaccatcttctcagagcagagccctggctctcatatccctgctgaaaaatctgccaatggctccccaataccattctaaattggctttcagtggatttcagctcaacttttctgtctttcctacttcctcaaaaatatcctacactttactcaacaggccattttccatgccccataaacatcttgcactcctctcaccttccacccaagtagactactcattccttctcgctcttgcctttgtctagcaacatcctcccaccctgaaagtaccaatcctgagagtacacccactgctactgatagctgaaattcagttctacatttctgaagggcaatttatcaaagtcttaaaatggtcacacattttgacctagtatttctacttctgaaaatgtatgcttaggaaatattcagagatattatcaaaaatgttttcacagaaatttccaaagcattatctgcaagagcaaataagggcatagaataagtgcttgtaatgaaggactatacagaaaaggtaaataaattatggtacaactagataacagactaccaagcagccctttgtaaaataatatttaatgacatgcaaacacataaagaataaacaatacagtgtcccat

SEQ ID NO: 669645 - DNA, 1423 bp, Homo sapiens
taacaaatgtggacagtgagaaaacagatgccttccttgaacttttttttgttcttaagttttaaaagtaaactccaacccatcgacttatggcatcttccaaatcagataatccaactccaaaatctgtagccaatttcttgattttgtaattaacactactacgtaaataagtaaaagcactcataaacaactataatttccagagacttccacagtctagtcctcagctgacttgaaggcaaagtggtctctacagtcaggaactgggaggttctgtgacgggaagagagggaaaggttaaaagcagggtgtctatcacagagtccacaatgatgctgtaactggctcttaaataaagactaagccaaacatccaacatcctgttctgttgaagcatatgtctcctggcttagggtgtacttgtgcaaggtcatactgagacatatgtcataattgggattcctttggcatatgtgcattaatacccactatgtaccaggaatgacagtagtcacctaagcatatggaaatgaacaggtcactcactagaagctcataatctagtgagagacagtagttcaccagatagttataataaaggtaatatgccagtaagtgccatgtaaactgagcaggatctgggggtggtccctgatggatgagtggagttttgacagaatatggaaaacagggtctttaggcagagggaacagtacaagcaaaggcatgaggtaggaaggggcatgaagggtacagggaatgagtggtatagtatagactgtgctgtatatgccaccatcttctcagagcagagccctggctctcatatccctgctgaaaaatctgccaatggctccccaataccattctaaattggctttcagtggatttcagctcaacttttctgtctttcctacttcctcaaaaatatcctacactttactcaacaggccattttccatgccccataaacatcttgcrctcctctcaccttccacccaagtagactactcattccttctcgctcttgcctttgtctagcaacatcctcccaccctgaaagtaccaatcctgagagtacacccactgctactgatagctgaaattcagttctacatttctgaagggcaatttatcaaagtcttaaaatggtcacacattttgacctagtatttctacttctgaaaatgtatgcttaggaaatattcagagatattatcaaaaatgttttcacagaaatttccaaagcattatctgcaagagcaaataagggcatagaataagtgcttgtaatgaaggactatacagaaaaggtaaataaattatggtacaactagataacagactaccaagcagccctttgtaaaataatatttaatgacatgcaaacacataaagaataaacaatacagtgtcccat

SEQ ID NO: 669646 - DNA, 1423 bp, Homo sapiens
taacaaatgtggacagtgagaaaacagatgccttccttgaacttttttttgttcttaagttttaaaagtaaactccaacccatcgacttatggcatcttccaaatcagataatccaactccaaaatctgtagccaatttcttgattttgtaattaacactactacgtaaataagtaaaagcactcataaacaactataatttccagagacttccacagtctagtcctcagctgacttgaaggcaaagtggtctctacagtcaggaactgggaggttctgtgacgggaagagagggaaaggttaaaagcagggtgtctatcacagagtccacaatgatgctgtaactggctcttaaataaagactaagccaaacatccaacatcctgttctgttgaagcatatgtctcctggcttagggtgtacttgtgcaaggtcatactgagacatatgtcataattgggattcctttggcatatgtgcattaatacccactatgtaccaggaatgacagtagtcacctaagcatatggaaatgaacaggtcactcactagaagctcataatctagtgagagacagtagttcaccagatagttataataaaggtaatatgccagtaagtgccatgtaaactgagcaggatctgggggtggtccctgatggatgagtggagttttgacagaatatggaaaacagggtctttaggcagagggaacagtacaagcaaaggcatgaggtaggaaggggcatgaagggtacagggaatgagtggtatagtatagactgtgctgtatatgccaccatcttctcagagcagagccctggctctcatatccctgctgaaaaatctgccaatggctccccaataccattctaaattggctttcagtggatttcagctcaacttttctgtctttcctacttcctcaaaaatatcctacactttactcaacaggccattttccatgccccataaacatcttgcactcctctcaccttccacccaagtagactactcattccttctcgctcttgcctttgtctagcaacatcctcccaccctgaaagtaccaatcctgagagtacacccactgctactgatagctgaaattcagttctacatttctgaagggcaatttatcaaagtcttaaaatggtcacacattttgacctagtatttctacttctgaaaatgtatgcttaggaaatattcagagatattatmaaaaatgttttcacagaaatttccaaagcattatctgcaagagcaaataagggcatagaataagtgcttgtaatgaaggactatacagaaaaggtaaataaattatggtacaactagataacagactaccaagcagccctttgtaaaataatatttaatgacatgcaaacacataaagaataaacaatacagtgtcccat

SEQ ID NO: 669647 - DNA, 1694 bp, Homo sapiens
tgcaaaaaagaatctcacaatgttgaatagccattaatatgtttttcatacagagcacaactacctaatatttctagatgcatctacttgttgttaatgtatttcagtgcattgaggtttcagcagaagttacaggctttaggtttagaaaaatctagggactctgatttacttaatgtatctgaaataatttatgaaactttgttgtaaaacaacaaattggccactgcataaatattactattatttaagacacattaatgaactatatactataatttttaaaggacatatcttattggtccaaaaatatttattaagcattgactctattaaagagaatgtcacagattatagggaagataaattttataaataagtataatatgcatgagtattttaagtaccatatcagtatcattatttgtaaaagagaaataggtgcagttttgaatgttgaactcaccagacagttcctggataagctccatttatcatgatttattatcattattatactactagtttcaggtggtcatattttgtggatgatttttgtatctttgatcatgagttacgagtctagaggttttggtatttttgtaatgcctttgctttattagagtaatactggctccagaaaatgagctggaaagtgttctcttcgttctgttttctggaagacattgggtagaattaaaatatttttttcttaaacttttgttagaatacacaactgaatcttctagatgtgtgtttcctttcttaaaaaagaaaaaagttttaaaccacaaattcaactttaagggactagtcaagttatctatatattattgagataactggttaggtagcttattccaaggaattagtttacttaatctaagctatcaaattatgacaatcatatttcttatagaatcccccccccttttttttttgttgagatggagtcttgctctgtcactcaggctagagtgcagtggcacgatcttggctcactgcaacctccacctcctgggttcaagcaattctcccgcctcagcctcccaagtagctgggattacaggcatgcgccatcatgcctggctaatttttgtatttttagtagagatggggtttcaccatgttggtcaggctggtctcaaattcctgaccttgtgttccgcctgcctcggcctcccaaagtgccttgattaccggcatgagacgccaccacgcccggccagaatcccctttttacccttgtaatagtttgggatcagtagttaaagtccctctttcattcctaatgtaggtaatttgtgtccccttttttttttctttgttagattgactagagacttattaatttaattgaactttgaagggaccagctttttgtttccttgctctttctacttcttttttagtttcacttatttctgttttgattattaacatttttatttcattctgttcaagttatgtttgatttgttcttctctccaaaattttatttttttaataaatatggaagcaattctgattcaacatttgaaaacaaatcaagttatttcaccacattaaaaaagtaagtgagaaaatccaaaatagaattttgaaaactagaatgaccataatgtttcagggaaagaaagtaaaagtatgcattttattcactttcaattttaaragtcaacagaaatctaaag

SEQ ID NO: 669648 - DNA, 1245 bp, Homo sapiens
gataacattgctcacatgaaggccaaaggagcagctgtggaagtgaacctaaacacaatgacaagtgtggatttgcttagcgctttgagaacagtcattaatgaaccttcgtaagtactaaggctcctaaaaacttgcctaactttaattacattattcataataccagaaaatgtacattcttttatacttttgtaattattttccaataacaaccataacctgaccaatataaaaactattttatttgccaaactgctaaagtgatttgctgaaatcagaaaaataagaaaatcctaagacttcaaatattggccgggcgcagtggctcaagcttgtaatcctagcactttgggaggctgagggtggcagatcacaaggtccggagatcgagaccatcctggctaacacggtgaaaaccctgtctctactaaaaatacaaaaatttagccgggtatgatagtgggcgcctgtagtcccagctactcaggaggctgaggcaggagaatggcgtgaacccrggaggtggaggttgcagtgagccaagattgtgcccactgcactccagcctgggcaaaagagcaagactcagtctcaaaaaaaaaaacaaacaaaaaaaaagacttcaaatattatttcaatatttttcaaaataaagaatgctatgattatataaattctcattttttctggataatctgcttaatattataaactaattagtaagtatgtacatattataaactaatcagtaaatacaaaattgaaatgataatacgctcagtaataagcattcagaaataactattcacactgagtatataccattcgatacctttaattagtatatgtatacacacagagagaaaagatatagggtagtggataattttttaaatattgatttgtactatgtgatattttaaataaaatttaagtataattttatctgattcagcttttagattgaaatgaatctataaaatatattgagttatgtatacatagcttagtatattatatatataagtctatatatatagcttagtagatagtgtgtgtgtatatatattgtgtcttatttttttctctgaaagatctcaccaaagtaatatgatatatgtatatgtaattttgagtctttatttttgatgatgtgttttaattttagctacttatagttgaactcctgctttgaaatgtatctctatttcattccaaatttatattacttatgttgtaatt

SEQ ID NO: 669649 - DNA, 1245 bp, Homo sapiens
gataacattgctcacatgaaggccaaaggagcagctgtggaagtgaacctaaacacaatgacaagtgtggatttgcttagcgctttgagaacagtcattaatgaaccttcgtaagtactaaggctcctaaaaacttgcctaactttaattacattattcataataccagaaaatgtacattcttttatacttttgtaattattttccaataacaaccataacctgaccaatataaaaactattttatttgccaaactgctaaagtgatttgctgaaatcagaaaaataagaaaatcctaagacttcaaatattggccgggcgcagtggctcaagcttgtaatcctagcactttgggaggctgagggtggcagatcacaaggtccggagatcgagaccatcctggctaacacggtgaaaaccctgtctctactaaaaatacaaaaatttagccgggtatgatagtgggcgcctgtagtcccagctactcaggaggctgaggcaggagaatggcgtgaacccgggaggtggaggttgcagtgagccaagattgtgcccactgcactccagcctgggcaaaagagcaagactcagtctcaaaaaaaaaaamaaacaaaaaaaaagacttcaaatattatttcaatatttttcaaaataaagaatgctatgattatataaattctcattttttctggataatctgcttaatattataaactaattagtaagtatgtacatattataaactaatcagtaaatacaaaattgaaatgataatacgctcagtaataagcattcagaaataactattcacactgagtatataccattcgatacctttaattagtatatgtatacacacagagagaaaagatatagggtagtggataattttttaaatattgatttgtactatgtgatattttaaataaaatttaagtataattttatctgattcagcttttagattgaaatgaatctataaaatatattgagttatgtatacatagcttagtatattatatatataagtctatatatatagcttagtagatagtgtgtgtgtatatatattgtgtcttatttttttctctgaaagatctcaccaaagtaatatgatatatgtatatgtaattttgagtctttatttttgatgatgtgttttaattttagctacttatagttgaactcctgctttgaaatgtatctctatttcattccaaatttatattacttatgttgtaatt

SEQ ID NO: 669650 - DNA, 1245 bp, Homo sapiens
gataacattgctcacatgaaggccaaaggagcagctgtggaagtgaacctaaacacaatgacaagtgtggatttgcttagcgctttgagaacagtcattaatgaaccttcgtaagtactaaggctcctaaaaacttgcctaactttaattacattattcataataccagaaaatgtacattcttttatacttttgtaattattttccaataacaaccataacctgaccaatataaaaactattttatttgccaaactgctaaagtgatttgctgaaatcagaaaaataagaaaatcctaagacttcaaatattggccgggcgcagtggctcaagcttgtaatcctagcactttgggaggctgagggtggcagatcacaaggtccggagatcgagaccatcctggctaacacggtgaaaaccctgtctctactaaaaatacaaaaatttagccgggtatgatagtgggcgcctgtagtcccagctactcaggaggctgaggcaggagaatggcgtgaacccgggaggtggaggttgcagtgagccaagattgtgcccactgcactccagcctgggcaaaagagcaagactcagtctcaaaaaaaaaaacaaamaaaaaaaaagacttcaaatattatttcaatatttttcaaaataaagaatgctatgattatataaattctcattttttctggataatctgcttaatattataaactaattagtaagtatgtacatattataaactaatcagtaaatacaaaattgaaatgataatacgctcagtaataagcattcagaaataactattcacactgagtatataccattcgatacctttaattagtatatgtatacacacagagagaaaagatatagggtagtggataattttttaaatattgatttgtactatgtgatattttaaataaaatttaagtataattttatctgattcagcttttagattgaaatgaatctataaaatatattgagttatgtatacatagcttagtatattatatatataagtctatatatatagcttagtagatagtgtgtgtgtatatatattgtgtcttatttttttctctgaaagatctcaccaaagtaatatgatatatgtatatgtaattttgagtctttatttttgatgatgtgttttaattttagctacttatagttgaactcctgctttgaaatgtatctctatttcattccaaatttatattacttatgttgtaatt

SEQ ID NO: 669651 - DNA, 627 bp, Homo sapiens
tttctttcctccattgtcattgattatagatgccacatacacagaggcaatttcaagtgggaaaatgaaacttagaaaccactattcaaaaaaaaaaaaaaaaagaaaagaaaatggcagagaaatttagaaagtgtcattagcttttgatttttattataatgagaagctacagttccaactaaatggaggatttatagcttatacttttccatttcttatctccctaaatgaactatygcaaatcctagttagaagataaaattatcaattttttctggcttcatttctctcaaattaattgaatgggtaagccagtggctttacaggaaatggtaaactggaagttgcaaacacttcagttcctttttgttggtggggtacatgttataattgtttaagttttcatttttaattattatgtatacataatagttgtatcgatttacaggaaatgtgacattttgatgaaagcttaaaatgtgtaatgatcaaatcaggataattgggatatccataacctcaaacatttatcttttctatgttaggaaaattccaattccactcttagtcattttaaaacacacaaattattattaactatagtcatcctattgtgctatcaaa

SEQ ID NO: 669652 - DNA, 562 bp, Homo sapiens
aaccggggaggcaaaggttgcagtgagccaagcattgcgcccctgcattccagcctgagcgacagagcgagattccatttccaaagggaaaaaaaaaaaaaaaaaaaggatcaaaatcgcaaaaaccatatacrataccggctatattgaaaaaaaaaaaaaaagaggttgaaaaacatcaaacacaataatctgaccatccttgcttttttcattattaatgaatgcaagaaatactattttagagaattatggcaatttgcacattttttgttaactacctgtcaaaaaaaaaaacaaacttgagggaaatgaatgtgatgtattatcatgccatatgcaatctgtgacactgaaacttggaaaagtatttgttgatcatgtattccctcaatcctgataccaatacacagcttccttgacatgaaatacacagatattgacatgtattttcaatatctacaaaatgaaataggaaaccataaatccaaactgataagttgacagcttgacaagtttaatttccccaaagtctcaaatatttaaccaacttataataaaa

SEQ ID NO: 669653 - DNA, 2232 bp, Homo sapiens
acttgcaaatatttcgctagaaatttatacacacacatctgtcattttattctacaaattgatgttttctcattctataacataaggaactcagtatttaaagttcaaagcaatcaccactttaacaaactcttgagcttgtagttgaaagttcacacacattttacagaagagaaacacagctagagaaaagagcctaatcatatagtcagtaacttagattcatgatgactattctgtcttgaattaaataagctacccttatttgaatagtttgggggacatctaactagtatgtttttaatgtatattttcattaacatttcagattactcattcattcactaacatttttggtacatgtgccatgtacactattctagatatgtggggttttttagtggttaaaattgtcaggttagaagccagatattatttattaggaatttacttcagctctccattttgtaatttccttgtgtctgagaaattgtatctactttgtagggtttttgtgggtatcaaatacataaaaacatatgtaaagaataaaatgaagcctgagccatgttatggtatcaaatcctagatactattaattactgtattctcatttaatcctcacaataagcctgttgggtaattattattattctcattttgcaaggagccatgctatcctaaattatacgtctaagaaattccagaattcagatgaactcttagaatagtccgaatttcaaaatcatgttctttccattacattgatgacaggacatttcaggcaaaataaatattgtgagcataagcatattggtgttgaaatcagaatgtttcatggtggtctactgagaatttacccctcttgattttagagttgtgggtaggtaatgttgaatagttggatggccagtttaaagacaatctgaaaagacaggcattataataggaatttgctgaggttgacatttgaagacattgattatatttaggtatgtcttaagatggcaggaaaagataaatctgtttggaaggggacaagattagcaagacaagtgaggatgattttgtaggaatctaggtgtgaggtcacacagccagactaaaatggtgtcggttaataaaaccatgtccagaaaaccatagatatttataagaaacaaatgataygttgatagactataataggtgaataaggggaaagagtaccttactttctgacttgagagattggcctccttcacctagtaaataaatcaaaatggaatacatgctatgtgtctgcccttgtgtttagcaccatgcagtaagtggtagaactagaacttgaactctggggtgttttgcatgaaggtccttactctcaatttcactatactgcctccaacctatgagtgccatttagctattttgattctcattctacagatgaggagaatagggctcaaagatgcctcaggttgtcttaacaacagagttatcagttgtaaaattcagaaccttcgaaatcttgttttgtacttcattattattgaattcttttatagttcttttagcataagtgtgagtctctatgaaaaattattttatttacttgaggttatgctgtgcctcatatgtttgatgacacattggttctatttgctctgtgtgtgcgcctgtgtgtatgttatatacctaggcttgagcagggcaggggaggcaaaatttcctcattgtccagagtggaacctctcagtctttcaaaggagactcctgcattgggcattggagatgtcttatgctttttgcctttgctacacacttctgatcccggagaaacgattttcattctccagcaatgatttaaaaaataatttatcacaaaaattaaatagattgcactgtaaaaatcatataattactcctgtaaaactacagatgaaagcatgcacagaaaattatagtggaaagtttttaattagcttctgattaactgtaagcttatgttttaaatgtaccatgcagaaccttataacaagtaggcataaattaaatagtcactaatatgtatgtagcaaaaatattaatacggctgctactagggattttcactggcatatttttaattttttttttttttactttaaagtggagtagattctgtagagttggggtatcaatcacatgatcattaaaagggcaaaatattttttcaaaacttgtgcaataatctttacctaactggctatg

SEQ ID NO: 669654 - DNA, 1020 bp, Homo sapiens
tgtgaattattgtagagactttggattctgttatattcccccaacaagtattgcggggttttttgttgttgatacttgtctgtttaataaggcaatcaattcaatactttgtgaccactgcggtaggcagcagttgaaatttctattcagatgttttagccttagtattttaagagtctgtactgcacagttcagagttctgctagatattaggtagagtttacacacagcacttgtccttcttctccctccaattctctctttttcagtatttcttctcctcgctttccaggtgctatggtggttccaaactctatttcttttaaaccagtgacaccatgaacattatttatataaattgaaggcaatggagacagaccaaaagtaaacagaaagtagaaaaaaattaaaagtcaaaacctagaaaatgaatggccctaggtgagtttgggtgagtttcttgtttttacaggatkttgtctgaggaccaaataaataactaaatgtttgtacaaaatgtactatatatacatatttattccacaatttgtagcttagaatttgtatctgtagggaagttggtctatttggaactctgaaagcagaactccactccaaactttttaactgctgttatcaccttctggaatatgtccttttaatatccctcaaatttatttcatattatcccagtttatcaaacatttaggacccaattgtagtcgtaaaggaatctttttcttactgttctagctgacagtgcaatcatcatctcatattggaacttaaattccctggcttacttcacctctcagagccccagttttcaaatctataaacacagaaataatcattcttacctcataggggcattatcaatattaataatacaatattatgcatgtatgtatggtatattttatattaatataatatataatagtaacataccataccatacacacacatttatatacacacatatacatatatgtgtgtgtatgatatgttatatacata

SEQ ID NO: 669655 - DNA, 1097 bp, Homo sapiens
tcaaatcaccgatttcatgtgtgtagtcttggtagaccagaagatgacttttgaaataaagactctcagagattgttaaaatacccacccctactttgttaaagatttttttttcagactataggacagaatttcccctttttcatggtaagaagactgacatggttctcacagttcattcaaataagaagaaaaagtctcatcctttctctcacacacagtatccttatctgtctccccaaaaaattcatctggcccagtgagttcatagtcttaacgctggaccagtcactgtgtcagggtgaagaagtactctacttggtatccctggggccagggaaaccaatgcttaattaatcctgtaccacagaaatagagaaaagttacctccccaaaggagggaataaggaaaaaaaatggaaaattagaagatgtattttccagagatgaacaaaatctctgaaagcaactaaaatttgaaaactgagccattgatggaataattttctccttcatgaagacagtcgaatttgtttcaaatattattccctaccaaattttgccatattgaacaatgatacagctttttcatccctaaaagagaaaatgtaatcatctgcctctacattcmtagaggctgcatcatttagtgggggtaaaatagctcagagaaagatgtttggaaggcagtcatggctgattagtaacctgtggttgctaaactagagtaaaccaacttcagttaaggtgttctccactttccacagccctgtgaaagctgtgtttggtatcaggaacttgagtacagattttaaggactgatgcaggaaagaaaacaatagagtctttgaaagaacagtggtatgtgaattatccatgcataaggaatagtctgagtgttgtgccaaatttaaattctaagctttcatggaagattttctagaaagctctatgaagatcacttctctcagaaacatactccttattacctgttcctatcttaactttcttaaatctgacttcagtctttgccagtgtactgaaactgtgttgtggtttccttcttgccaaatcacaaaacatttcctctgtattca

SEQ ID NO: 669656 - DNA, 596 bp, Homo sapiens
ttacaggatatattgaattctgcctgttagaagattttagctcactttttaatatttaaccgcacactgcttcaaattttgacaaatgccttgaggtaaagaatagacatgtttgtaaagactccaatatgtcaccttagccccgcatgagaagcaaaatgcctcatggtttcctgtccctcattagtgtacgtttttttgtttgttttgttttgtttttttaggcacaattcctgaattctcaagctctgactaactctagtcacttgtaaatgataagtgttcacatgtagaaaatagaaaatagctgtatatccccactgtcaatkcaccacttcctttaatgccattgtgtacagcctcttttgttgtttccttaccctagatggatgggtctccgtttctaagtactgtgagctgtgggccacttaacttattcagaattcagaaaacaagccacatattcaaggcccctaagtctccaattttgttactttagcaacctttgccaccactaaaagttctgtgatttagcttttggcccagcaggagctcatggcctggtgtatgcccacatctgcagccacacccaggac

SEQ ID NO: 669657 - DNA, 596 bp, Homo sapiens
ttacaggatatattgaattctgcctgttagaagattttagctcactttttaatatttaaccgcacactgcttcaaattttgacaaatgccttgaggtaaagaatagacatgtttgtaaagactccaatatgtcaccttagccccgcatgagaagcaaaatgcctcatggtttcctgtccctcattagtgtacgtttttttgtttgttttgttttgtttttttaggcacaattcctgaattctcaagctctgactaactctagtcacttgtaaatgataagtgttcacatgtagaaaatagaaaatagctgtatatccccactgtcaatgcaccacttcctttaatgccattgtrtacagcctcttttgttgtttccttaccctagatggatgggtctccgtttctaagtactgtgagctgtgggccacttaacttattcagaattcagaaaacaagccacatattcaaggcccctaagtctccaattttgttactttagcaacctttgccaccactaaaagttctgtgatttagcttttggcccagcaggagctcatggcctggtgtatgcccacatctgcagccacacccaggac

SEQ ID NO: 669658 - DNA, 875 bp, Homo sapiens
ataatgccaagcccatagtgtcattaaaagccttcctcccttacattggcagaagtttggaggctctaactttcagctcagcctgtcactttctttggagacaggtaggtggttacaaagaccattgatttctgccttttgaaaaatgtagagagggggaaaagtaactatacaacttatctgattttttaaaaatcagatgcctcttttcttagattatggttttgaaaagccaacccagaccaaattactttttccatactccagcacaacttggctaaattttaaagcacaggttgttttttatgtaacaagaatagggwaactttactcccatttcacatgaaatgacaagtacattgacttggtttagatcaatctgcattcaagtagactatcataatgtttctcatgaagtagcactgggttttaaagtcttcgtagttaatttttgagcatcagtatatgtacgcgagcaatacatgtctcaaagtgcattggagacgtgatctttgagagatatcaaagatgtcatcaaatcatcagtttgaatttataactgaaggcacccaagcacacatagcctgggagagacttgcttaaccactgagacaaggaaactggcctgatgttaagcagctactgttctgtcacttgccaaacattcctgttacagagtcatgttctgaaattttcgtgaaccaactagacgaacaaactgtgtggtctggataaaataatatctgcctaaaaggaaagaagtgaagttagccagaaagccagatggcagattattttctgcataactctatttggaaagtgagctttatgtaatttttggtcatttcttaccatcttaggagaccattttcaga

SEQ ID NO: 669659 - DNA, 2047 bp, Homo sapiens
tcagctaatgaatcctccttttaaagaaacacacacacacacgcacacacaccactgcaccactgtaattacaatatgattgatagattcactcactcattcccttatttctcataaacttgttgagggctatgtacctagcacctactagtcaacatcacatgattgatagagtttggccttgaacaccagcataagaaaatagatgtgaggaggctggttaatgacaatgacgacaacaacagtgataatgacgatgatgccagtgctgagcccttactgtatgccaagcactgtgcaccaaatacacttattaatttaacttttgacacattcttatgagttattattaagccgagactgactgaggtttaacatatttgcccacagtcatgcagctaggaagaggtggaaactagcgtcaaaggtcatgctctcagccacaaggattaactgacctggctttataatgaagacatgctaccagaaacattcatttgttctttaaatattattttacacaagcggatattttctgaatattttcttcacttgatcttaaccaaaaggccgagaagcgatttttctgaatattttctttataaaatctctcacacttacaggttaaataactatcccctagacccctaatcagggaaggacccttccaccatacttttccttgctttgccagctgatccttccctcctgctcagaatccacagtcagccaaatgcagggcaacaaattaaaatgagaaaatggacacaagacctgaagaccacttttagagaaaataggagctaccaagctctaatgcggtatatttttcaaaacatgcaactgaggtaggacaccagcgggactcatttccaggttccaagggaataaagcgaagaaaactgcaggacccagcagatggtgaggaaagctagctgccctcattgcctgttagcataagactctcccaccagtgctatgatggtttacaaatgccatggcaacgacctgaaagttaccacccctttccatggcaatgacctgaaaattactgcccctttcccagaaagttctaaataacccatcccctcaaattgcattgacccaccccctaatttgcatgtaattgaaagtgggtagaaatacagttgccaacagcccctacattgcaggttgtaggcctgctgcctaggagttagccctgttccacaaggagcactactgttcaataaaagattgctgtttaacaccgccagcttgccattgaattctttcctggacaaagccaagaattctccaggataagcccttaaatttgggsgcttgcctgccctgcatcacaaccattaaggggagacacaccctattaaattgttattccagaactcagaaatataagaacactatgtgctaacaggatttgggtacttgctggtttcacactgcaattttaaaaagggggagggggtcaattgcttttggaaaagggggtctcccccaatattatccagttgcacagtaagttactattactcttatggtcactaggaacaaacacaggcatactttgcagaaatcagcaaaattaaccaggccctaagcaacttcttatttgttgggttcagcaatggatcatcaagagaggcaggaagaaaagtgaaactagagggtaccaccaagatgtttcctggctagagttatttcagaacactatcatttccaccagagagctttaaaacatttgcgtttctcctatgaatcaggctgtatggcaacaaaacagataaacagaaaaagtacattattagcataaaacagtattagcataaatagaaagggaatcaggatattcggaggggtgggagaaaacagcttgtataatatgtggcctactcatttcagtcgacttcactgtagctgataaactgtgaaatttccataataatatagagtacagaaagcaaacaacaattttatttgatagggaaattgcatcctgatactggatataaaattctacagcatgttcaatgatattttcaaagca

SEQ ID NO: 669660 - DNA, 663 bp, Homo sapiens
cggtatgtgtgcgtgtgtgtgtctgtgtgtgtgtgtgtgtatcctgagtggtactgggagacataacagtttaacatattctttaagaaacgtttgccttctgttttcaatcaactaagctggcagctagagatacaagtttatttgagaataccctctgggtaccaagcatgcttggattgttttagcaaattaaaaatgagcaaaatgcttttaccttctcagcagtagactccttaagagacctcctgttttgtgtgtatgtgtgcgtttttttagagaaacattttctgtgtatatctcaaatgtgtttttaatgtggaaaaggagaaaataaaggattttaaaaggctgaggctgatgctgtagaatgattcattaaacctgattctgcatcaaggaattcacctacatatatgggaatctgtggcaactaatagcctacttggtgaatttaaaatagcagtggatccgtttgtctcctggataatgggcagtgtgccgatttattcctcgtgtttgtatttgtgtggcatttggcttactacgaggggctgatattcaggaaactaaaacactgactgcaacagtttgactcgggagtcctgctgctgcctgaatggaaagaattgtgagcagtkgttatgatgacagtaggttaaa

SEQ ID NO: 669661 - DNA, 600 bp, Homo sapiens
tagagtgagtcaccagtccctgaggcttggctcaatgttttcagtgtcttctctctctgttgttcagattgaataatttctgtattattcaatccactttcttatccactgaactgcttttttaagtaattgtatgcccatttkggtttatctttatgtctctatttctttaatacttttttgtttggggagagcctttttaaatttgtttcaagactgttcatgatagcacattgaagaatatttaccacagctacttcaaaatctgggtcagatcattctaacatccttgtcacctcatttttgtcatattcattgtattttattctccaggttgagatcttcctggttttttaaatgaccagtgatttttttgttgaaacctaaatattttcttgttatggcatgagagtctggatcttactgaaaccttctttttggcaggcttcctccaacacagctgcagcagaagtagagggaattgctacctcattactgccaggtggagctccattgacacctgagccaagcagggggctccttcttattgccgggcagggttggaagttcctgctccccttatggtcttcattggaatac

SEQ ID NO: 669662 - DNA, 2373 bp, Homo sapiens
aaaattagccgggcatggtggtgggagcctgtaatcccagctactcgggaggctgagccaagagaatcacttgaacccaggaggcagaggttgaagtgagctgagattgcaccactgcactccatctagcctgggaaagaaagaaaaacagtatctctaattcatagctgaagggaaagcaaaatggtgcagccactttggccaacagtttcacactttattacattttccacgctcttagatgaaaccacacaggtcagtgaatggccagatcaggtgaggtttgaggggagagctttgcaatcttcaccatgtgacttccatccctaggtttgcatattcctacttcccagccaataggaagaagggaaaacagaaagtgaagtgaaaacagctttatcataaaaacaaaaaggtaaaaagaaaaagtcaaaaacatcaatatttgaagatgatatgatcatgcacatagaaaacacaagaggatcaataaactattgaaaatagcaagagaacttagcaaggtttatggaaataggagcaatatacaaaattaatagcatttctccacactttaattttttttaactgagaaagtagaataaaaaataaactacacatttaaaatgccaaccatggccaggtgtggtggctcacacctgtaatcctagcactttggaaggccgaggcagtagggtcgcttgggcccaggagtttgagaccaccctgggcaacatagcgagaccccgatctctattttcttaaaaaaaggaaaaagaaacaaaaaatttaaaaattaaaagactaaaataccaaccaaaactatagaaataccaaccaaaactatagagaacctcagaatccacctaaaaatacagaaggtagttactgatgtattcgactacatcaaagttgaaaacatcttttcaaaaacaaagttaaaaatcaaatggtctcctgggagatgggtatttttaaagcctacagcaaacagtatctaggttctggatgtatacagtatctaaaatgcacagataattcttacaaatcaaaaaagagagagaagaaatatattagaaaagtgaacaaaagataaaaattgacaattgagagaagcaacctgaataactaacaagtatatgaagaggaccctgattcattagtaataacaaaagcacacatttaaataatgacaacatactactttgtgtaaagtatagagaagacgtgagtagacaggtccctgtgctctgctggtgtgagtgtggagtggcatgctgctctgcacaacagcggggctatacttggtgagtttacagatgcatctgccgcacaaccagccatcccactcctcattataggtcacacagaagccctcgcacacacccatgacagcatgcattgcagccctcagcggtaacaaggaactaaaggccacttaggctgccagtacagccaaggaggagggagaagggagcaaggaggagggagaaggcaggagccatcagtatgtccagagattgctatgtggccctggaaacaccaagtctggggatgatcgggtgtgggataaatcaggggagggtgatgagtggagctcattctcccacactcccttcagatcaaactgatttgggagcaccatggaatgagaacaatgtcaaatgatgtgtgaggaaagagattcacataaggagaatatttgcagtcttatggccacagcagtttaaaagctagagacagttaacctggagaacagattttaaaggacagacattaccataaaaaaagataaagtcactttattacytctgtctctacatacagtaacagtgaggtatggagatgtacattttagctcagtaacagaatgtattgtctagaatcagcaacatcaaatggacaaaggaaaatccagcagctctcagcaggttgccagaaacaggccatgccatgaggcctgggcagactcctgagacatgaagagattgcagtcatgtccacggcagcagcagcagcagcatctcttgcattggtcaatgtctgcttggattcaaaatggtgttagttgctttacacataataatctcagtctacaaattgctacacctgcaaaacccattctgcagatgagtaaactgagagttagaaaatgcacttgcagaactcagatttgaagtcactcctttgactgcagtctatcttcttcctgtttggaagacctatctagataggcttagcttcagcatctcaaaggcacagagaaaacagccctgcaggatctcatgcaagaaatatgggttaaggggcatagttccaagagtaccagccaggatctgtatgaccctggctggatggtgacagacttgaaca

SEQ ID NO: 669663 - DNA, 840 bp, Homo sapiens
tccaccttctgtggattatcaattatccactcttcctccattttaacagaaaatttgaacggatgtccctgccttccccagaaatcctgtttttcattttgttgtctctctttcatttgagttattgtctatgcacacacatgggaaggtgggctggtgtgggcaaagcaacacagcaaagcccacattttgaaagacatcccaggaatctaagattttttgagatatgtggtaaaacatccttttttacaatttttaaaaattagttatatttttaaaaaaaacacacaaaacatcatttgtggcagagcccaattttgttttattggggatttggagaaagtgaaagtcacaaaataaagtaagcatcaataggattgacaattccaggaagatggaaaatcactagaatgtgggttcttttagggccctacccagcattgtttatagcaatttcttcatttcactacttaaaagaacttgaacataactaagaatgcatttaaattagttcctggatatgttttccatctayatgggttctttttgcctttatttgagcttatatagatgatttctatataagtgtatacttggaaaattcatgaacttcaattgatacactagtttattatttatgaaatttcagcccaaattagacatttcttttagaagaaaagagtctttaagttagaggttgtttggtgccaaacacactcctttcaaatcaggagtacattttcgtgtgtgatcctgatgggtgagattggacatgaacataaaaacactttaaaatgtgatttttttaataaaagggaataatcgcacagggcaaatatt

SEQ ID NO: 669664 - DNA, 626 bp, Homo sapiens
cagaaaactcaagcctaggcataagctgcagactctcccagatccttctctgtctttctctacctggctctctctctgcaggggattggtgtatggagcacacgcttgactcctgtgccctctggttctaactgggttcagtcaatggaagccccagcaggagttgggagacgagaagaaaattagaccaggacatttgtcccctggatccctycctttgaggtttcctctggatgtctgcatcccttcctcagaggtcactgtcagaaccacttgtgctacacggctctttatttccaggtttcagtaagctcaccctccccactccttagctgtccaactatcctcaggtttctacatcatcctttgtgatttccctccaccacttcacatttgtaaatagtctcttattagaaatgcttctctaaatttccaattcaagtgtggcggctgttttctgttgggatcctgactcagccgtgattgccagagaggacagcagctctcccagacccacattcctctgctcgagtcctcagcctgcccctgtgtttctgggagtagtttccttcccttgagcaggcctctactcttccaagccagaaagaaggagttggtttcctaca

SEQ ID NO: 669665 - DNA, 667 bp, Homo sapiens
ccagacaagcagaatggaaaggcagttaggttttcagctccatgctttacactctcccaaacgccacagaagcacatgagcctggggaaaaagatgtcgccacgcctcttggggaagagctcaagcattcctcatttttgcatggtggggctttgtaggcctccagctgggaaaacgatgggatcataacacaacagcaaccaacttggcatgactcttcctcctaactccacccctcttcctcatgcaccatggccagaactcctgcctttctatgtctcaccgtctggcttgagagggggtagtgaggtttgttggaagataaggctaagctgtgtccatatttcctatctcaggtgtgctgtggtaaacagccctsactactgcttcaagccccagaaaacttacctagtcaggtgtggccacggttgcaatgcagccagaggcttctcccggagctcctgctttgccaactttcctggcatttgtctttgtggattctgagttcagtagtctcaatggtctctctctctctctctctctttgtttttaatgtgcagattactaaacagccagggctaatagtcacttttctaagcaataaaccaactggctatttcccttttctgttctaatcctcccagtggtgaatcccacacatcaccac

SEQ ID NO: 669666 - DNA, 585 bp, Homo sapiens
tgaacttaactttgtcaatagctcagtgaagcagaatgcagatcatggctgtgctcatttcagcatgctggttccccctcccctgggctcyagcgggactgagtcaggtgtccttccttttttgcattatccaccaaatatgtgtcttcaccttgccactcagagtgtgacacaggaaccaacaacatcacatcatctaaaagttttttaaaaatgtaaactctcaggcctctcttcaaacccactgagtcagaatctgcacttaaaagatccccaggcaattcaaagggacagtaaagttgcaaaagtacaggttctccaatgcagcttcacaatggcctcatccggggaaccgtaaaaaataaaggtgccagggtcccacttcagagactaatttattctgtaaaggatgccagctgggacattggactgttttaaatctccccagatcattctactgtgtagctaagtttcagaacgcctgcagtagacaggactcacctgtgtggagaagcacctggtgttatctcagaataggcagaggtgggagtgagaataaggaagggtaggggccaaggacctggg

SEQ ID NO: 669667 - DNA, 588 bp, Homo sapiens
aattaaacattcagctaccccaagacaatctattctaatccatcatttctacccaaataaatgaaagcagatgttcatacaaatacttgtattcaaacattcctaaaagttttatttttgttagccaaaatctggaaacaactcaaatgttcatcaagtgaaaggataaacaaaacgtggaatatccgtacaacrcaacactattcagcaatgaaaagaaacaaactattgatacatgctgcaacacagatggacctcaaatttgttatgctaagtgaaaatagccagatgtaaaattctacattttatttcattccatttacatggtattagtagcaaaggcaacaatataaagacacaaagaacatcagtggtcacttgggtctcatggtagatatagggtatgcctgtaaaggttcatgaaggaattttgggtgtcaccagaatttcatagccttgactgtgatcacagttgtacaattcttttcagtaaaagtcatcacattatacaattatgatggatacattttatgatacataaatgatacctcggagagctgttgaaaaagttcaaagaaaacaagagga

SEQ ID NO: 669668 - DNA, 526 bp, Homo sapiens
agggagggagggaaggaaggaaggaaagagaaagaaagaaagagagagagagagagagagagagagaaagaaagagagagagagagagagagaragaaagaaagaaagaaagaaagaaagaaagaaagaaagaaagaaagaaagaaagaaagaaaggaaggaaagaaaggaaagaaagaaaggaaagaaagagagagaaagattgattgaaggcaaggtggggtaccggaaagggactctccaagtggttcacagacgcagtaggtaagtgaaaggatacttttcctaagcaaagatggactgcctctagggaagaggtagaagcaaagtttatccacttctggagaaaaaaaaaaagataatcctcctcccttattcccatgcaaatgtctactgaagttaagggagagatatagtaaaaggctgtctgtcatggggagaggaaacctgcttgggtgcagcatgctgccttaataaaaggagaggcaatgaccattaagggcagggcagaaaacctgtgcctgca

SEQ ID NO: 669669 - DNA, 977 bp, Homo sapiens
tggcattgcggggtggggagtggttagtcttggggactgagccctcaaccagtgggatctgacactatctccaggtggacaatgtccaaattgatttgaaggatgcccagttggtatctgctgcagaattaactgcttgcttgtggtggggaaaaactcacacacatttggtcatagaagtcttagtgttgatgattgttgtagtggtgtgagagcaaaggaaaaacatcatttgagagtttttcccacaacagtgtgtttgcagttttaagcctacaacacatcctttaactctcgcaaagtgaactgaatatcatcagttaacattgtgaaaagttcacctatgaggacatggtccaccatattcccttattaagccctaaggttagtgcstactcacaggatagcgtttagagaaatcagcagcacagaagaacccagacatctcgagaaaggctgaatgtcaaacttcaattttcaatgagtaaaagcttctgcttttttctctgggtagacaacagtgaataaggaataagaaaacacaaatcctccaggacatcattagacttcttttcttttcacctgtagctacatagatgagagtctgatataaacagatcttaatgtgtcatccaggtaagctagtacatctgcagcaaagtgaacagcatcctcaataccctggaaattgctgggtgcagtggctcgcgcctgtaaccccaggaggccaaggtgggtggatcacttgagcccagtcattcgagacctgccttggcaacttggcaaaaccctaaaatacaaaaatgagcagagtgtggtctggcacatgcctgtggtcctagctacttggtagctgaggtgagaggatcgcttgagcctcagaggtcaaggctgcagtgagctgtgattgtgccactgcactccagcctgggtgacagagtgagatgtttcaaaaaaaaatttaaaaatttttaaaa

SEQ ID NO: 669670 - DNA, 977 bp, Homo sapiens
tggcattgcggggtggggagtggttagtcttggggactgagccctcaaccagtgggatctgacactatctccaggtggacaatgtccaaattgatttgaaggatgcccagttggtatctgctgcagaattaactgcttgcttgtggtggggaaaaactcacacacatttggtcatagaagtcttagtgttgatgattgttgtagtggtgtgagagcaaaggaaaaacatcatttgagagtttttcccacaacagtgtgtttgcagttttaagcctacaacacatcctttaactctcgcaaagtgaactgaatatcatcagttaacattgtgaaaagttcacctatgaggacatggtccaccatattcccttattaagccctaaggttagtgcctastcacaggatagcgtttagagaaatcagcagcacagaagaacccagacatctcgagaaaggctgaatgtcaaacttcaattttcaatgagtaaaagcttctgcttttttctctgggtagacaacagtgaataaggaataagaaaacacaaatcctccaggacatcattagacttcttttcttttcacctgtagctacatagatgagagtctgatataaacagatcttaatgtgtcatccaggtaagctagtacatctgcagcaaagtgaacagcatcctcaataccctggaaattgctgggtgcagtggctcgcgcctgtaaccccaggaggccaaggtgggtggatcacttgagcccagtcattcgagacctgccttggcaacttggcaaaaccctaaaatacaaaaatgagcagagtgtggtctggcacatgcctgtggtcctagctacttggtagctgaggtgagaggatcgcttgagcctcagaggtcaaggctgcagtgagctgtgattgtgccactgcactccagcctgggtgacagagtgagatgtttcaaaaaaaaatttaaaaatttttaaaa

SEQ ID NO: 669671 - DNA, 628 bp, Homo sapiens
ctctgggtttatagttgcaacttcctgcatgatatctctaaatggatgttacacaagatactgcagyttaacaactcaaactgatctcattgcctctcaagccaaacaaccaaaataagtgtaataaaaacacatacacatatgcaaacaaaaacccagctctgttgctcttgttactcctaactcttaatgatgccttggcagtcactcaatgatcatcaccctatgaccttatgacccaagcctggagtctgtcattctcacagccaatcatctcaagacctcttgattctatttctgtaacaactcttaaatcagcctcctttgctgctcattaatgcctcattatgacacagtgcatgttcacagtgatctctcaattactctccatgtctttgttctcacccctcaatctatccaagtgggtcattctgaagcgagccaatgattgaaagcccttaagaagggcatttaaatctatagaagagtccagaaagggctggttagacagtgaggggaactccgcgagagcaggagtgcagaagtcacagaatcagaccctcctcacagggagtggtgggaaggaggggggaccgcgagtatgttcagcaaagcaaaacaggaaagc

SEQ ID NO: 669672 - DNA, 625 bp, Homo sapiens
cgggaggcctgcctggggactgtcccgacacactgccagtcagcatcgtggaaagactgacaccagggcagggcctcaagcatgatggtggtgagtgcccggacagggtcttatgtccaggaagtccggcagcacctgcacaggtttagcacaggaaggggacgcaatggccatttgctgcatgaatgaatggggacaaccaatgcctagccccattgcctgtgtgtcccattgcttcyccagtcttcatttctggaataaaaaaaaaattcaaaaataatgagtattttataaacacgagcattaataaaaatggttattatgttgataagcaagagcaatacaatacctcttagatgttgacttttccctcaaagtgtttgagtggtcagaaataattttttttttcttttgagacagagtctcctctgttgcccaggctggagtgcagtggcacgatctcggctcactgcaagctctgtctcccgggttcataccattctcctgccccagcctcccgagcagctgggattacaggagcccgccactaatttttttttttttttgtatttttagtagagatggggtttcaccgtgttagccaggatggtctcaatctcctgac

SEQ ID NO: 669673 - DNA, 625 bp, Homo sapiens
cgggaggcctgcctggggactgtcccgacacactgccagtcagcatcgtggaaagactgacaccagggcagggcctcaagcatgatggtggtgagtgcccggacagggtcttatgtccaggaagtccggcagcacctgcacaggtttagcacaggaaggggacgcaatggccatttgctgcatgaatgaatggggacaaccaatgcctagccccattgcctgtgtgtcccattgcttctccagtcttcatttctggaataaaaaaaaaattcaaaaataatgagtattttataaacacgagcattrataaaaatggttattatgttgataagcaagagcaatacaatacctcttagatgttgacttttccctcaaagtgtttgagtggtcagaaataattttttttttcttttgagacagagtctcctctgttgcccaggctggagtgcagtggcacgatctcggctcactgcaagctctgtctcccgggttcataccattctcctgccccagcctcccgagcagctgggattacaggagcccgccactaatttttttttttttttgtatttttagtagagatggggtttcaccgtgttagccaggatggtctcaatctcctgac

SEQ ID NO: 669674 - DNA, 634 bp, Homo sapiens
tcctggtattctggcatcttattcactgtgaggcccatggtgcttctcacctgtgtccttctgccaagatacacagcacaaaggagaatttgaatgttggtctcagaatcactatttagaaagactcagtgattctgccatttgtaatggaccacacttaattgaagatttatgtctctaggtacaagtttcaatgtttgaaaggcaacaacaacattccatgtttttggtttctttctctgcagcaaaatgtgaacagacagcaaaagtctctggctccaaagtccctagtctctaaggaaagcaaaaacaaaattcattttcccgtgttgtcagcttagattagcagtaaaacactgaagacatggcctgtggaccatttttgtgatggggaagatatcaaagaatgaaagagggactcaggaacagtgtctagggctttgtgggcagaaagggccttctagttccctctcactctccgccatcctgcatctcatgtcagccctgctcctcrtgacagggtccatgatctgaggagaagtgggtcaggagatcaggatgaacagggagagttgtttacctgaagtggccagaaacaacgtaattcatgggaagaactaactccatggctggg

SEQ ID NO: 669675 - DNA, 1491 bp, Homo sapiens
gcatttgcaagatgtctggccaggtttgggggtacaatgtgtgaatgtagaatagatttcttttttttcctctgagtcaattttcccggtttccatggggaaagagtccatgcttttggccttattagcactgtaccaactgagctcactgacccagataaatattgtctgtctgacatgtgcttcaggaataataaatatgcaaaactatttttaaacagaactctgttctcagctatgggcattcactgagagaatcagagattggaataacccccaacatcagagagctccatacttttcccccaaatcattcctatttgtctttggtctctgccatatgatgtgtgttctgtggttttaagagtctaataatgctttggttaagctaaggttaaaattagtttgcatttgctgcccacacagcaactgatggcagggaatttatcccaggagcatgctgcacagtgggagaagctggctcagaagtgccagaggtaatctgggaagtggaagatgtccatgatgaacatggaaaggcactgtagatcactgccatcacacacacacaaaatccacttattgttcaaacatagtgcaaaaagagctggaagctggggttcacagctatagggaaacagaggggagaagagaagtttacacataaatgctgatgctgtggcagcaataaggagtagattctaagtgagaaagggggcatggggccaattttcttaggaaaaaaaattcmactattgttatagattttccataagagatagtttttctaggatctagcttattcatctgtgagtataaaaataatgccattttctttttgcattatgagatttatacttcatttcttttactcatgagaatttgcaactaaaaaaaaacctcaatatgcttctaattaacctgttttgttcactattcaagggaccttgctgccaaggctttcattttgacttgatagtaaaatcgttgacactataggcataatgcaaggaattaaaaatgtaaagactaccactgaaaaccattttcttctattggagtgtttttgtatatggcccagattaccactgaacatttttgcctttaggtaagtttataatactttttcattttagaagaaatgtggagtttttgtttagaaatgagcaatatgaaagttaaattgaatttgtttcttaagctcagaatgctaaaatgcagtacaaaattatgagaagaggaagtcatcagaaatttcagaactgctcagtgtgtaagactgcagaggcccaatcatcataaactcaaatgcattttaatagtcattttcatttaatgtaaaattctggtttattcaaactgtttagcagctcagagatcacaagatgtggctctatgactgttgtatgctaatcggaaagcagctgggaaacagagagtcatttgacagaagttctttatcttggcaagtttatgtggaactaatctcaa

SEQ ID NO: 669676 - DNA, 636 bp, Homo sapiens
gtttaacttatttattgagttaaaattgtcattattgtttttatgcacagaatttttttctgattattatttttcaaatttcattggtaagttctatatgctcattctttgttcatatatttaatttcctcttttattagttaaaatctattagtgataattaatttttactctgtyttacaatttaaatatcattgtgggtttgatgctaccttctattgtttttgctgacaacatggagcatgtatcctcgttttgtttatggctttatgaactcaggttccttaaaactttttatgtgaatattcttttatgcctggtctgaggttacatcttctaaagaggaattgagtttgcttctccttgtttgcagaagtaccaccaatttggagtcactttatctgagctgatatgaatttgtgctacagccttacataataaaaggattgcattgtgatatctcaggggtaaatttttcatattcttgtagcaataaaattaagataggcaagattccttgctggcctcttccgcagggcaccctgacactgaggatatagtcctgttgttccccagatttatgtgagggagtttcatcggagtctatatttttgtctgctctaggctgtaagtttc

SEQ ID NO: 669677 - DNA, 651 bp, Homo sapiens
tgataactgcacaggactattgtcatgcttacaatgataaaattctagaaagtacctaacaaaggtaatacaggtgctaaatacattttcattctgaccataataatygcacatctgctgaatgtaaggcacaacattaggtgctgcaaaggacaacgttaatcagacttttccttcaaagaatctttggtctgggctgaggttgagtgagtaagcaatttgctgcactatgttggaaattaggaaataaatgtcctgttagggtgctccagagagacaaaatcaataggatatagatagatagacagacagatgagagagggtttattaggagaatcagctcatgcaattatgaaggctgagaagtctcatgacaggcactctgcaagctggagaccctggatgatagcagcatggctcggttcaagtccaaaagcctcagaaccaggcaacctgatggtgtaattcgtagtctaagatctaaggcctgaggactgaggtgaccaccactagtattagatcctggagtcccaaagccaaagagcctggagttatgatgtacaagaacaggagaaggagaaggtcccagctcatagagagagaggaagaaaaaaatgcttttccctccttttttgttctatccaggccccg

SEQ ID NO: 669678 - DNA, 651 bp, Homo sapiens
tgataactgcacaggactattgtcatgcttacaatgataaaattctagaaagtacctaacaaaggtaatacaggtgctaaatacattttcattctgaccataataattgcacatctgctgaatgkaaggcacaacattaggtgctgcaaaggacaacgttaatcagacttttccttcaaagaatctttggtctgggctgaggttgagtgagtaagcaatttgctgcactatgttggaaattaggaaataaatgtcctgttagggtgctccagagagacaaaatcaataggatatagatagatagacagacagatgagagagggtttattaggagaatcagctcatgcaattatgaaggctgagaagtctcatgacaggcactctgcaagctggagaccctggatgatagcagcatggctcggttcaagtccaaaagcctcagaaccaggcaacctgatggtgtaattcgtagtctaagatctaaggcctgaggactgaggtgaccaccactagtattagatcctggagtcccaaagccaaagagcctggagttatgatgtacaagaacaggagaaggagaaggtcccagctcatagagagagaggaagaaaaaaatgcttttccctccttttttgttctatccaggccccg

SEQ ID NO: 669679 - DNA, 651 bp, Homo sapiens
tgataactgcacaggactattgtcatgcttacaatgataaaattctagaaagtacctaacaaaggtaatacaggtgctaaatacattttcattctgaccataataattgcacatctgctgaatgtaaggcacaacattaggtgctgcaaaggacaacgttaatcagacttttccttcaaagaatctttggtctgggctgaggttgagtgagtaagcaatttgctgcactatgttggaaattaggaaataaatgtcctgttagggtgctccagagagacaaaatcaataggatatagatagatagacagacagatgagagagggtttattaggagaatcagctcatgcaattatgaaggctgagaagtctcatgacaggcactctgcaagctggagaccctggatgatagcagcatggctcggttcaagtccaaaagcctcagaaccaggcaacctgatggtgtaattcktagtctaagatctaaggcctgaggactgaggtgaccaccactagtattagatcctggagtcccaaagccaaagagcctggagttatgatgtacaagaacaggagaaggagaaggtcccagctcatagagagagaggaagaaaaaaatgcttttccctccttttttgttctatccaggccccg

SEQ ID NO: 669680 - DNA, 746 bp, Homo sapiens
gaatagaacacaaaagtgagcatgaaactacagtcctcaaagagttcataatttaaatgtagagatacagaaataaaccaataggcaaatacttcccaaggcaaaaaatcttcacttagataaagcacactagcataccttggctagtctttaagccacaagagaaggttctctagtgatagttaaagactttcagaatcatcttaatttggtgtgccatcaaaagaactgctcactctaattagaaggtgatgttttcaggtataaaattttggtccaactctatccctattctttcaaggttccacttctgctttgttagaccastctcagacgcacagaagatgataatcagagttgccagcacctctaagtcaaggcagaaactccccctcacaaagaaagggaaagtccacacagaacacatctgtgccagggacataaaggaacacatgtggtgtcattgtctctaaaggagttctgaagagttagactgtttcacgccagtaaaacgaaaggttttacaaaatcagaaaactattctctaaaacacacgtcttctgaagtgtgatttgggtgtcttaccttgtacagataaaacagaatatgtgactccacgagcagagttctctgttttaaaaggcttttggcgcctgataacgttcctcccggtgagttatagtctgtttgggaggaagataaaggaatgtttttagtgaaaatacaaaaagaatcagttacatatt

SEQ ID NO: 669681 - DNA, 626 bp, Homo sapiens
ggtcaccttatttttgcaggaaaaaaagcaaaaaataaaaaaataaataaaacaaaacaagcaaacaaataaaaccccctagcattaatattctcagacatgagaagatattataaccatgagagaagaacaggaagaaattaaaaggaacatttataaaataaaackgatattttagaaattaacaatatgatggagaaaataattctagttgagaaaaaattttcagaaattttggcataaagaaaaaagtaaataagataaagaataatttttatctgttatagacaatgatttggtggtaatatttgaaggaaagaggatatttaaaattacagaaaccagcagattgtacagcttgagataaaatgagagaataattcaatttatacagttctttaaacatcaaaacatagaaaacagtaaaactttaagtgtcagaacatcaaggcaggtagcaagttctcaaacactaaattaaatgagtcttacttccatcaccaatacagtgaaaaatctgttacatgaggcttattagcaagtcatgatctcaatgcccctatttttgatgagaagtgaaggcataacctagactcacagactagtgcaaagaatgcccctttatg

SEQ ID NO: 669682 - DNA, 675 bp, Homo sapiens
ggtaacaacttagatttttccccctttggttgaaaggtcagatttctggtggtatgagtcacagagctcagggggattttaaaaattgagatagtactttttcaaagacaaattaaaattcagagccttatacacatccagaccatttaaaattggatttgaaccactagatagtttacaataattaaccctgacacctccgttgttgtgctgcagggaagcatggatcagtcacttcaccggttgcaaagacckattcctcagattgtagccctcttggctatttactgggtctgttctttgctgatcgtaattgctgtttctcttttgcacgatgtgtgacagagattatttaaagtattttatctttaaattacagatttagaaacttcaaaattacaatggagaatattttaggattcactttgaaagataattttacacctatgacaatgatatcacttacctgtggcctgacgattttaagcacatgtattaactgtttaaatcgctctcaaaacaaccatctgaaatagaaaatgttattattctaaattcctctttacaagcaaggaagtgagacatagattggataagcaacttacttcaggtcacatgattgggaagtagcaaaggcaatattttctcccctccattttagttaataagtctgca

SEQ ID NO: 669683 - DNA, 600 bp, Homo sapiens
tttttccaatcctctttacttctcaaggtgtccaagtcacacagagccacggaatctcacaggtgtctgagaattcctcctcctgggactctcagaggatccagaactgcagccggtcctcgctttgctgtccctgtccctgtccatgtatatggtcacggtgctgaggaacctgctcagcatcctggctgtcagctctgactccccgctccacacccccatgtgcttcttcctctccaaactgtgctgagctgacatcggtttcaccttggccatggttcccaagatgattgtgaacatgcagtcgcatagcagagtcatctcttatgagggctgcctgacacggatgtctttctttgtcctttttgcatgyatggaagacatgctcctgactgtgatggcctatgactgctttgtagccatctgtcgccctctgcactacccagtcatcgtgaatcctcacctctgtgtcttcttcgtcttggtgtcctttttccttagcccgttggattcccagctgcacagttggattgtgttactattcaccatcatcaagaatgtggaaatcactaattttgtctgtgaaccctctcaacttct

SEQ ID NO: 669684 - DNA, 643 bp, Homo sapiens
tgctcactgtgcccttccctttgggggttccttgtagaccacagctagaccagtgggtgccacaatcactgtgtcaagtatagaaagggcagctgagatcacatcaaggattctagaaagaattggcacaggatcattcgggacacatctctcccttgcccctgttcctggctttccatacagctctcgacttcctcaaaggagtcatcaattcggattttggcttccattcctattgaggaagctggaaagtgtttcaaaaatgctcctcagatgtgcctgtggttaagatctctgagctctgcttaaaactttttgaatctgagcgcagtggctcacgtctgtaatcccagccctttgggaggctaaggcaggtgaatcacaaggtcaggagttcgagaccagcctggccaacatggtgaaaccctgtctctactaaaaatacaaaaaaaaaaaaattagccaggcatggtggcstatgcctgtaatcccagctacttgggaggctgaggcaggagactcctttgaaactgggagacagaggttgcagtgaaccaagatcacgccactacgctccagcctgggcgacagagcaagactctctcaaaaaaataaataaataaaaattacgaaaaaaagtgct

SEQ ID NO: 669685 - DNA, 2343 bp, Homo sapiens
aaagatgaccttatggttaagaaatgagagaaaactgttaagaaaaaktatgttctccatcttgaggctaattgtttgcagagggttgtcataaaagatgctgccactaaacaggcatatctgatcttatcatgtagggctgttaaataccacatttcaacttctagtcataatgatggagaggttactgctgatcttttctgataattaaggtacaaaaatactaggttccaagacatctctcttttttcagtgtcacttggaccagtggcaaattaaacaagcaatcagataaaagtcagaggatagttgaggaaagtaaaagctaaactgtttggggcctctttcctggggcagcctccaggctactacaaaactgaggcgctgagcagagaggtgacaagatgcagagcactcaggtgagggacagagagcggaaggtggacagtccaaaaagagaaagtggcaaacatcttgtttagccaaacccattcttctcagtattcccaagggcctctaaccctgtgagcttggcctctaatctgaatatgatgcccctgggcctctaacttttggggctgagtctctcaccctaacattatgccctagggtctctcacttaaataatagtggataatcgttcttgcccgcctgaatggcttcacgactctaaaagatggcccacttgccagctgattgattctgtgtggattgttttccttggagtgggggtcttgtcttggcgtcccttcatgatattgccgaaagatgttgctggaaaagagggtcctgatacagaccaaaaagtaggattcttagatcttatgcagaaaaaatttgaggtgagtcagagagcacagtgaaagaagcaagtttattagaaatgactccattacagagttggacatcctcagaaaacaagagcaggagtgcattgtcttttgttagtgtctctacttataagtaactataaagagaaagagttataattaaacttggaaggtgcagatgtactcactaaagtcaaggctattggttttaacaatgaccattaacccactgtcctaagctagctcattaatattatccttacaaaaaatgctacactcctaggacatttatacatttttcaggcttggtggaagatgtcttgtatggccacagatattctgcaattgtaatttgtggccagctaaaaaatgtggctattttcagaccatgagtattaaccttctagatgccttgtgagtacctagctactcatattaagatagagtattctggtcatgtttgttaaactagaaggttggtagccatgagtccctctaacacagcaagtctactcctcaaggagaaaatgtatttcttaggaactttgtgcattttgtttgatggaatttggtatgtttaccaaaatggcagaaaacagtaaaattagtcctcaaagatttctcaagattggatataaacaaaatgatagttaatatggaagttgatacagttgatattcaaaagaaattttgtttgaaacacaatgagatttttatttttatttatttatttattattattattattttgagacagagtcttgctctgttgcccaggctggagtgcagtgcaccatcctggctcactgaaacctccatctcccagattcaagcaattctcctgcctcagcctcccaagtagctgcgattacaggcatgcatcatgacactcagctcatttttgtatctttagtagagattgggtctcactccattggctgggtggtctcaaacccctgaaaacaagcgatctgcccaccttggcctcccaaattgctgggattacaggcatcagccaccgctcccagccacaatgaggttttaaaataattctgatttcctgctgttgagcagggagctgagcaaattcaacagattcatgggcttaaagtaggagaagactgaggacaaactctagaatgcatgtgattaaattaactacaattgaaaccaaatcaaatttaataaggctgtacctcttagtttcaagatgtttcccctcgttttgaaatgtgttattcagtggaaaagaaaactagtgtttgtctccagagtaaagaacagggttccctgcagggattgattgactgagagctatggcttaggattaaaaatccttcttttttccacttataaactaaaaataaatttttaagcccctattgactaaatgaacccctcttcttggataaggacattccaaagttaaccttaaaagctagttcaagccatgggtcacacatgcctcattatactctcctccctttgcttttaattttaatttcaatcttta

SEQ ID NO: 669686 - DNA, 2343 bp, Homo sapiens
aaagatgaccttatggttaagaaatgagagaaaactgttaagaaaaattatgttctccatcttgaggctaattgtttgcagagggttgtcataaaagatgctgccactaaacaggcatatctgatcttatcatgtagggctgttaaataccacatttcaacttctagtcataatgatggagaggttactgctgatcttttctgataattaaggtacaaaaatactaggttccaagacatctctcttttttcagtgtcacttggaccagtggcaaattaaacaagcaatcagataaaagtcagaggatagttgaggaaagtaaaagctaaactgtttggggcctctttcctggggcagcctccaggctactacaaaactgaggcgstgagcagagaggtgacaagatgcagagcactcaggtgagggacagagagcggaaggtggacagtccaaaaagagaaagtggcaaacatcttgtttagccaaacccattcttctcagtattcccaagggcctctaaccctgtgagcttggcctctaatctgaatatgatgcccctgggcctctaacttttggggctgagtctctcaccctaacattatgccctagggtctctcacttaaataatagtggataatcgttcttgcccgcctgaatggcttcacgactctaaaagatggcccacttgccagctgattgattctgtgtggattgttttccttggagtgggggtcttgtcttggcgtcccttcatgatattgccgaaagatgttgctggaaaagagggtcctgatacagaccaaaaagtaggattcttagatcttatgcagaaaaaatttgaggtgagtcagagagcacagtgaaagaagcaagtttattagaaatgactccattacagagttggacatcctcagaaaacaagagcaggagtgcattgtcttttgttagtgtctctacttataagtaactataaagagaaagagttataattaaacttggaaggtgcagatgtactcactaaagtcaaggctattggttttaacaatgaccattaacccactgtcctaagctagctcattaatattatccttacaaaaaatgctacactcctaggacatttatacatttttcaggcttggtggaagatgtcttgtatggccacagatattctgcaattgtaatttgtggccagctaaaaaatgtggctattttcagaccatgagtattaaccttctagatgccttgtgagtacctagctactcatattaagatagagtattctggtcatgtttgttaaactagaaggttggtagccatgagtccctctaacacagcaagtctactcctcaaggagaaaatgtatttcttaggaactttgtgcattttgtttgatggaatttggtatgtttaccaaaatggcagaaaacagtaaaattagtcctcaaagatttctcaagattggatataaacaaaatgatagttaatatggaagttgatacagttgatattcaaaagaaattttgtttgaaacacaatgagatttttatttttatttatttatttattattattattattttgagacagagtcttgctctgttgcccaggctggagtgcagtgcaccatcctggctcactgaaacctccatctcccagattcaagcaattctcctgcctcagcctcccaagtagctgcgattacaggcatgcatcatgacactcagctcatttttgtatctttagtagagattgggtctcactccattggctgggtggtctcaaacccctgaaaacaagcgatctgcccaccttggcctcccaaattgctgggattacaggcatcagccaccgctcccagccacaatgaggttttaaaataattctgatttcctgctgttgagcagggagctgagcaaattcaacagattcatgggcttaaagtaggagaagactgaggacaaactctagaatgcatgtgattaaattaactacaattgaaaccaaatcaaatttaataaggctgtacctcttagtttcaagatgtttcccctcgttttgaaatgtgttattcagtggaaaagaaaactagtgtttgtctccagagtaaagaacagggttccctgcagggattgattgactgagagctatggcttaggattaaaaatccttcttttttccacttataaactaaaaataaatttttaagcccctattgactaaatgaacccctcttcttggataaggacattccaaagttaaccttaaaagctagttcaagccatgggtcacacatgcctcattatactctcctccctttgcttttaattttaatttcaatcttta

SEQ ID NO: 669687 - DNA, 674 bp, Homo sapiens
attgcttcaataaaatgtctttgaaaacttaagacatgagaatgaatattactttttcctaatgaataaaactaatatgaactattttttaaataattgggattttaaaataatctttcttgatttgttactgttttcttaatgtctagaaaatatatyagtaaattttaaaggaaattaagtatcagtaaaatataaataaaatagtttgttttatttcttctaaggccagaaatctcttactgattctgacagttgaaaaatgtggacctcatgagtcatgacaattttctcctgaaatccctctttggaatcacattcacttcatagcttcatgcatcttaacagatctgagatacagagcaaagatcaatcttggtctaacttgggacctaaaacgtgctgctgattgtaccatttaaacgcatataaaaacccatctgttgtttactgtgtatttatactttactaccaagaaatgtccatttaacaggtggagaatcaaatccaatctagtaataatttctcatcttcatcaagtttttatttaatcaaactcttttaaaaatcataaaatataaggcccctgtttaggatttgatcaaaaatcatttgtaaaaggtcagaagaactctcactactgttttgtctactacagatgcaattaaccaagc

SEQ ID NO: 669688 - DNA, 618 bp, Homo sapiens
ctatggcagagaacttaaggccttcgatctccttgtccctacattgaggtagacaccaaattccacaacttcctatgccaaactctgtgcctagtattcagaaacgtatgcacaccagcatcctgagcctccgtgagaagacaagagtccaatcctggattagttgacttaratgcacatttttgtatttcacagatacataaagcagctggcatccaggtataaacaggaagtacaatatccagctcatttccctgttgctcaactgttggcaaagttttgctgcaaacaacactatttaaggatggcctgaaggatatgccgtctaggctgttttctcccagtcctttgaaatctacctaaggccggcagagagcaccgcgcactgccacatgatctggcctatggaacaacctctgtggcagcatcgccatcaggtcacacagcgggggcttcatgaggaacagcccaggagaaacaactcgtttcaggcctgttgaggactttgagccctatgtcacagggtcttctctaaaagatgctcaggaaatttctccctcatctcggcactgaaaaagattccccttcacaacaacgatgggtaagttttcatcctgt

SEQ ID NO: 669689 - DNA, 618 bp, Homo sapiens
ctatggcagagaacttaaggccttcgatctccttgtccctacattgaggtagacaccaaattccacaacttcctatgccaaactctgtgcctagtattcagaaacgtatgcacaccagcatcctgagcctccgtgagaagacaagagtccaatcctggattagttgacttagatgcacatttttgtatttcacagatacataaagcagctggcatccaggtataaacaggaagtacaatatccagctcatttccctgttgctcaactgttggcaaagttttgctgcaaacaacactatttaaggatggcctgaaggatatgccgtctaggctgttttctcccagtcctttgaaatctacctaaggcyggcagagagcaccgcgcactgccacatgatctggcctatggaacaacctctgtggcagcatcgccatcaggtcacacagcgggggcttcatgaggaacagcccaggagaaacaactcgtttcaggcctgttgaggactttgagccctatgtcacagggtcttctctaaaagatgctcaggaaatttctccctcatctcggcactgaaaaagattccccttcacaacaacgatgggtaagttttcatcctgt

SEQ ID NO: 669690 - DNA, 618 bp, Homo sapiens
ctatggcagagaacttaaggccttcgatctccttgtccctacattgaggtagacaccaaattccacaacttcctatgccaaactctgtgcctagtattcagaaacgtatgcacaccagcatcctgagcctccgtgagaagacaagagtccaatcctggattagttgacttagatgcacatttttgtatttcacagatacataaagcagctggcatccaggtataaacaggaagtacaatatccagctcatttccctgttgctcaactgttggcaaagttttgctgcaaacaacactatttaaggatggcctgaaggatatgccgtctaggctgttttctcccagtcctttgaaatctacctaaggccggcagagagcaccgcgcactgccacrtgatctggcctatggaacaacctctgtggcagcatcgccatcaggtcacacagcgggggcttcatgaggaacagcccaggagaaacaactcgtttcaggcctgttgaggactttgagccctatgtcacagggtcttctctaaaagatgctcaggaaatttctccctcatctcggcactgaaaaagattccccttcacaacaacgatgggtaagttttcatcctgt

SEQ ID NO: 669691 - DNA, 664 bp, Homo sapiens
cacatatattacctttgtatccttgttctgtctccctgagatcaattttggttattggtttgaaatcagtgtcccacagtcgtatacacccatctcgcccaccagtggcaaagccttcttcacaagcatacatgctaaagattccagcctgttgattaaaacaggtaatactcaatggtgcaaccatcctaagtataatgaatagatacagttgaatgttgatttaaaaacatagcaagtcaaaaacaaaaataaaacccctttgttctctattgaaatgctgacaatagaccaagtagccatttataacactgttcatctcagctacatttaaaaaatcataataataaaagcaaactagttcaagtgctcttttaccactactaaaaagattacagtttaaaaaaattcaaaaatataattaatgcagatatgggaatcaaattattttatgtgataagtggcccttagagagaaaagacaactatggaggtgtttcatggaagttgctgcctaaaataattaagtagagataagaggctaggaacatraacagtttcataggcacaaaagtgcccaaaatgtacctcagtgagctcacaaaggtatcacttgaacctaaatgaaaatgtaaatagcacttgtgttcgcttgttaagcatcg

SEQ ID NO: 669692 - DNA, 628 bp, Homo sapiens
tattgcagcactaacaatagcaaatatttggaaccaacccaaatgcccatcaatgatagactggataaagaaaatgtggcccacatatacaccatgggatactgtgcagccataaaaaaggatgaattcatgtcctttgcagggacatggataaagctggaaatcatgattttcagcaaactaacacaggaacagaaaaccaaacaccacatgtcctcactcataagtgggagttgaacaatgagaacacatggacacagggaggggaacatcacacactggggactgccatgggctggggagctgaggagggagagcattaggggaaatacctaatgtagatgatgggttgatgggtgcagcaaaccaccatggcataygtatacctatgtaacaaacctgcacgttctttaaacgtatcctagaacttaaaatataacaaaaaatgttatcattacttatagtcataagtatggttaatatattggtatgtttctctccggccttgttttgtttctttgtgtgtgtgtgtgtgtgtgtgtgtgtgtgtatttatatggttgatatcacactgaatatacaatttattttctgtttttgtacttaatataacaacatcaatgcccca

SEQ ID NO: 669693 - DNA, 1003 bp, Homo sapiens
cctggaaagctcctctcttcgctctatgctcgctcccttaccttcgtcagattcctgttggaatgcccccttatcacagggccttctcttatacaccatcccagaatgctctatccttctcttgttttcttcttttgaaatgtcacttaatcaaaacaattaggttttttctttttaatattagaaggggtaatttctgtgtgtattgagtgaaggcttctaatttgatctttctaagtgtcagtgaatcaccatgttgttcttctcccaagtttacctagatgattggaacctgggttttatattctagctcccaaaacttaccaaggagctcttactaatatctcacaatagccgaaattaattgtcccttgtaaggccctgtgcttttcccagcttctgttaaaaaaattgtggccaggagtggtggctcatgcccgtaatcccaacactttgggaggctgatgggggtggatcatgaggtcaagagatcgagaccatcctggccaacatggtgaaaccccgtctctactaaaaatacaaaaattagctgggtgtggtggcatgcacctgtagtcccagctactcgggaggctgaggcaggagaatcgcttgaattcaggaggtggaggttgcagtgagctgagatcacrccactgcactccagcctggcaacagagcgagactccatcttaaaaaaaataaataattgttttatttttctgtctctattggccaacaagaatagaaactccgctagggcagagactttttgttcattgcaatatctcaatcatccagaacagtgtctgtcattttgtagacagtaatattttgttgaatgaataaattaatgatcatattaatagccatataccccaatccaataccaacttcagtgtacctatcttgaacacttaaagagtcacgatgaatcaatcacttcaaaaactaccactgtttctcactcattcattcttttgacaaaatattatttattacc

SEQ ID NO: 669694 - DNA, 1332 bp, Homo sapiens
aagcttccatgaagtgcaaggaaaggaggtctaaggaaacagggaaagtttcacatttcctgttattgaatctaggcacaacctttagaggaagctgaatgccttttgaatcccatatgctctgttctgtgaagctatcattgttgttttaccttataactgaaaagctattatggcaaactttttaaatgatcccagctatttgtttttcgagtatcatcttgtatccaaattttgccattacttttttctttctttctttttttttttttttttttttgagacagcgtgttgctcttgttgcccaggctggagtgcaatggcacgatctcggctcactgcaacttccgcctcctgggttcaagcgattctcctgcctcagcctcccgagtagcagtgattacaggcatgcaccaccacacctggctaattttgtgtttttagtcgagacagagtttctccatgttggtcaggctggtctcaaactcccgacctcaggtgatccacccgcctcagtttcccaaagtgctgggattacaggcgtgagccaccgtgcccggcccccacttttttcttttcattaaaaaatgcaactctaaaatattttgtttttctaaatgggatccattcaatctaaaaattagtgttctttccagttatcaaacattcactgtgtgccaggcattgggtaatagctttcatactcattatttcatttatttacaaacaccctatgaaggagacaccaacacttgaggaaaccgagagaggtttagccatttgcccaagataacacatccactgtggggctcttttgaccatttcatcaatatccatccaacttgtatcactagagtccatgagcttggccatcctttgttttctgaaaacacaaagtagagtggtatttgcactctgttaagcccacacttcactaaagacggcagccttcaggtagaccagaagccaaaactcacttatgacactgtaccatagcagtcaggagcagatctggacatcagacctgatttcaagtcccagttcacccacctactggacgacctgagaccacagggacatcatctgctgtctctgagacttttcccatctgtaaaatgggaatgaaartaagttgaattctatgaacttgccaactttcaaccatattctacttccaaaaagtattttcaaatggtgcaacctaaattcttcactgggtcattgtacagattagatgaggacacaaagggaaatgttcagtaagtggcgctttttagcagactttttcttcttgattttcttttgctctggccaataatttgcattctctgg

SEQ ID NO: 669695 - DNA, 1117 bp, Homo sapiens
cctgaaggcagggaaaatttcccagagtcatgtcacaatttcccctgaagacaggagagtcacaccacctaggttcttggcccagcaatatgtcacaatcccttctaagtgcacaagcagcgaagaagagtcacataacttaggtattgggcccagcaatatgtcacaattcccaatggaggccaagatgaggcaagaaagtagagtcacatcacataggtgaaaagtccaaagatatgttacaatgcaccctgtggtaaggcccaggctggagagttacatcacctaggtacttgatccaggtatatgtcacagtcccaactgttggctgggcccaagcaaattagtaaaataaattaggtgctgtgtgaaagtatacgccacaatcacacctgcgggaaggaccaggaataaatttcacagttctacatatttcccagctttaggtctgacagtcaacacctcttgtgagttgcatccaaatacacgagacmcagtcttaacattggacaggatccgtccatgagagctctatctccactgcaaacagtgttcccataagataggcacagcctcaccagggtgctgaatcttggtctcagagtcactatcctacctgttgaccagatgcatgtacgtgagtcaaactttcaacttttcattgcctctgggcgtgagattcagaacctcaacagtgagctgtgtctatatgggagagtgaccatccttattgttggctgggtatgcataggagattcacaatttcctctgtgtttctggctgtgttatgacactctctgtaccatctgagattttcacataatatgcttgagagtggaattctgctctgtgaactttgtttgtatggctctaagatcttacctgttaccctaagcccaggcagaagtcaacacattttctcttgcctgggtccaggtatgagagtcatcaccatgtttgtgagctgggtccagaaatgagtcacaatcttacctgtggtcagatctgcatatgacagtcacaatttcaactgtgaaccctgtccacaaggcaaagtcaggacctcactaatgggatctgtccatgtgtgtgggtgacaattcttactgtcagctgg

SEQ ID NO: 669696 - DNA, 733 bp, Homo sapiens
ttgggggactgagatgggtgaatcacctgaggtcaggagttcaagaccagcctggccaacataatgaaatcctgtctctactaaaaatacaaaaaattggctgggcatcatggcaggtgcctgtaatcccagctgagccaggagaatctcttgaacctgggaggcagaggttgcagtgagccaagatctcggcattgcattccagccttggcgacaagagcaagactccatccacctcaaaaaaaaaaaaaaggatataaaaatcacacctgtaaaaagtaagtggattaactttacataatatacttttcaggtgaggactggccagcttctgccagttcttgagcacactcaaaaaaactaacaattatcaagggtaagtatcaggggaaccagccccccaatattttagtgtaggttcttctctattttccctaagtgtcagctggtctgagaaataaagagaaagagtataaaagagagaaattttacagctgggcctccaggggtgatatcacatgtcagcaggttcygtgatgccccctgaaccacaaaaccagcaagtttttattagggatttcaaaaggggaggggggtatgaacagggagtaaatcacaaagatcacattcttcaaggggcaataaaagattacaagggcagaagggcagagtgagatcacaaggccagggtgaaattagaattactgatgaggttccatgtcccactgggcat

SEQ ID NO: 669697 - DNA, 1581 bp, Homo sapiens
aaaaaaaaagcttcctagggattctaatatgctgccaatgttgagaaccactccttatccacagtacgggaagatgcagatatcccaaagtaaagttctaaatgcattgccttctaatggtgattgctcagcatgcacccaataaaaacatggggatttaaatgacggagagatgcctcggtttactccagagatctgaatcagaatctccaggacaataaagggaagggccaatctatggattaaactcaaaggcttcctctgaagcttcctcttaactccagccctggataaaaacgattcctgtgaaaggattcctcaatgtggaggttagatgagaagttataattggcaatgtgctttgggtccctttggaattcaatgagtttttgcctggaaaccttaacccctctgtagcattcttcttacaggaaacggtgtctcacattctaaactatcttagaagcagtggagattctttttttttttttttttttttttgagacagagtcttgctctgtcacccaggctagagtgcagtggcgcaatctcagctcactgcaacctccacctcccgggttcaaccgattctcctgcctcagcctcccgagtagctgggattacaggcacccaccaccgcacctggctaatttttttgtatttttagtagagacagggtttcaccccgttggccacgctggtctcgaactcctgaccttgtgatccacctgcctcagcctcccaaagtgctgggattacaggcatgagccaccatgcccggccgcagtggagattctatgtgccaagggctgcctgtcccagtgcctggcagtggcttcctgcattcagagagtggcatgtgctctcctttctgactgtgctctgtccatttcctctgatagttctacagtgtcagccggttgcctacaaggagcttatcggacaatatctgtgcagtctgtgggcagaagatcattgtggagcttgatgaagaagggctcattgaaaacacctaccagctttcctgtaatcatgtgtatccttttcaaaggaaattgtttgggcttcatcaagcctccttctttcctccttctcctcctcctcctcctgtccccatctcctccatcttgcttaccttccatgcccaaaccccagtcctttatcctccagcccagtcgagtcttcctgtttgtccctgctgaataatgaactgctaattaaggtgaacctcctcctccagtaatttcctttctaaagaggactgttaatgccacatagacaggaaggcagtatctgagcagggtgctggcaggggaaattggttgaagtcataagtgagcagatagccaacaaagatcagggaaagaaggggtttggaggtgagaaaaagagtgaagyatcaggtgcaggggggaacttaagactatccaagtggagcccaaggtctgaatcttagcagatcaagaaatacaaagagtgctttgcctagaaataatcctaggaacctacctgtggcaacagtagtcttgggggcagccaagggaggaaaccaagccttcttctcagcttcagtctttagaa

SEQ ID NO: 669698 - DNA, 614 bp, Homo sapiens
tgtgtggtttccctcccagtgagcaggctaaccctgagtataggaacttaggggaggttaggtggctgatgcatgttttccagaccggtttgtatctgcttgtcattgatcttagaagttcatattatggtggaattatctatttgcatgtgtaaactttgaatatgtttttaacttttaataaaaagttatttttacattttgttttgtctttatattagaaattcagtaggcgtgatttgtgagtggaatgcagggtttgcttgctttgaatttatttctctttgctgtggttgtgtggaggcctgagacaagtgtcttgtaagcttggggggctgccctgcacggagagcctccaggcatgcactgcctctagaaagtcccaaggttgccaggttagaatcctgatctgcgtgaagcagacacttccctccccgacccccagtattgaataacattaaaaataattatgttctaggcatatagccaaaagaaagcaaggattagacatattttcacacccaggttgatggcagcgttattcacaataggcaaaaggtggaaacagcccagatatccattaacacrtaatgaacaaaagtgtaatgtgtcca

SEQ ID NO: 669699 - DNA, 1781 bp, Homo sapiens
cgacggacgaaggtgtccgatcccgtggctggcgtccaccctagcccggggcaaggggctgacaccaaggaaaggagagaagcatgttgcgtgctgggagctggaagaaggagtccagggtgtccagggggtgcacagggctggctggccaggtctgggagtgaggctgtgcagtcaaacggaggttgtgcagatgcctggggcgttagggcacctcgcgggctgcctatgccataggtgggagggatcccagctggtggcggagctggcgtgagtctgaagaggctgaaggaggccagggctgggggatatgagtcgtctgagagaggggcattgacggcgagacggagagttggctgtgtgagacagagacagagagatagagacatagagacagagagagagagagagacagagaaagacagagagagagagagagagagagagagtgtgagtgtgtgtgtgtgtgtgtgtgcgtgcgcgtctgagtgtgtgtgtgagtgaaggggtgggtggcgtgagaccaaggtgggggagggagggctgagcctgaaggctggtgggaacagtacattttcagccggttggtctgggcaggaacgaagtctgtgtggtcaaaggggacccgcgccggcgagactgggatgctgcttgggctgggcggtcagagtatggagtggggctggggtgaggtggcaagcagcccagggtgggagagacatcgtgacagagcgactggaggccacgtcccacgtcccaaaagggtagggaatgcaactggacccgagacataaataagccgtcttcaggacgcacattcacgtctcaggcatgtgtctggggctgagatgaaaagaggtccgagggagagaaacaaggcagcatcctcgactaaagtggtggattggggttaggttgggagttgcgacatggcggtggtggtgccggcagaatgaggggagagagtgtggagtagccggaacacggtgaatatagacggtgcacatgccacgcgtacactcgtgtggtcgcgttaaggactgtgtgaccaactaggggaaagtgatgagttactccctggagtcgcgacttccttcctactggaagggcaaccatggcatcattttctggatgtggggagccagcgagggggggggagagagagasagagagagagagagagagagaggtcgaggcggtgaaatgtgaagagaaggggtggtgcgagtggctgcaagcccgtggtgcctggcggtgttccgtgaagtgaaatgcgtcgggcagaggcggtggcagggcaatgaagagaaacaggaccaggaggctgccaagttctggtgtctggcgcgctctcgtgtctggaggggttgttgtcaccaaggtgtgtgggtgcggggggtaggctcatccctaagtcagtcgagagaggcacggaagaaagggcagagggccgtcgcgcgtgggagcgcagccggtgccggactcgctcgcgcgccccgagtgtaaggaggcggcagaggcgagcgcagctacgccttggtgctgctgcagcaccaaaatgggagggcgtgctgcatgggccgggaatcgaacccgggcctcccgcgtggcaggcgagaattctaccactgaaccacccatgcaccgatggcaaacgccaacggaagctggcacagcggaactcgccaccagccgccgttcactggtcaccgcctgccgtgggcctccgtcctattgcagcgtccacgagaggctggcccgatggggcgagcagaagggga

SEQ ID NO: 669700 - DNA, 605 bp, Homo sapiens
aaacctagtatagcaattttgtgaggaatttctagtatttaaattatacttggaattatatgtctgcatttagaactaagccacttgcttgtgaagacaggaatttgatcataagttatctgtaaggtttatgtaagtgtccatactttatgaatgagaagaccaaatcaaaatgatgttgcagtctcggtttattcagttatgcttttattgcttgacttttttacttccatgcagttcattgatgacttagttttctcctcagatgactaaagataacttaaagtatccctaataatcatttgtgtcagttgtcagtttattatttctcggctctgaattcacatttcaacgtatgctctaaaacagaatattttaaataatttttcctttgataagagcagtagagggtgcttgaggaatagtgcagtagaaagagacttcctgtgtgagccgggtgtcagcaggactrgggtgaggatagctagtagagcctgccccagtcacctgcccagcctttgtccctctgtgacattgcagcctctgtctggtgattatctttgcacagcactctctggaaaccggagctcccacagactgtccgc

SEQ ID NO: 669701 - DNA, 672 bp, Homo sapiens
atatacccttttgttagccttaatatttgtgttcaggttggggacaggaagaagaggttcagaggtttttattttggtctttgaaaaatttgtggctcaacctctctacatatgcacaaacaggaaacaggaaatccaatcttgtaaattgctgggcacatgaaatggcctgtgttgtactttgccacatgactaaccctattatgggcaaagttgctaagaatttgaggttttcaattggctgggaagaatttggtgagcgcagtgaaataaatggaagtccagaccagartaagtgtccacagtttccattttttaattctggcccccagatttcagtagatccaatttacatattcccaactatgacatttctgcacctgtggcagtcttaccaaccaaaatttgagtgtactgtgacatcctgtctgataaaaggagattttttggatggcagaagtataatttcacaactaatccttttacttttgtaataggagacaaaccaaaactgtattttatgtcttaaaagtgcttttatatatttttttcttgtttccaaaccatttcttccttaaacatgaattaatgtgaatcttcaaagtaattagtgttttctgtttcttaagtaggtatgaggtatttgttatttatttcctacacatatgaaat

SEQ ID NO: 669702 - DNA, 1691 bp, Homo sapiens
aaataaatttttgctttttagtgtatgtattcctgtattattcgaatttcacaataaaaatgtgtattaatttatgccctttaaggtaaaatgcattgcttctgaagcttaacttcttaaaacaagtttcctccagttacagtgttccagtgttataaggaacatagcaaaggagaatgcaaataacttaaatttctatcatagattactaaaacaagaacagacactatcttgaagtccaacaacccctctcatcattttataaataagtaaactaagactctgagacatcaggtgagttacccatggccacacagcaaacgagtcagagttccttcctctgatgactatattatgcattgctcttgttctttccattttgaaaactttgctcttattttttttccctcccaatctctaasatgcccccattctcattcacaataaactaagggatataactgttcagtaaatgaatatattttctgagggctattaacattcccttttcttgatcaagtagattagatcattttccttacaccccaccccccgccgcctttattatagagtaggagtataagctaaaaatggtaatcccctccctttaaacattttttctaattgccccctggtttttaaaaattgttgccccttctcaaaatagtttccagctttgaaggttaaaatatgaaatacaaatgaattctcaagcatttttgaactcattaagaaaaaaagtaaagaatgaagagaaaacggagatccagaaacctctcactatcagtctgatctatttaccggcatgagtcagtctctttttagaaatacaaggaaatctacatgtgacttcgtaaactttataaagtttgaaatattacagtttaaagaatacaatgatagctattcattatgcttttattacactgaatcacagttaatttttttctgaactgttgagaaatgtgtcacctttgcaaaggtaagtatattgtgtttcattataaatatccaaaagttggcaatccagtatcatatcagaataagacatgcctacacattctagtacctttggattttaccgattttatatctttctaaaacagaatacttactgtcttgttttcttagtgggggcacaccatcataatgtaaccacttcttggtgactcagtcttcatttagaatattaattactacgctgcaagcactgtggtgaaatgatgccctagaggctattatacttctaattaaataattgagaaccatggctcaggcctataattcagcacttttgagacgttgaggcaggatgattgcgtgagccgaggagttcaagaccagcctgggcaacctagggtgaccctgtctctacaaaaaaaattagccagggggtggcagcacacacctatagtcccagtcctgaggcaggaggatcacttgagcctaagaggtcacggctgcagtaaggcatgactgtgccactgcactcaagtctgcgtgacagagcaagaccctgtctttaaaacaaataaataacaattttttaaaagttagccaggtgtggtggcacatgcttgtaattcaggggctgaggcagtagaattgtctgagcccagttcaaggctgcagtgagctataactgcacccttgcactccagcctgggcaaaagagtaagaccctattgcca

SEQ ID NO: 669703 - DNA, 630 bp, Homo sapiens
cgttatccacagataattaacaaatgagtctgcagtccttctatgactgagactcttcacctattgatgatgtgtgtgacaatctgtatcacctgtagaaatggccaaaattttgaagatgcctaggcctgctatcagacatcaaacttttggttttaacatttccagattttaactatgtgatcctagaatgccatttgctggtttcctcagttttaatytacctccttttagaaattacactaattgagagatggtatgagaaatgactaaagctatagataattaacagagattttacatggccttcagagggtggatttgtactttttaatgtgaatgagagaactgtaattgtaaaaaccatgggagtcttacatttgcttaatttgaggctagttctgtataacttattgggttaatagacacttttttcctgatctgcttatgataggtgagaaactacttcaattcacattttaaaaatgcaattatcccttgttcttcatggaaaattggtttcaggactccagtggatactaaaattcatggatactcaagtcctgcagtctgccatgaggaacctgcagatacaaaacattgaacctcagtatccacaggtgctgcatc

SEQ ID NO: 669704 - DNA, 630 bp, Homo sapiens
cgttatccacagataattaacaaatgagtctgcagtccttctatgactgagactcttcacctattgatgatgtgtgtgacaatctgtatcacctgtagaaatggccaaaattttgaagatgcctaggcctgctatcagacatcaaacttttggttttaacatttccagattttaactatgtgatcctagaatgccatttgctggtttcctcagttttaatctacctccttttagaaattacactaattgagagatggtatgagaaatgactaaagctatagataattaacagagattttacatggccttcagagggtggatttgtactttttaatgtgaatgagagaactgtaattgtaaaaaccatgggagtcttacatttgcttaatttgaggctagttctstataacttattgggttaatagacacttttttcctgatctgcttatgataggtgagaaactacttcaattcacattttaaaaatgcaattatcccttgttcttcatggaaaattggtttcaggactccagtggatactaaaattcatggatactcaagtcctgcagtctgccatgaggaacctgcagatacaaaacattgaacctcagtatccacaggtgctgcatc

SEQ ID NO: 669705 - DNA, 1394 bp, Homo sapiens
gccatcaaaaaaccatgtagtttttctgatttcctgtttctttctccaaagattatttatcatcagttgagaggtatgtttatctaaacaagctttctatatactccactggactgataacttcctaggtttattttccatgtttgctcatgtgtccactccagagttacctggctctgttgttcaaggtatcaaagtcctcacratgatgccgaagtgaaaatacactctaatactaaccacaggtttctaaaaattatactcaggtttgcatcttgccacacctttactttatgctctcattcagtgtgttggtcccagaaaatctggattgtatctatgtaagattccataacactggtaacctctgtctcacatttaatccataaataaagaggaacttgaggcagcacagttagctttttgtaacacagcaagggctacacacaatacacaacatctcctttctaaacaaccccaaatacttggtgacaaaatagtaaagatttcatacgacagaaatctgctgtaggtacataagagaaataagtagcttcatccacagaggtgattacatcaagaaaagcataaaacaatgtaaataaaagaatgaacacacacatacacaaaaggttaatatactaatttagaagacttattttccaacacaataaaactgatacttgattagcaggaatccattagagcatgacaagagctgaacatcttcagatgtaggcattagtcaatatgccccactgggaactgggatatggataagtagatatcaattaatattctttgctattaaaaataatgctgatatggacattcctatacatttttttcctatttaaatatgtccatttgtctaatagaaaatcttttctgttcttccttttcaagagtgttggctactcttaaaattttgctattttatatatattttagaaactacttcttagaataaatgagaaaccctgtaaatttttgatgattgcattgaatctatatattaatttaagaagaattcacataatttgtattttttcactactaacaaatattttccatttatttagaacttcctaaatatatttttatcaaaatttttgacagattgtataccttttgctcggtttcttcttaagattaacactttttgttaatatgttcaaagctatcttttaaaaaattgtataatatattattattggtatgaatattaaattgacttgcttacttcccccgggtttctatttctttctttctttttttcttttctttcattctttatttttttggacagagtctcactctgtcacccagcctggtgtgcagtggctccgtctcaaatggcaccatcttgctgccacctccgcctcccaggttca

SEQ ID NO: 669706 - DNA, 613 bp, Homo sapiens
caacgctacagctgctatgcggtaaattctcctatgaacttagctattactgggctctctgttccactggtttagttgtctatccctgaacaaatgtcacaatatcttaattaccattgctttataataagttttgatacatgataagctaagttcctccatgatagtcttcttcagagttttgtaactatttaggggtctttgcattttcataaagtctcagaaaaatctattttttctgttccacaaaagaaaacttgtaataagaaaaggaagttataagtatatttgtggagaattaatatcttttcaaaactgaatattctcctccatgaacatggtatagcaattcayttattctggttttctataattttcttcaataatattttataatttttatgtaacttgcaaaatatcctttttaagacttatttttagttacaaaaggcttttattttctaactacctttttcttatgtaggaaacattaaccaactttttggatagaattgtagcaacaaataccacacactcaaaatttataagaactggattctgggaaggaagaaagaaagagtttaccagccagagtcttcacatataaaaataa

SEQ ID NO: 669707 - DNA, 613 bp, Homo sapiens
caacgctacagctgctatgcggtaaattctcctatgaacttagctattactgggctctctgttccactggtttagttgtctatccctgaacaaatgtcacaatatcttaattaccattgctttataataagttttgatacatgataagctaagttcctccatgatagtcttcttcagagttttgtaactatttaggggtctttgcattttcataaagtctcagaaaaatctattttttctgttccacaaaagaaaacttgtaataagaaaaggaagttataagtatatttgtggagaattaatatcttttcaaaactgaatattctcctccatgaacatggtatagcaattcacttattctggttttctataattttcttcaatawtattttataatttttatgtaacttgcaaaatatcctttttaagacttatttttagttacaaaaggcttttattttctaactacctttttcttatgtaggaaacattaaccaactttttggatagaattgtagcaacaaataccacacactcaaaatttataagaactggattctgggaaggaagaaagaaagagtttaccagccagagtcttcacatataaaaataa

SEQ ID NO: 669708 - DNA, 657 bp, Homo sapiens
gatgcagcctcacaaaccaaggaacacaggcagccaccagaagctggaataagcaaggaatgaacttcttctcccttctcctgagatagcacagccactggacaccttgatctccacccagtgaagctgaatgcagactttggacctctggaacagtgagagaataaattcctattgttttaagccactaaatgtgatgcaatttgttaaaacagtctcaggaaactaacatgctccccagccatcatccgtggtagatagcctcaggaggtgctaagggtkcaggctctcaagaggcagaagggctgagagagctgcgcatgcccagatctggctttcagactcacctttcaggcagatcactccactttttgtgggacagagtgactaaagagcagggagagccaaggatacgtttagagtaaattcctcttcatagagacttctttttaaaaagttattattcataagcatccctaaattctagctattgcaatgttgaaataatttttaatatttaaatattatggtcattgttaatgctggacaaaggctgaagctgacattaacttatacatcagagagctttgaaggccaatattgagattttatgtttgtttttttgttcaataacaaaggttatccataaagttgaaa

SEQ ID NO: 669709 - DNA, 657 bp, Homo sapiens
gatgcagcctcacaaaccaaggaacacaggcagccaccagaagctggaataagcaaggaatgaacttcttctcccttctcctgagatagcacagccactggacaccttgatctccacccagtgaagctgaatgcagactttggacctctggaacagtgagagaataaattcctattgttttaagccactaaatgtgatgcaatttgttaaaacagtctcaggaaactaacatgctccccagccatcatccgtggtagatagcctcaggaggtgctaagggttcaggctctcaagaggcagaagggctgagagagctgcgcatgcccagatctggctttcagactcacctttcaggcagatcactccactttttgtgggacagagtgactaaagagcagggagagccaaggataygtttagagtaaattcctcttcatagagacttctttttaaaaagttattattcataagcatccctaaattctagctattgcaatgttgaaataatttttaatatttaaatattatggtcattgttaatgctggacaaaggctgaagctgacattaacttatacatcagagagctttgaaggccaatattgagattttatgtttgtttttttgttcaataacaaaggttatccataaagttgaaa

SEQ ID NO: 669710 - DNA, 657 bp, Homo sapiens
gatgcagcctcacaaaccaaggaacacaggcagccaccagaagctggaataagcaaggaatgaacttcttctcccttctcctgagatagcacagccactggacaccttgatctccacccagtgaagctgaatgcagactttggacctctggaacagtgagagaataaattcctattgttttaagccactaaatgtgatgcaatttgttaaaacagtctcaggaaactaacatgctccccagccatcatccgtggtagatagcctcaggaggtgctaagggttcaggctctcaagaggcagaagggctgagagagctgcgcatgcccagatctggctttcagactcacctttcaggcagatcactccactttttgtgggacagagtgactaaagagcagggagagccaaggatacgtttagagtaaattcctcttcatagagacttctttttaaaaagttattattcataagcatccctaaattctagctattgcaatgttgaaataatttttaatatttaaatattatggtcattgttaatgctggacaaaggctgaagytgacattaacttatacatcagagagctttgaaggccaatattgagattttatgtttgtttttttgttcaataacaaaggttatccataaagttgaaa

SEQ ID NO: 669711 - DNA, 655 bp, Homo sapiens
actttcttttccattgatgcttttgtgtattcctggcctattactgaagtgatatgaactgcagctttaccgtatgttttattatctggtacaactccttattcttcctctttataatccagctagttttatatatttacttttcaggctactgtagtgacagttttattttgtagattttagagtgttcttttttttccccaaaagaaatgatgatttaacattgagctcttatttctaagaacaagataaattgcaatttattgaaggcatacagtatgtctttccatagattctgaaaaatgttcaccttgtaatgtcctacacattccatataaagtttgtttttataaagatctttctgtttgggactgtgattgagatcttttcttccattatatttttaaagtggttattatttatatatgagagtttatatttattaactatataaatatcataatgtcttcatttgtaacaaatttctagttcattctattttttcacatatgcaattatattatctgtaaacaacactttatyttttatttttaaatatttataatctgtttcagattagtataattgttggtagtactgctcatctgggtccaaaatcagatattgccaagttagtgaaacgttctgatcctca

SEQ ID NO: 669712 - DNA, 1402 bp, Homo sapiens
gtattagtgtctctattacctagatcttttccaacactatgtattattatttaaaaatttgtcaaggtgataagtgaaaaataatcccttatgttttaatttgaatttctctgcttactaaaagtttgagggaaattctcatatgtatattagctattttgccttttattcaggaattaccagtgtctggcttgggggaaagccctgctcagatttytatataaaattcttgagaagactatatccaaattgtgagaagactgaatgctaatgtgattaaatttcagctttacttggtaatttctaaattttgaaataagttatttgttgatatccaaggctgtttatcagaatcaccactttttctttgactttgcttctttggggaccattctcacatattcaccttcacatctgaaaattttttttgtgcctagaatctgattcatttgcagtagaagacacacatcgataactaccagctctcctagttcgtaacccatgtctgtcacaggctttcttgatacaaatttaagatctatcctctcctttattccctagacatctagcgggagaaggagctagcccaaactgcttccctgcttctccctgcttctccctgcttcttcctgccacctggctcctcgtctcacctctgagaagctccacctgggatctctaccatttcctgggtgtccagcagttagaactccaggcctagcagggcatggtggtatgtgcctgtagccccagctactcggctggctaagctggaggatcacttgagcccaggagttcaaggctgcagtgagctcaggcactgcactccagcctgggagacagagtgagattctgtttctaaaatataaaaaaaaaaaaaatttaaagaaaaaaaaaagaactccaggcctaggttctcccaatgggacgatgttgccaacacaaaagtggtttcatggaggcaaattaaaggaaattatcaacctaaaactggaccttgaataagactttgaaggttccaaggggaaaaagaaagaaaatttgaacttttcatccaaagatacccaagttcctagtattgcctctctcgtgctcctcccttcctccccggccacagggaaaaggcatctctccagccatgaagtgacgttgtagagtggtgaagagcaggaactatggagccagatgtctggggtggcttagcgcttctgtcacattttagctgtgggcatggcagctccaacgtggcacccactgatcctccagccccagttaagtgttccagtggctacagctctaggtgatatctgacatcttatgagagattctgactcaggatcccctagccacactgctctcgaatatccaacccacagaaaccatgaaatatataaataaatta

SEQ ID NO: 669713 - DNA, 1402 bp, Homo sapiens
gtattagtgtctctattacctagatcttttccaacactatgtattattatttaaaaatttgtcaaggtgataagtgaaaaataatcccttatgttttaatttgaatttctctgcttactaaaagtttgagggaaattctcatatgtatattagctattttgccttttattcaggaattaccagtgtctggcttgggggaaagccctgctcagatttctatatraaattcttgagaagactatatccaaattgtgagaagactgaatgctaatgtgattaaatttcagctttacttggtaatttctaaattttgaaataagttatttgttgatatccaaggctgtttatcagaatcaccactttttctttgactttgcttctttggggaccattctcacatattcaccttcacatctgaaaattttttttgtgcctagaatctgattcatttgcagtagaagacacacatcgataactaccagctctcctagttcgtaacccatgtctgtcacaggctttcttgatacaaatttaagatctatcctctcctttattccctagacatctagcgggagaaggagctagcccaaactgcttccctgcttctccctgcttctccctgcttcttcctgccacctggctcctcgtctcacctctgagaagctccacctgggatctctaccatttcctgggtgtccagcagttagaactccaggcctagcagggcatggtggtatgtgcctgtagccccagctactcggctggctaagctggaggatcacttgagcccaggagttcaaggctgcagtgagctcaggcactgcactccagcctgggagacagagtgagattctgtttctaaaatataaaaaaaaaaaaaatttaaagaaaaaaaaaagaactccaggcctaggttctcccaatgggacgatgttgccaacacaaaagtggtttcatggaggcaaattaaaggaaattatcaacctaaaactggaccttgaataagactttgaaggttccaaggggaaaaagaaagaaaatttgaacttttcatccaaagatacccaagttcctagtattgcctctctcgtgctcctcccttcctccccggccacagggaaaaggcatctctccagccatgaagtgacgttgtagagtggtgaagagcaggaactatggagccagatgtctggggtggcttagcgcttctgtcacattttagctgtgggcatggcagctccaacgtggcacccactgatcctccagccccagttaagtgttccagtggctacagctctaggtgatatctgacatcttatgagagattctgactcaggatcccctagccacactgctctcgaatatccaacccacagaaaccatgaaatatataaataaatta

SEQ ID NO: 669714 - DNA, 1121 bp, Homo sapiens
gggaggcagtttagcaaactgattaaatgaacaggctgtggaaatgagacaacctgtgttcaaatccaattgctacttggggcagtggttcttaaacttgttagtgtattagaatcacctggaaggcttgctgaaccatggattacaaggcgctgttctcaaagattgtgattaagtgggtctgagatagagccccaaatttgcatttttaatgtttccagatggtgttaatactgttgatccagagaccatactttgagaatcacaaatgtcagtttatctgagcctaaattttctcatctgtggagtgttaacagtttctaattaataaggttgttaattgccaagggataatttagaggaaaaattcccaaagtttgttactttgatgtagattgtaaccaactgaataaattgtgcttttttagttgtgctttttaaataaatcttatatatgatgatctgggtttatattaaggacacatgattaatgaaatagttctttgctttattaaggattttcagtttgatcatgggaatactcctctgtactgttgagagccaaatttgatttacacctaggaacatgctccagctgtgacaggcactactggttgctttccaattatttcttcttctttccctttcatccttgactcttaattcctgcaggtatccacatttctaagagtggccatatactttaggggaagctggacacatttctttgtctaatgtcctgattaagcctcttatgggtgtcctgttccatgagcaccrgatgtagctctggtcaacaagaaactcaggtgagtcttctggatgtacttccaggaaacagcctttgttctcgtaaagcaacacttagagttgccttctttttgtgctagctcttgaggtgcctgtacgtactgctgcagttgtcccatgaccataaggggagtcatctaaggacagcctgaggatgagagaacagaaagatggaaagaaatccaggcctttgatgatgtgattgaaccatagagttaactaaccctggaattactataccttcatgctccctgttattcaagataatacattttccttatcatttaaccattttcaattgcatttttagt

SEQ ID NO: 669715 - DNA, 680 bp, Homo sapiens
ctgagtttttctccatcaaatgccaactgagaaaatgtacggtaccaagtaaaaacgcatggggacaagttcaaataatcttccctttgtttatgagccatgtattaaacagctgttaacacccgtcaagaggttttcactaaaataaaagtatccgcctctgacactcaaacgttttggtcaattgtaacaaaattaaacccactcatctcttcacactgaacgggggcggggagaagggaygctaaggtatgaaaagggaaaatgtaaaactgggcaaattttctattttaagatttccaaatagtgcctttaaaatttataaatagtgcctgcactttttctccaaaagcagccgcttctcaaagaggataaaccattcccggaaatgggcaaaagaacacactacagggtgcggaccgctacaggcaagggcggacaagactgccaggagcaaacgcgtccaggaaagaagccgcccaccggaaagtcccaactagagttcccttccttttcccctcggcgtgcggctccctgggtagggggaggagaaagcgcccgacatgcgcacgcggccagacgtcactgcgttctctccccgccccccaggggagccgtctgacgtcacggggcggaggctgccgaaggcgccgccgttgaccctgctgttaccaggcgcg

SEQ ID NO: 669716 - DNA, 680 bp, Homo sapiens
ctgagtttttctccatcaaatgccaactgagaaaatgtacggtaccaagtaaaaacgcatggggacaagttcaaataatcttccctttgtttatgagccatgtattaaacagctgttaacacccgtcaagaggttttcactaaaataaaagtatccgcctctgacactcaaacgttttggtcaattgtaacaaaattaaacccactcatctcttcacactgaacgggggcggggagaagggacgctaaggtatgaaaagggaaaatgtaaaactgggcaaattttctattttaagatttccaaatagtgcctttaaaatttataaatagtgcctgcactttttctccaaaagcagccgcttctcaaagaggataaaccattcccggaaatgggcaaaagaacacactacagggtgcggaccgctacaggcaagggcggacaagactgccaggagcaaacgcgtccaggaaagaagccgcccaccggaaagtcccaactagagttcccttccttttcccctcggcgtgcggctccctgggtagggggaggagaaagcgcccgacatgcgcacgcggccagacgtcactgcgttctctccccgccccccmggggagccgtctgacgtcacggggcggaggctgccgaaggcgccgccgttgaccctgctgttaccaggcgcg

SEQ ID NO: 669717 - DNA, 1475 bp, Homo sapiens
cctctaaagtgttctacttcagaataactatccttcagaaagaggtcaagttaactgctgaaaatataaactctgcctcaagaaaaatgatttctcaaacatcgcattttctatctacaggatgagtctgtgatggtaaccctaaaccagcagaatagaaaattagttacagtcctactggttcacctattgcatgggtaagccagaaaggtgactagcaatgttatagaatggagctctttcctttggccttttactcagaaagttataattcaccaagaattttcaaccttctcaaccccggtccaaaataaaagagctaggcttttctcatctagcttcctcttaaacagaaaactatctgaaaacatttyatttaggaagggctaatttgaatacacctttaacatagctgcagcgggcacaatggctcacacctataatcccagcactttgaggggctgaggtgggcctatcacttgaggtcaggagtttgagaccagtctggccaacatggaaaaaccctgtctctactaaaaaaaaaaaaaaaaaagaaaaaaaaaattagctaggtgtggtggtgcacacctgtagtcccagctactcgggaggctgaggcacaagaatcacttcaacctaggagacagaggttgcaatgagccaagatcgtgccagcgcactccaacctgggcgaccgagcgagactccatctcaaaaacaaacaaacaaacaaacaaaaaacatagctgaaacaccaccacagaagacactcaacaatctgctcaaaatgtaaacttatttttattattattttgatatcattattatcttgataatattgatattattattttgatattattattattattatcggtcgcccaggctggactgcagtggcacaatctcggctcactgtaagctccacttcccgggttcacgccattctcctgcctcagcctcccaagtagctgagactacaggcgcctgccaccatgcctggctaattaaactttataggagatgtagctgtgcctcttcccaaagccaattaaaacttcattactttctttttacacccttctggaagcacaacaatctccacacaaacatttttgccaatagtaaaaaaaaaaaacagctgccaatccaatctggattctcactgcagaaaagtcaaaggtgacattatgctaggctgacacccaacacacaactccactgctgttgctgtgtcatatgtcacatgagcagccaaaagcaaaggtaagggagagggcaagaaagagaggaaaacacataagaaggggggtgatgggcaaaaaaaggaaccaagaaactcaaagtgaaaatgctatcctatttgtggttctggcctggcatcttccaggtaatgaacagactaatgtctgtggtagaaaatcctattatatccaacagtgatgtagaatcaatttgattctgcctacctccca

SEQ ID NO: 669718 - DNA, 641 bp, Homo sapiens
gatggaggaggaagaaagggaccatgccctagaggcggagctggcctcctccacctgaggccgagagcagctggggctggttgcagtgaggggactcaagaaggttcgagtggccagcaggggcaggtcacagagggccccagacccaaaccagggcgcttggacattaaggtgaaggtcaccgagaacagccggtgatgccaggggggccttgtggctcagaagggtccctacagttgcccctcccaggtgggaggaaggagaggctggactgcagagcaggaccccctgtgcgtccccgcacaagggctggaagtagggatgaaggaggctggggacggggcagcctgtcccctcgcgtcccctgctcttggagggcagtgaggctgcctctccctgcagcctctgcccctctcttccccgtccgtctcccttcctgcggaagccacgtggctccacatctcctggggtgtggggggctttgttgtgggctccaagggggagagacccaccsgggcaagggaagagcccggaaccttccctgggttgggtttaggtgttgggtgccgggcaggctgtttgtggaaatctgctgccctctgcaggatggttctagaaccacattcgctcaggggccctca

SEQ ID NO: 669719 - DNA, 641 bp, Homo sapiens
gatggaggaggaagaaagggaccatgccctagaggcggagctggcctcctccacctgaggccgagagcagctggggctggttgcagtgaggggactcaagaaggttcgagtggccagcaggggcaggtcacagagggccccagacccaaaccagggcgcttggacattaaggtgaaggtcaccgagaacagccggtgatgccaggggggccttgtggctcagaagggtccctacagttgcccctcccaggtgggaggaaggagaggctggactgcagagcaggaccccctgtgcgtccccgcacaagggctggaagtagggatgaaggaggctggggacggggcagcctgtcccctcgcgtcccctgctcttggagggcagtgaggctgcctctccctgcagcctctgcccctctcttccccgtccgtctcccttcctgcggaagccacgtggctccacatctcctggggtgtggggggctttgttgtgggctccaagggggagagacccacccgggcaagggaagagccsggaaccttccctgggttgggtttaggtgttgggtgccgggcaggctgtttgtggaaatctgctgccctctgcaggatggttctagaaccacattcgctcaggggccctca

SEQ ID NO: 669720 - DNA, 603 bp, Homo sapiens
tggattgtgctcctctaatatgaatctgagaacgtatttcgtatttacatgtaaatgcmgatttctctcacctgtcctatctcattcaaacatttccccctgaaatatgtcataaaagaccaagtaaaggccttcttttttaaagaacaccccaaacttgcaggttcccctctctctgcaaggacaggtgcaggtatcccatcaacggccccacccatccttcttgaacatacccataaaaagacaattattccagggccctcaaatctcattctacttctaaatccaaatggcgaattgcaaaggctgtggatatctgcatgaacagaagggcatcattaccttctctttcttatcttttgacttctttctttccttgtccccttctttgtctttcctagaactcatttgtttctccttgttctccttgttctctttcttcttctgtttttttttcattggacttttttccaagccatcatcctaggaaacaaaacagggctatgaatttttgctacaaattttatatctacttatgtactttctggaaaaagaagcactgcccccagtggttcatcactgtctatacttagaagcttgttt

SEQ ID NO: 669721 - DNA, 568 bp, Homo sapiens
tctaaatagataattagacagagagaagatattagatatatattttatatatttatggtatttcaattaaccatctttgagtccactaattttttgtgtccagtctactggtaagccaatccaatgcattcttaatttcggattttctatttctcagttccagaatgtacattaactattcatttttctacctttttattctctttaacgttaatcattattactttatagtgcttctagtaactgtaacagatggatcactgtggatctgcctttattgtctctttcaatctcccttacattttcattgtatgcyagacaatgtgtatatacgtacattggaaacctcacagcatatccccccagagcaggctaagggtctaatcactagaatccagtaaacaatttagctgtgttggggctgggtagcacttttaattagcctcactccatcttttatttatctgtgctcctcaggtgttactctcatgggtttctgattcagagtttatcagatctatttcctcttccttgaaatatttcacaacattcagttcttccattcaga

SEQ ID NO: 669722 - DNA, 548 bp, Homo sapiens
cggtgcttagccagctgcttaagttaattataaattttgctatctattgtcagaaatcacctgttccagactttggctataacayatgtttacatatccatatatacatttcttcttataattactttaggttcaaagaaagataaaatccctcaagtctgaggttgaatcttcctcatttccctaataaacaaaattgcttaaatcttaacaagatgtggctttctttggataaaatttgttattaaaaaaaacaattagcttaaaagaatctttctctgatatattattatatcaaccaaataaacatcttcatgtgtagaaaaatatgagatgaaaatatttaaggaacgtattaggtttattttgttacctctattgtttgctaaaaagattctaatttgaccttgctatgatcatatagtctacaaaaacatattcttaagatttaagactgtaaccgtaattttcattaaatcttcaaagtaaatttaatgggattttataaattagataatagttgtaattactcatacttactaattaaa

SEQ ID NO: 669723 - DNA, 601 bp, Homo sapiens
caatgcagaattccaggaacagtttgaataaaaaatatgttaaataaatatggccatatttatttaaaagttttgaaggaaaaagagcaatgttttttagaaaatcataaatagttttaaatgtcatgaaccaaataatatgaaattttactcagtccatcaaaggcaatcgaatctatagcaaactaattgaccttaagctatgatttcccaaaagatatttacaaagcagttcacagtatgaactggcatagacactaataaatgttacttttcaaaaacttacgttgaagactattttattcaaaatgaattgtgaaagttctgtaagtcaagcaaatcagatcaattctgcagcatcattmcatgcagcattgcctgctgggcccgtggtgtaggagctgtacaggagagctagaggataagctgtttaatgttataatatcatgagtttacattacttgaattatttggcaagaagcagaaagggaaaatgatagtgttggtccaaaaagacaactaaaataatgagtatgtgaaagagagtgatggtccatggaacactttatgagatatgtctagtaattttaaagtaattaaa

SEQ ID NO: 669724 - DNA, 1406 bp, Homo sapiens
atcaacttgatttttttgtgtgtatttttagatctaaaagttaacttccctactgctcctaatactagtggrccaatcctaatttattattccactctcattgctgtagaaaggtattggtcttgatgaaaatcagccctctgcctcacctgctactgccacaaaaagggactggaaaggttcttgctgactaatttactgttccctttgaacaagaaacagggcacagggaggggaggacttaactgttgagagattttgcatgtatcttagatgtgtgccctataacattacactgtctccaatttcatctttcagtcaaatcgctctgacactataagtaaaagttcaggtattcttaactctataccatcaaacatgaagcttttcttgttacaatagttaatctttctttggattaaaaaaaaagtttcccttaaagaaataaaactgtctacctaacctgattgctaaatttctggcttatatgttttaagcatgacccaaagagtcattcaggattctgtagcaactactgtttgcttataaacaaaaaagtaagaaagagattactaactctctagatagatttaaggatgaatcactgatatttccaaatcaaattatcattctaaacacgtaacaaatatatttttacattcaggattaacatgtctttaaaagctatccccaaccttatagtgtttttttgttcacacttttctgttttagtaataggaaaattcttatagttctgtgaatatatcatgccactccacaattacatgcttttcacatactattcttttcactgagagtgtttctgtaacttatctttgagacttccattttgccatcccaaaacaaacccacaatactcattaacactttttctttggttctttcctcagaatcccttaaatatttctccttttatgctcacctctccccaaaaaacatattgatgcttgccccttctaaatgtccttacctctcttctgacagatcttaatgttattgacaggaatcttcagtaattactgtccatgggattttatgttcttaagccatgaattccacatactatggaaaaactttgtctttctagaagcctcaaccactgagtcgttttactcccttatttatagcaatatttttcccccttttaactcctagcatgtgttttggtgacacagggacctatgcttaaattacaatcctttctttattatctatgtggtatgcacaacttttctaagcctatttccttttctctaccatggaaaaattatatttgctaatttacaagattattgtagtatttatattttttatatgaaatactatttgtgaaaatgtcatgtaagtaatagcggaccattcaatattagttttctttttctcca

SEQ ID NO: 669725 - DNA, 649 bp, Homo sapiens
aatatgtataggtaaaaatatgaaattattacatattttaaaacttcaaattttgcttagcttacctcccatttctgtcttaaaatataatacaaaattaatacaaatatattcgcattggaagtagaaattattttctggggttaacagtttgaagggaaattcataaatgaaacccattaacacacacagaattctcaatttgtcctacataatataacaagaataatttgaaatagaagactgcgattttgaattttaataaaatgaaggctaattcatatagttcaagttactctaagttgtaaccgaacgactgggtctatctaatatatttacaatcttcttgattttattctctgttgctacatcacagtaccaaagtgataggagctttccagggtaaaaacttyaggcttattaattttccttattgtgtgacttcatttatagtgcttttccttcttttctgttatgatatagcacacagacactgtcaacacttgactaaatttaataaaattattcattaattcagtctattaaaattattattacatatgattttacatttttcttgccatttagccaagataaaatatattggtatagtactaagcgttgtgttctaggtgtaatttttcttatt
